United States Patent Application Publication US 2008/0229439 A1 - sequence listing, part 5

SEQ ID NO: 11369 - DNA, 5475 bp, Oryza sativa
  Clone ID: TFbOSC22451j.C1.o20.fg
atgggcgacggcgagcgccgcgaggacgagaacccgaccaccagtgccgcagatgacgatgatgatgaggattatgatgaacctggtggagggaatcacttcttgggcttcatgttcggcaatgttgatgattctggtgacttggatgctgactatctcgacgaggatgcaaaggagcacctttttgcactggcggacaagcttggcccatctttgaaagacattgatctgatcaagccttctgcagcaccaactgatccttctgagcaagactatgatgcaaaagcagaagatgctgttgattatgaagatattgatgaagaatatgatggacctgaagttgaagcagctacagaggaggaccatttgctatccaaaaaagattacttctcttcaaatgcagtttatgcttcggtcaatagtaaagtttcagtgtttgatgaggagaactacgatgaggatgaagaaccaccaaatgataatgatttgcctagtgataatattgtgcaaaactgcacttcagcttcagctgagcaactggatatggcaccgtcaaatgacaaccttgctgttgaaaagatgtctagttcgttatcagaaccagaagaaagttttgaaagtgaagcttttcagaaagaaatggttgctgaagagcaacttgagtctaaaactgcaacttccctcccagttttatgcatagaggatgggagtgttatattgaagttctctgaaatttttggagcccaggagcctgtaagaaaagccaaaatggaccgccataagcgcccagtgaataaagagctccagattacaaatttcacagatattgttgaagaagacgaggaggtatttctacgcagcactattcaaaatttgtcagctttgaagcatatcaagacgaacgataattttgttgagagtgacagtgatgagtcaacttcagatgttgccttaagactgaaagactcgtgcctttccgaacaaccgatgaaagataaagatattcctactgctgtacaatctccagttttccctgatttttatccactcgagcatgaaaattgggaaaatgatattgtttggggcaattcaccaacaaccgcaattcagccttgcttaacaagctgtgcaatatccaaagaaagcttggatgaccacaatgaagaccaggccgagggttatgtctctgggtgttgggatgtacagaataaatttcatagttcttcagtaatggcagatccttttgggcatacagaaatacctgattcaactagttaccgttcccctgagaacagctattctccattaagaaaggagactgctcaggagaataacagcttagatgaaccaaataacataactcaaccggttaaaatcgacaccacacggcatttaaacaagctctctttactgaacaaggagttgttagaaggatcttggttggataacatagtttgggatcccagtgaggatgtaccaaagcccaagctaatctttgaccttaaagatgatcacatgctttttgaaatattagatgaaaagaatggggatcacctccgctctcatgctcgtgccatgattgttactcggccaatgaaaacttcagcagtggaaaatgttgaccataacaatcaagcaattgcattgagtgggagattcaacatttccaacgacaaattttattctaacaggaaaatgtcgcagcaagctagatctcatgctaaaaagcgtgctacaatgggcttaaagttggtacattctgttcctgctcagaagctccagaccatgaagccaaagttgagcatcaaagaaatcgcaaacttccatagaccaaaagctaagtggtatccacatgaaaataaacttactgctagatttcaaggagatgagtgcagtcatgggccaatgactgctattgtgatgactttgggaggaaaaggagtcaaatttctggtcaatgcagaggaaactccactttctgtaaaatcaaaagcttccaaaaagcttgaatttaaaccttctgagaagatcaaattgttctgttctggaaaagagcttcaggatgacatctccttggctatgcaaaatgtgcgaccaaactctattctgcatgttgttcgcactgaaatacatttatggccaaaagcacagagattgcctggtgagaataagcctctacgtcctcctggtgcattcaggaaaaaatctgacttgtctgttaaggatggacatgtatttttgatggaatactgtgaggagaggcctttgcttcttgcaaatgcaggaatggctgcacgactgtgcacgtattaccagaagacttcaccttctgaccaaacagctacatccctgcgaagcaacagtgatggactgggtacaatgcttgctattgatcccgctgacaaatctccttttctggggaacattcgttctggctcccaccaatcatgtcttgagacaaatatgtacagagcacctgtatttcctcataaggttgcgacgacagattatcttttagttcgttcacccaaagggatgctttctcttcgtcgcattgacaagttgtatgctgttggccaacaggtgaaaaagtcagtctcctggatttatcacagattgactagaagggcaactaatttcaaaattttattctcctggcaggaacctcatatggaagtattttcacctgggacaaaaaatatgcagaattatattctgaatcggattcttgtgtatgtatatcgtgagttccgtgctagggagaagcctggtattattcctcagattcgagctgatgaattacctattcagcctcctataacagaggctattaaaggaccaaagggacatttgttctatattcagagacctgattttcggattccatcggaggaagaactgagaagattattgacacctgaaaatgtctgctgttatgagagtatgcaagctggccagtatcgtctcaagcacttaggaattgagaagcttactcagcctgtgggacttgcatctgccatgaatcagcttcctgatgaagctattgagcttgctgctgcagctcatattgagagggaattgcaaatcactagctggaatcttaccagcaattttgttgcttgtacaaaccaggacaaggaaaatatagagagattagaaattactggtgttggtgatccatctggccgtgggctaggatttagctatgtacgagtaactccaaaagcacctgtatccaattcaacacataagaagaagtcagctgctgcaaaaggcaccactgtgactggaacagatgctgatctccgcaggttgagcatggatgcagctcgagagttgctactcaaatttggcgttccagaagagcaaattgacaagttaacaaggtggcatcggatcgcgatggtgaggaagctttcaagtgaacaagctgcatcgggtgttacaatggatgaaattccagttagtaagtttgcacggggacaaaggatgtcttttctgcagcttcagcagcaaactaaagagaaatgtcaggaaatttgggacagacaaattcagtcactttcagctatggacggcaatgaaaatggcagtgacacagaagctaacagtgatcttgactcatttgctggggatcttgaaaatttgctagacgcagaagaatttgatgatgaagatgttggtaatacagacataagaagcgataaaatggatggaatgagagggcttaaaatgagaaggtgtcatactcaatcccaaattaatgaggaaattcaagatgatgtagcagaggctgctctagtagaaaaactgcttgaagagagtgatagtgatatgaagaggaagaagcagcctgtggaaactacaaattatagcactcctatgtataatcagggcaataaaatgaagcagggtaaggctggccaaatgattaaatcgtctgtatatgccggtgcattaaccccaaaagagagcataccaagagaagccaaggaggttgaaaattttgctgaaggaagtttaccctcaaaactaagaacaaagacaggatttgatgcaaatgatgatattattctagtaaaaaggaaaaatatcccaggaaaggatgggttcaaggaaaagagacagggtgcaaggggagacactcttgtatgtggagcttgtggtcagctcgggcacatgcggaccaacaaactgtgccccaagtacggggaggaccctgaaacatccgaaatggatgtcaattccatcaggtctcatcctcctgatattgtgagtaatgctcaaataaaaacatcaaacaagaggttggtagcaaaagtttcgtctgaagcttttgaaactgaaggacctgaaagtattgaaaaggctaaacctgtccctgtaaaattcaaatgtggagcacctgagaagtcattggataggaacatgtcaatctcagcttctttggtttctgataaacgtatgatggatgctacagattcgaaatcaactggaaaggttaataagattaaaatatctaacaagataaaatatgatgattatcctcctgatactcctaagccatctgttgtaataaggcctcctgctgaagtggagaaggatctacctcgtaagaaaattattatcaagcagcccaaggtgcttggagatcagcaaagacctactgaacttaggagtggtcaggagcccagaaagacaaggaaaattgttgaattgtcaagctttgagaagagagacagagaggatgataatggtttttctggacaacctattcagatcaattcctcacatgatagggggtggggtctggtgggaaaaagaagcaaaggaataatggaaagtagtgaatcctggagagcttttgaggagcaacgagagagacaagaacagagactaattgaagctaggatatatgatgcaaggagagaggatgagctccagaaggcaaagaagaaaaacaagaaaaagaaaaaacatgaatttcgagatgatgacctacttgatcctaggccatacaaaaatgacagaagggtacctgaaagaggtcgagcggcaaagagacgtaccccagctgatatgacagaatacacaccaccagctaagcggcacagaggaggagaggttgagctctccaacatattggaaaaaatagttgaccacttgcggacaatgagctgttcattccttttccgtaaaccggtgacgaagaaagaggctcctgattactttgacataattgagcgtccaatggatcttggtactataagggacaaggtgcgaaagatggagtataaaaatagggaggattttaggcatgatgtggctcagatagcactgaatgcacatacatacaatcttaaccgccatccccacatccctccgcttgctgatgagctcttggagttgtgtgattatcttcttgaggaaagcgcggatgtgctagatgatgcggaatacgcgatcgaggactag

SEQ ID NO: 11370 - DNA, 846 bp, Oryza sativa
  Clone ID: TFbOSC400632j.C1.o1.fg
atgcgtaaggagaaaataccgcatcaggcgccattcgccattcaggctgcgcaactgttgggaagggcgatcggtgcgggcctcttcgctattacgccagctggcgaaagggggatgtgctgcaaggcgattaagttgggtaacgccaggatcaattcctcacatgatagggggtggggtctggtgggaaaaagaagcaaaggaataatggaaagtagtgaatcctggagagcttttgaggagcaacgagagagacaagaacagagactaattgaagctaggatatatgatgcaaggagagaggatgagctccagaaggcaaagaagaaaaacaagaaaaagaaaaaacatgaatttcgagatgatgacctacttgatcctaggccatacaaaaatgacagaagggtacctgaaagaggtcgagcggcaaagagacgtaccccagctgatatgacagaatacacaccaccagctaagcggcacagaggaggagaggttgagctctccaacatattggaaaaaatagttgaccacttgcggacaatgagctgttcattccttttccgtaaaccggtgacgaagaaagaggctcctgattactttgacataattgagcgtccaatggatcttggtactataagggacaaggtgcgaaagatggagtataaaaatagggaggattttaggcatgatgtggctcagatagcactgaatgcacatacatacaatcttaaccgccatccccacatccctccgcttgctgatgagctcttggagttgtgtgattatcttcttgaggaaagcgcggatgtgctagatgatgcggaatacgcgatcgaggactag

SEQ ID NO: 11371 - DNA, 2169 bp, Oryza sativa
  Clone ID: TFbOSC417054j.C1.o1.fg
atggcgaagacccggaaggccgcggccgctccgccacctccgcccccgcccccacccgcggagaccccagcgaggaggaaggggaagaagaaggggcggccgtccctcctcgacctgcagcggcgcagcctccgcctccaggcccaaaaccctagcccggccccgtccccctcgcggcgggacgccaatccgtccgacgaggacgacgacggggtcgggagtggggggcgccgacggcagaagcggctcaagagcgtcctctccagcagcggcggcggcgaggtcgggcgcgctccccccctcttacctgtcgcgccaatttttcgaaatttgcccgaggtttttgggggcctccccgaggagaggagaggggggtttttgccgtgggacacgcggcgatgcggttgccgtagtggttggatctgcgattttggaatttttttgaggggggtgggtttcgtggatgatgaggcgcccgcggccgccgtggtggtgaaggtggaggtggaggagaagaagaagaaggtctcgtcgaaagcgaccgggaaaggggacgctgcgtcggatggcgggcccactacggggactcccctcccggacaaaaagttgcttctcttcatcctcgacaggctccagaagaaggacacctatggagttttctcggagcccgtcgaccatgaggagcttccagattaccatgagattatcgagcatcctatggacttctcgacgatccgcgagaagctgttgaatgactcgtataccaccctagagcagtttgagaatgatgtgtttctacttacatcaaatgccatgtcctacaattcagacgacacagtctactatcggcaggcacgatctattgaagctctggccaaaaaggatttcgagaacctgaggcaagctagtgagcctgaagaagaacaacaacccaagactgtacccagaagaggcagaccaccaaaatatgcaaagaaaattgagaagactgaaaatgatgtttcaccagatttatccaatgcaaaaacaaaatctgcagaccatgctgaaacaattagaaaaaggttgactggggacagaactcgaaatgcaaatatcacaacaagagactcaccctttcttcaacataatacacctggttcttttgctggtaaaagaacagatagatttggtgattattcagggccttcgaagtacggaaagaagaccaccccgactatttcagatgatgagcgtcgtagtacatacgatcagcaatacttccatagtagtcctctgttttctgcccttggtggtgagaggaaagtacttgtgccggtgggacttcaacagcaacatgcatatgctaggagcttggcgcggtttgctgcaaaatttggtcccgtaggctgggacatagcagcaaagagaatcagacgactactgccttctggaacaaattttggcccaggatgggttgtggatggtgagccacctgagaactctcagtggcctcgagttcccatgctctctgatccatccatccagtctactggtgttccagctagcaacgtaatatccaagaatgatgaatccaatcagaagtctggactgacttcgaacgaggattctggtgaagagcatctagctagaaccgagccagtggcttctacatctgcatgcgttaacacaaactctgtatctgccaccaagctagctaccaagtgtgaaaacggggctaatgtgtcatgtgatggtgtgggtagtactggacagacacctcccttgcagcagcacagccatagtcgagagatccactcaaatatgaatggcttcactgccttgccaaacacaattagtcaatacgcagggcaaggattcttgggacagatgcagttgacacatgctcaagttcttgggatgttttccggagtcaatggcagaacaaatggctttatccatgggcacccactggtggctaatagcattaaagcaccacaaaatggggatgttggaaaggtagccactaatccatcaccagatgcaggtcatgattcagaagctgcattatcacaaaccatgactagttctgctccaagtttaagtgctggtgttcaaccatcaggttccatgccaagcgaaaagttagcaaatccaaaaaagcacccggacttggcattgcagctctga

SEQ ID NO: 11372 - DNA, 1752 bp, Oryza sativa
  Clone ID: TFbOSC410643j.C1.o12.fg
atggacgggctcgcggcgccctcgccgtcccactccggcgcgacgtccggcggcggcgcctcccaccgcaagcggaagctcccgccgtcgtccctctccgacgccaccgccgacgaggacgacgacaccaccgcgccgtcgtcgccgtccacctccccgtcgtcgccctcacgcccgtcctccccgtcctcctcccactccgacgatgacgacgacgactccctccacaccttcaccgccgcccgcctcgacggcgcgcccccgtcctcatccggccgcccgccgaagcccgagtcctcgaccgtgtctgccgccgccgcggccgcggctgcagcggccgctcccaagcccgattccgcttccgctgccgccggcgacggcaaggaggacccgaaggggttgttcactgacaacattcagaccagtggcgcgtatagcgctcgagaggagggcctcaagcgtgaggaagaagcagggaggctgaaatttctatgctattctaatgatggagttgatgaacatatgatttggttggtaggcttgaagaatatctttgctcggcagcttcctaacatgcccaaagagtacattgtccgtcttgttatggatagaactcacaaatcaatgatggttatcaggaataatattgttgtaggaggcattacttaccggccttatacaagccagaagtttggagaaatagcattttgtgcaattacagctgatgagcaagttaaaggctatgggacacggttaatgaatcacctgaagcaacatgcccgagatgctgatgggctcactcatttcttaacttatgcagataacaatgccgttggctattttgtaaagcagggtttcacaaaggagatcacattggacaaagaaagatggcaagggtacattaaagactatgatggaggaatattgatggagtgcagaattgatcaaaagttgccatatgttgatctggcaacgatgattaggcgtcaaagacaggcaattgatgagaaaatcagagagctttcaaactgccatattgtttattctggaattgacttccaaaagaaagaagctggtattccaagaagaacgatgaaaccagaagacatccaaggcttgagggaagctgggtggacgccagatcagtgggggcattccaaatcaagatcagccttttctcctgattacagtacttacaggcaacaacttactaatctaatgcgttcattgttgaaggcaagtcttttatcttcgcaaatctttttatatgacatgcaaccatttggtttgacctcactggataaacctgtactttgcttgctcccttttgaattttttgcaccctttctgtttcaagcatattttctaaagccagaccagctggatggtctgttcaatggttcaatgattgaaatggccacattttataagtttaatattcaaatatttctgaatatgaatgagcatcctgatgcttggccattcaaagagccagtggattcacgtgatgttcctgactattatgacattatcaaagatcctattgatttgaagacaatgtcaaaaagagttgagtctgagcagtattatgtgacgctagagatgtttgtagctgacatgaagagaatgttcagcaatgcaaaaacttataactctcccgatacaatctattacaagtgtgcctcacggctcgagagcttcttctcaaacaaagtagcatctcagcttgcccaagcctcaacgaagaactga

SEQ ID NO: 11373 - DNA, 540 bp, Oryza sativa
  Clone ID: TFbOSC34007j.C1.o1.np
caatgccagtagtcgatctagctaacatataagccacctcattagcacttgtactaccatttacttgaactaaagaaaccgttccccgccaaaaaaaaaaaaaccgcaaataaaacagaaacatggcagtggtggccggaaggctggtcgcaaggatagcagcctttccaaagggatgcctgatcttatgcgccagtttggcacgattgtgcgccagatcacatctcatgaatgggccgagccatttctcaagccggttgatgtggtaggccttcagcttgatgactattacaagattatcaccaaacctatggatttttcgaccatacaaaagaaaatggaagggaaagatgacaacaagtataacaatgtccgagaaatatattcggatgttagattaatttttgccaatgcaatgaagtacaatgatgaacgacatgatgttcatataatggcgaaatcattgcttgagaaatttgaagagaaatggctccagcttcttcctaaagttgaaaatgaggtgaatgaatgtttgtaagc

SEQ ID NO: 11374 - DNA, 1485 bp, Oryza sativa
  Clone ID: TFbOSC12509j.C1.o3.fg
atggtggtggtggtggtgggaggcggaggaggaggaggaggaggaggaggggtgaagaaggaggagggggaggaggaggcgaggggaagaggaggaggaggcggcgtggtgggagggtgggggacgtgggaggagctggtgctgggcagcgccgtcatccgccatgggggcgttgcgtggggcgccgtcgccgccgaggtccggtcccgctcgccgtgcgccttctcgcctgaggaatgtgaagctaaattttcagagatacaagcacgctactctgcatgcgatgcttggtttgaggagctccgtaagcggagagttgctgaattaagaaatgatctgaagaagtctgaaaattttattggatccctgcagtccatgatcaaaagcctcagcaatagcaagcatgatgatggcaactctgaatgtcacactagtcatactgagtcatgttcaaataatgaaaatacagctgataacaattcatcaagcaaagcattgtccaaagatagatcatctgctgctagttttacagaggaagcaagcaacagtcagaaatctgaaaaggtgcaacactgcgatactgattcaattcaagtgaacaatacttcagcagaggctttggtaaaaccccttgttgaaaaaaaggtttgtgctgaagatggtttgctttggggctctagaaagaaaagggccgtgagggataggaggacttttctgatggctgataatagttgcagagctggcgagaatacatctacatcacacatacagacagatggttcctctgaaggctatgcaaagaagggcttgaaaactccaaatctagaatctggtgtgtctgtcgttgagaaagcaaaaccaaacttggcagagattttgaaaactatatctactcaaagtgactgttatatgttgcaacgccgacttgatgtccagcggaagcggactagatacaagaagatgattcgccggcatatagacttccgtatccttcattcaaagatcaagagtggcgcaacatcttctaccaaggagcttctaagagacattctactgtttgtgaataatgtccttgccttctatccaaaggctacgttagagcacatggctgcaattgaacttcgaaatattgcattcagaacagtgcaagagagcgcaagcatgccctctaagagttgtggagtaacaggagcagcaactgcccctttagtgaagaagaacacccgacccgtgcagcctggaagtcatgggcctcatgatgcaaagagaagcaaagtttctttaaaggggactggaagtactgtcaagcagggtgaggccaagggatcgcgtggtggttcatcagtgacagctaatgtaaaaactatgcagagaaatccaccggccaagaagagaggcgttgggcggcctccaaagaatgggcagaagcgtgctgctgcacagcaagatagccctaacaaaggcaggaagaggacccgacgctga

SEQ ID NO: 11375 - DNA, 571 bp, Oryza sativa
  Clone ID: TFbOSC7812j.C1.o1.gp
aaagacgataaacattttatcatttttattgatgatttacggggtctatacacaacgaataacacggtagtgcattttacactaccagctttatctctaacaaggcccttgatgttccttttgtcgaatcggtaattgatttttcttcacgaagatctaatgatcagaagcgttagttaagatcaacttgtgcaagcaaaacaatgcattaaatagtgttaagctgttgagcatcttgaaaactactttagtattcctctaacaaaattttccgcagtaacacctgtagaatcatactgtggctgcgaggcaaattctgcttgcacaaaaagaagcctgttaactgggcactaaccatcaagcaccactctacaatgatgaaaaggtttgttcgatccaatcagatagcctccgaatttttttggtcatatcagtgctctttgagaaataagactgggcatttgcaagcatcacagtcgcatcatgtcgaatagcttccagagttctgtagtaattgttctcaagccttatcctaatcacctcaatggaaaactggacaggaaacctaggt

SEQ ID NO: 11376 - DNA, 1551 bp, Oryza sativa
  Clone ID: TFbOSC400755j.C1.o21.fg
atggccttggcacagccaacattgacacttacccagcgctgtgggcctgcgagatatggtgagagcttgcctctatctgaatcttctggccctgaaaagaagctaaaattatttttctttgtcaagaccaaaaagtatttattcaaaccaaacactatgaccacacaagcttgtaagaagagaagagcagtttatataagcagtgaatcagaagactctggtacagactctgaggttgagggaagcaaactctccaaaaaagatggggtcacgtcagtctatacatgtggtcaccagccaacctctaagaataaggttgatccgatgaatactagcaagtcaaggcagtgtggaagtattctgaagaagctcatggatcacaaaagtggatggatttttaatacaccagttgatccagtggtatatggaattcctgattactttgatgttattcgcaatccgatggacttgggtactgttaaaaggaaactcacaagcaagcaatattccaacccttatgagtttgcagcagatgtgaggctaacattctcgaatgcgatgaagtataatcctccaggaaatgatgtccacggaatagctgatcaattgaacaaaatatttgattcggaatggaaattattggaaaggaaatggaaagacagaaatttggtacaagagcagccatcactgaaggtattaaaggctcagcctgctgttaccccaaaacctgtgctacctaagggggtgactgcaggcacaaattcagctgtgagcaagacactggcaactgcattatcctccaaagtaaaaattaaattttctgtgcgaggctctgagctgacctcttccaaagacacgcctttgcaagcagttggcagaagagacggcacaattaaccaatctctcccttgcaccaaggacaatgctaagacaccaaggatacaatcaagtgaggacagatctgaatcaactgaagaggaatatttgcctgaagaacctttatcaccaagcaaggctcttcgtgcagcaatgctcaagagtcgttttgctggtacaattgtcaaggcgcagcagaaagcacttctggatcatgggaagaaaatagaccctgcgaaattgcagttagaaaaggagaggctggaaaaaaggcagcaagaagagaaagcaagaattgaggcccaggtgaaggcggctgaagctgctgcacaattaaagctagacgaagaaatgaggatgaagagggagcaggaaagacgagcagcacgcctggcactacacatgatgaagaagactgttgatattgacaacagtgacttccttaaggacctggaaaacttaagcaaaaagtgggagctgaatccccctggcaaacttattgttgattttgtcgacgggatcgatctaccacctggcttagggagtccgctagagaggcttggccttttcatgaagaaggatcttgaggaagaggtcgaacatgaaatggaggacagtgtatcaccatctacggagatcgacgtggaggaaggagagatcagcttctgtcaatag

SEQ ID NO: 11377 - DNA, 300 bp, Oryza sativa
  Clone ID: TFbOSC11395j.C1.o1.fg
aatatgaatgagcatcctgatgcttggccattcaaagagccagtggattcacgtgatgttcctgactattatgacattatcaaagatcctattgatttgaagacaatgtcaaaaagagttgagtctgagcagtattatgtgacgctagagatgtttgtagctgacatgaagagaatgttcagcaatgcaaaaacttataactctcccgatacaatctattacaagtgtgcctcacggctcgagagcttcttctcaaacaaagtagcatctcagcttgcccaagcctcaacgaagaactga

SEQ ID NO: 11378 - DNA, 2376 bp, Oryza sativa
  Clone ID: TFbOSC401282j.C1.o16.fg
atggggaagacgcagaagttctccaaggggcacccgctcggcttcgtgccggattaccggcacggcgtggagacggtgggggagtcgaagggctgtatcgggagcccggagcggatcgtatcggggagctcgtgtgctgtgccgaagaggaaatgcggaatcctgaagacagaggatggaggggagcttccggggttcaatgtgccgcgggacgtcttcatgctgccgaggatgtcgccttcggataaaaaggacctcgagatgaggctccgcaaggagcttgagcaggttaaggccctacagagtaggctgtttttgaggccggctgcggtgagcatgaatggcggggcggcgtcagcttctggagacgtagttgcaaagagaaacgatgcgaagcttaaacggagcaattcagtgcagtctggcagaggagtgccaccatcagcagccacacctgtggtcaggtctgcaaactacgcagaagcttttaaacaatgtggcaaccttctgaagaacctcttcaagcatcagtgggctggtccgttccttgcgccggttgatgttgtacagttgaacattcctgattattttgacataatcaagaagccaatggatttgggtaccatcgagaaaaagttgaatgcaggcatgtactctacaccttgggattttgctgcagatgtgaggcttacttttgacaatgccgtgacttataacccagtcggtaatgacgtgaatttaatgggcaaaactttgaaatgtatttttgaaactagatggaagtttatcgaaaagaagcttccttcactagatgataaattctctgtgagaagagagccatcacaaaagggtgcagttaagaaagataccattgagaaagattacccttctgagaaaaagcactcgacaaaaggtgtacacaagaaagatatgtttaaaaaagaggatgcttcaactaagccagctttgcaaccaaagaagagaaaagcttctcccttggttcagggttctcttgaaatacctgtagtagaagctgataaggtcattgatgatgctcaagtggtacagccttctaaggtgattgatgatgcccaagtggtgcaggcttttaaggtgattgatgatgctcaagtggtacaggcttctaaggagattatgacggacagacaaaagtatgagctaagcgtaagacttcaatcatatggtgggttgattccaaatcatgtagttgatttcataaggagccaccttcctgatgataatgagggtgatgaagatgagttagagcttgacatgaatgtcctaagtgatagtacattgtttgaacttcagaagcttcttgatgactatgatagggtaaatcagtcaggaaaccctacaaaagatgagcatcgtgaggttgagtttgaaagtgaatatgggcttagcaactcatcgatgcatcatgaagaaggtaatgagctcgttgaagaagatgttgatattggtgggaatgatcttccacctttgacgtatcctcctgcagtatttgaaagtgaaactgcagaaagaagcagcaagcatagcacttctagcagttctagtagtgattcagaatcatcctccagtgattcagattcaagtagctcttctggaagcgatctggatgtcaatgttcctccatcaacaagtggggccaaggacaacacgcaatctgcggttaggttggatcaggaaaacgatccactgagctcgaccaatctaccacaacaaagtagtgatcctgtacctatttctgccgaagatgagggggagaatgtgtctgagaaacaggtcccccctgcaaagcaataccgagctgctgttttgttaaaccgctttgctgatacaatttttaaggctcgtgagaaaactcttgatcaggtcgcgaaaaaggatcctgagaaacttcaacacgacatggaggagcttgaaaggttacgaagagaagagagagctcggatacaagctgaggcaaaagcagctgaagatgctcgcaagagagctgaggcagcagcagctgctgaggctgctgcagaagctaaacgccaaagagaacgtgagagggaagcggctcgtaaagccttgcaacagatggagaaaactgtagacatcaatgaagggaacctctttttgaaagatcttgaaatgcttggaactgttacatcaggtgaacagtttcccagctcggttggtgagacgagtccaactcatacgcctgaaggccttggatttcagctaggtagcaaccctttagaacagcttggtttgtatatgaaaaatgatgatgaagaggatgaggaaggtgagtctgcagatgaaccaacgattgatgttgaggagggcgaaatagattga

SEQ ID NO: 11379 - DNA, 1773 bp, Oryza sativa
  Clone ID: TFbOSC400140j.C1.o16.fg
atgaagcgcaagcgtgggcgtaagatgggcaagaagggcaagttgaaagcttccatcacagcggatgcttctccaatgtccccgtccagcccgagcaccgtggatgcttcctcaaagtccccctccagcccaagcacagaggagaacggcaccagcccagcgcatcatcaggcagataatgcgcctgttattgctccgccaccagtgcctgaaccagcacctcctgagccggagaagccagccgtgtctactgacgtacagaatgctaagccaaaagtctatagccgagtcaggttgaagttcaaatctgccaaagtgttggagacgcaccagggtccttcagaagcaaaagcacctgttgatggtggtggtggtaaacctgcaagtgctgctcctgaagcgagcaaagaagttgcggagaaggctattgtatcaccagacggacagaaagatgcgcaggcagcagaattgagtggttctgataaggataagatggcaagaaaagtagcaagcataaatatcaagtctgtaggattatcttcggtagaagataaaaatcaggacaggaaagctgattcagtcagtgaacctcttccaagcaagcaggaaaccgtattggaaaatgtagaaagcgagactgcattggagccgagaagctcacaagagttggaggtaaagcaggctacgccagaacgtcagcgagatgacagagagctaactgctgcacttgaagctattaagaaagtcatgaagatggatgcagctgagccgttcaacacaccggtggaccctgttgctctaggaatacctgattattttgatattattgatactcctatggattttggcacaatatgtcaaaatctagaacgtggtgataagtatatgaactcggaggatgtgtataaggacgtgcaatttatatgggataattgtaccaagtacaacagtaaaggtgattacattatagagcttatgaaacgggtgaagaagggcttcatgaaaaactggctggcagcaggcttgtattctgatgcgcaggagaatggtggcaatgataacacaggcgatgaggatgtcaaaggttcaaaaggcaagtctaagcaaaaacggcggcgcctagggaatgatcgacacaaaaatgactgtgcatgtgctgtttgtcaagttacacgccgcaaaaaggaaaaggatgaaatcttggctgtcattgaaaacgatacagctgcagtgaatagtaacatttctgaccagcaaatcatggaggtagactcaggcattaataacgctggtagtcatgacactacctctagtcaggagcaaccaccacaaactgatatgtacagaagaacagtggtagcagatgattcagggactctgatagaaaatcatgtgaaattcttcaacaaccagccactgccacatgattatgaggatgaaggctccagaccatactttgacgaaaaagaagaggtagactatacggatttgatcagtcaggaggaacatacatccagtcagcccaatgatggctccgaaattgcacaacaccaacataaggagccaacagaaacaagccaggagattgaaatggaggattatcccatacagaaggagaaccaatcattcttgcaactctgcgcacggcttttccccagcaaccagagttctgttttcaggggacgccattctctgttccgacagcaacagcggcaggtttcaatgaagggaagccctctgcatgcggccataacagcgataatgaaacggtag

SEQ ID NO: 11380 - DNA, 1035 bp, Oryza sativa
  Clone ID: TFbOSC34011j.C1.o25.fg
atggcggcggcggagacggccgccactgccgccgccgccggggagagggccccggggacggaggtggacgcgttccggcgccaggtcgaggacctcgtctccaagaccgaccagctggagaggagggtgaatgaagtggtgggattctacgacgggaagaaacatggcagtggtggccggaaggctggtcgcaaggatagcagcctttccaaagggatgcctgatcttatgcgccagtttggcacgattgtgcgccagatcacatctcatgaatgggccgagccatttctcaagccggttgatgtggtaggccttcagcttgatgactattacaagattatcaccaaacctatggatttttcgaccatacaaaagaaaatggaagggaaagatgacaacaagtataacaatgtccgagaaatatattcggatgttagattaatttttgccaatgcaatgaagtacaatgatgaacgacatgatgttcatataatggcgaaatcattgcttgagaaatttgaagagaaatggctccagcttcttcctaaagttgaaaatgaggaaaggaaacaaaaggatgaggaatccaacggtgttccaaaagtgaacatttctccagaagaagctattgcaaaactagcaaaagatactgacaatgagctgattgaaatcaacaagcagttggaggagcttcggcaaatggtggtccagaaatgccggaaaatgactacatatgagaaaagaaaactgggtgcaggtctctgccacctgtctccagaagagcttactaaggcattggagatggttgcacaagacaaccctagcttcgaagctaaaggagacgaactggaacttgatatggatgctcagagtgagacaaccctctggaggttgaaattctttgtgagggaagcattggaacgacaggccaacgtcgcttctggcaggactgatgaaaatgcgaaaagaaagagggagatatgcaatgctctggccagaactgcttcaaaaagagtcaagcagcaacctaattag

SEQ ID NO: 11381 - DNA, 1950 bp, Oryza sativa
  Clone ID: TFbOSC407196j.C1.o12.gm
atttctatgcagccacttctcgtctccagccacgcgtggtccttcacctccctgtgcgagggcgccaggataggaaggagaaggaagatgaagcgcaagcgtgggcgtaagatgggcaagaagggcaagtcgaaagcttccaccacagcggatgcttctccaatgtccctgtccagcccgagcaccgtggatgcttcctcaaaatccccctccagcccaagcacagaggagaacggcaccagcccagcgcatcatcaggcagataatgcgcctgttattgctccgccaccagtgcctgaaccggcacctcctgagccggagaagccagccgtgtctactgacgtacagaatgctaagccaaaagtctatagccgagtcaggttgaagttcaaatctgccaaagtgttggagacgcaccagggtccttcagaagcaaaagcacctgttgatggtggtggtggtaaacctgcaagtgctgcgcctgaagcgagcaaagaagttgttgcggagaaggctattgtatcaccagacggacagaaagatgcgcaggcagcagaattgagtggttctgataaggataaggtggcaagaaaagtagcaagcataaagatcaagtctgtaggattatcttcggtagaagataaaaaccaggacaggaaagctgattcagtcagtgaacctcttccaagcaagcaggaaactgtattggaaaatgtagaaagcgagactgcattggagctgagaagctcacaagagttggaggctattaagaaagtcatgaagatggatgcagctgagccgttcaacacaccggtggatcctgttgctctaggaatacctgattattttgatattattgatactcctatggattttggcacaatatgtcaaaatctagaacgtggtgataagtatatgaactcagaggatgtgtataaggacgtgcaatttatatgggataattgtaccaagtacaacagtaaaggtgattacattatagagcttatgaaacgggtgaagaagggcttcatgaaaaactggctggcagcaggcttgtattctgatgtgcaggagaatgccgccggcgaggaggatggcgcgacgggcggccgcggccgtgtcgggatcctcgtcaacgtcgcggcgaacccgtggctcagcgaggtcgcgctccggcgggtcggcacgtcagcggcgatggtggaccggctggtggagatgctcacctggaacggtcgtgacaaacccgcggctcggcgaggccgcgctccgacggcaagaagcgggacgcgctccggcgccatcgagtcggtgtcgtcgctgcttttcgtcgccgacgaggagtgcaacctcctaggcctcctctttgccatgcaggttggacctgggcacctggctagcttgcacggtggtcggcggacagttgccggcgtcgaccggcggcttgggggccagcgacgtgcatcggctctcaggctcggcggcgtgcggctagcgacgaacggcggagggtggccggcgacgagcggcggcacggcaaccggagtgcggcgagcggcggtcggcggcggaagcgtccttcttgtttttttgttcggtggcggtggccgcgtggggcgtcgcctgccgccaccgccgcgcctccgcttccgctccgctcgcacgccgcctccgccggccgcatcctcccgtccgcgctctccgccgcggagagatcgagtgccgctgcatcctcccgtccgcccctttgccaactccctcctcgccgcatcctcttcgatggagagccagacgaggccaacgggcgcgaggcgggagaggagatccggccgacgacgcggtgacggccctcgccggccgccgctcgtgcagctgctgcccctccgcctgcgcccacccgcacgctgctccgccgtccgcggcccatggagaagagagagggagaggtga

SEQ ID NO: 11382 - DNA, 564 bp, Oryza sativa
  Clone ID: TFbOSC405157j.C1.o1.fg
atggagacacttgtgcaagggcggtggcgccggccggtgcattcgctccggcaccttcaccgtcggcggctacgactggtgcatctgcttctacccggagggccagggcggggcggcggcgaccgggaacacgtctcggtcaagctcaggctggtcacccgctgcgccacggccaccgcgttctacgagctccgcctgctcgaccaggacaccggacgcgccgccgacgttgaccgggcctccggcgcgcccagggtgttcgcgtcgagcaatcccggcacagcgtgcttcggccgccgcgcgttcatggagcggagcaagctggaggcgtcgcccgcgtgcctgcgcggcgacagcgtcgtcatcgactgcgccgtccgagtcgtcgtccacgaccccgtcgtctccgccgtgcggcgccgcgaggcgccggacgacgtcccgccgtcgaacatactccggcagctggtggcgcaggtggagtccgagggcgccgacgtgacgttccccgtgcagggggagacgttcacggcgcaccgcctgatgctcgccgcgcggtcgccg

SEQ ID NO: 11383 - DNA, 1428 bp, Oryza sativa
  Clone ID: TFbOSC400305j.C1.o20.gm
atgcgttgctacgggaggaaaagaccgtggaagcgggcgtcgttctatggcagagtccgtaatgtcaacgaaggagtaatcgtggcggagctggtggagcaagacggcgtcaggagctcttgccggcatggcaaggaaaagcttgctggcggcagcaagatgacgacgcacggcttgggagggacagagcggcatggaatgaaacaattcacccaaggccacgacagcgagcctcaaccttgcgtggcccacgagaagcaggcgcaaggccggttcagggtgacggctaggttcttggaacttgaaagacagaaactgaagaggatggggtccaagaagaggatgtcaaggtacgccaagaagcacgaggaggccacgctcaagttcgacgtcgtcgggtacagcctcaacgagggcatggccgccggcgagttcatccggtcgccggccttcgccgtcggggctacgactgggcaatccgcttctaccccaacggcgccacgatgccctaagcctcagcgctcaaatccgatgcaaagatatcgtctggagaaggaagaatcaggctacatcaaggacgattgcctgaaaatcgaattgcggcgcacaagagcgtgctcgcccgtcttcaaggcggagctctatggagggatgaaggagagggaggcccgtagcgtgaccgtggatgacacgcagcctgacgttttcagggctctcccacatttcatgtacaccgactcgttgcccgacatggacggcgttgaagatgccgactatgttgaaatgatcaggcttctactcgtggccgcggatagatatgccatggataggatgaagttgctgtgcgaaagcgtcctcgatgatttacttgatgcggagacagttggaactacgctagctttagctgatcagcatagctgcaacaaccttaaggatgtttgcgttaaatttatggctacttcaaaagggatggatgctgtaatggcaactgaaggctatgataatctcaagagaaattgtccttatgtcttgatagatgtgttggagaagcatgccagcgtagcaaactcgggtgaaaacgttgtggacccacttgttaatctctcactgcccttcatctcccctgcgttcatcgccggctcgccaccgccacccctcttctccaccgcgcggccgaccgtgccccatcgacaccggcgccgcctcgtggccgaccaccgccgggaaccgttccgcagccgccaccccatcgttacggcagacggggaggaggacgagcaccatgttgagcttcagcgtctcggcgatgccctggtcggccacgaggcggcgccggcgtcgatggggcggtcgcagccacgcggtagagagaagaggggcggcggtggcgagccggcgatgaacgcgaggggagatgaagggcagtga

SEQ ID NO: 11384 - DNA, 471 bp, Oryza sativa
  Clone ID: TFbOSC400049j.C1.o21.fg
atggagccacaggtgttcaaatccttgctcactttcatttacactgactcgttgcctgagttggaggacgaagaggaaactgaatccgatcgagatgaagaagaagatcaggagagtgaagcagatggagtacacggagaagattacgatgacgatgacgatgatgatgatgatgacaatggtggtgatgagatgtggtcaccattgctcgtagcggcagataggtacgatctccagaggctgaagctgatatgcgcgaagaagctgtgcgagcggatcgatgcgagcacggtggccgataatcttgggctcgctgagaagcagcattgccgtctgctgaaggaggcgtgcttggagttcctcaaagctccggcgaatttgaaggttgtactggcgagtgacggcttggatcacataactgcaacctgcccctctgttctgaaggagctccttgctaagtttgcatcttaa

SEQ ID NO: 11385 - DNA, 834 bp, Oryza sativa
  Clone ID: TFbOSC415318j.C1.o6.fg
atgtccactcactccactgagcttgtcaagggctcgcatgagttcaccgtcgccggctacagcctgcagaagaggaacggcaccggacacttcgtcaggtccggctcattcgaggtcggtggatacagctgggcgatccgattctaccctgctggcagcacaaaggaagaagaaagacacgtgtccgtgttcctcgagctgggaagcactgtggtagagaaagttaccgcaaggttcagattccgcgtcaatggcgctaccgcgagctcgtggggccagtttaacgacttcacacttagcagcaaaacatgggggtaccagaaatttatggagatagaacccgtggagtcggagtacctgatcaacgactgcctgacgatgcactgcgacgtggaggttgtcaaggagttgaagaccggagcaaccatgagccgcttcatcacggtgccgccgccagccatctgctgtcatctcgagcagcttctggagagcaaggaaggctgcgacgtgacctttcaggtcgagcgcagcgactacgacgcgcacagggtggtgctctcggcgcggtcgccggtgttccgcgcccagttcttcggcccaatggcggacaccggcggcggagacaggcctactcaaactgtttttattcctgggaggaacattataggagtggttattctacatgagacgttgtatgaattacatcgtaaaggaattccaatgcattttaggaagcattctaataaatattggaaagttattgaagaaagaattgagaaaaaacttagtagttggaaagatagaattatcatcacaatggtaggttctcggtaa

SEQ ID NO: 11386 - DNA, 369 bp, Oryza sativa
  Clone ID: TFbOSC405123j.C1.o1.np
gccatggacgacctcgacgacgacgacgacgacaaggcgcatatgatcatgcaccttctcgaggccgccgaccggtacgacgtcgagaggctgaagctgatctgcgagctcatgctctgcaagagcatcgccgtggacaccgtcgcggcgacgctggcaatggcggatcagcaccattgccagaagctcaaggaggcgtgcatcgagttcttggccacctccaagaagatggaaggcgtcatggaaagccaagggtacgagaagatgaagctatcttgcccttctttcatggtggatttgtgggagataataggcaggaagaattataaagttttatccgattcatgacataaacaacaagtatttata

SEQ ID NO: 11387 - DNA, 1044 bp, Oryza sativa
  Clone ID: TFbOSC400964j.C1.o15.fg
atgtgcgagggtgtgcgggccgccggcgacgccgccgccgccgccgacgtcgacgtcatcacctcctccggccgccggaggatccccgcgcattccactgttcttgcgtcggcgtcgccggtgctggagagcatcctgcagcgccgcctgaagaaggagagggacgccgccgccggcggcggcaaggtccgcagggccgtcgtcctgatccgcggcgtcaccgacgacgccgcggccgccttcgtccgcctcctctacgccggcagcagtggtgatgaggaggagattgacgagaagagcgcggcgcagatgctggtgctggcgcacgcgtaccgggtgccgtggctgaagcggcggtgcgagggggcgatcgggtcgcggctcacggcggagtcggtggtggacacgatgcagctggcggcgctgtgcgacgcgccgcagctgcacctgcgctgcaccaggctgctcgccaaggagttcaaggccgtggagaagaccgaggcgtggcgattcctccaggagaacgacccctggctcgagctcgacatcctccagcgcctccacgacgccgacctgcggcggaggaagtggaggaggaagagggcggagcaaggggtctacgtggagctgagcgaggcgatggactgcctgagccacatctgcacggaggggtgcacggaggtcgggccggtggggcgtgcgccggcggcggcgccgtgcccggcgtacgcgacggcgtgccggggactgcagctgctgatccgccacttctcccggtgccaccgcaccagctgcccgcgctgccagcgcatgtggcagctgctccgcctccacgccgccctctgcgacctccccgacggccactgcaacacccctctctgcatgcagttcaggagaaaggaggaggagaaggcggcagcgaaggcgaaggcaaaggccggcgatgatgacgataagtgggggcttctggtgaagaaggtgagggttgccagggccatgtcttctctgggcaagaggaggcagatgagttgctcccagtgctga

SEQ ID NO: 11388 - DNA, 309 bp, Oryza sativa
  Clone ID: TFbOSC547j.C1.o8.fg
atggctcaacatctacttgctgcagcagacaagtatggcctgcataggttgaagatgatctgcttagaaatattaagtagccatattgatgccaactccgtggcaaccatcttggtgctagctgagaagcactattgctatggtctcaaggaggcatgctttgagttccttaactccttagcagtattgtccgcgattgcagcaagaggcaaggagagtgtgggtgcgacggccgacgccggggtgcgggggaatgcagagaacatgcaagttgcaagggatcaaggcactttattgattaatgattag

SEQ ID NO: 11389 - DNA, 1113 bp, Oryza sativa
  Clone ID: TFbOSC400305j.C1.o28.fg
atggggacagagccgctgccaatgtcaaggaagctgagcagtgggggcgggtggtttgatggtgaggatccagtggaggaaggagttcttggtgatgacgcagcaaaagccgacgcaggcggtgttggcgggggagaggagttgtattctgctgctagtgcatgtgttaacataacaagaaatctctccctccctatcaaaacaaatccagaacatgatatatcttcatgtgagcaaggtctcttaagtgaaccgcatggaaaaatacccttcctcttctcagagatattttctcatcacttcaaactttttaactcctctccactctctcccttccttcctcctcctctcctctcctttgctctctccttttctcctctcttcgcctcctcaccgagtgcgacgagggacgactacggcaccaacgatggcgggcaagcgggcgggcggccggcgggtggtggcggcgggagcgggcggccggcgagcggatctgccacccccgtcctcgagagtgatggcggcgcgcggatctgctttacccaacctcaggagtgtcgacagcgggagtgggagaccagcgcgtggatccgccgtctccccgccaacggtgacgagcagatctgcagcccccgccctcgtagcgaccgcggagtgcggatttgccgcccccaacctcgggagcaggcgacatatttggcaccgccgccctcgggagcgatcacagccacggcgacgccgggatggatctaccaacaacaagagcaacttgaacaagtgatggattcgtcgatgaaccctagcccattgatgtggtttgataacacaactcataacttgcttcgtgctgctgactgttatgggctggaaaggctgaaggccatctgcgagacgaagctttgcctggatattgatgtgaagagcgtgatggttatattgcttctcgctgatcagcaccagtgcgacatgctcaaacaggcatgcttctccttcattgccaatccgaacacactggaaacggtgactggaacaccagagtatcatcagtttaagagtttatacccaattctactaatcgaggttctggagaatgtttgcatacttcgcaaatga

SEQ ID NO: 11390 - DNA, 2394 bp, Oryza sativa
  Clone ID: TFbOSC900178j.C1.o15.gm
atgggtgacctttcttcatctgactcgctacttggatgggccaatgatgagctggacctatttgcttcatatggagcatccctgttcccgaacaccaggaagccgctcatttgttctgaacatcagcctatccagtcggttcctcctagttgcagagtccccaatgttgctattgtctatgtgctggcggacgtccccggcggcgtcgagctggcggcgcgggcggcagccccggcgccggccgcggcgatcggcgaggccgtgcgggtcatggagcgcgtccgcaggcggatccgggtccggatcggggtcggagaggcgggcggcgcgggcgcggcgggcggtgaagagctcggaggcgctcgtcatggcggggtggcggcggtgagaaaagaacagcggaaaaagggcaagtggggcagcagcaagcacaagccattcgggaccgattccatccacaagccgccgtacgaattgccattgtgtggcgtccagccaccacgcgggtccaatggcaaccgcggctcaatccggagggtgccgcacctgcgtcactcactgcacccgatactttcgcaagaactcccaagcgatattaccatcaaagtcgacgatgccgccttcaacctgcacaagcttccattggcatccaggtgcggctacatcaagaagcaggtgtcaggagtcggcggcaacaaggcgacgcacctggagatcgccggcatgcccggcggctccaagtcgttcgagctcgtcgtcaagttctgctacggcgtcaacttcgagatcaccgtggacaacgtcgccatgctgcgttgcgccggcgagcacctcgagatgaccgaggagtgcaggccgggcaacctggtcggcaggacggaggcctacctggaggaggtggcgctggcgagcctcgagggcgcggtcgccgtgctccgcaaggccgaggagctcctcccggcgtcggaggagaaggcgcggctcgtcgccaggtgcatcgacgccgtcgcgtccatcgtctgcggcggcgacggccagttcagcatgtcgctgggcacccccggcggcggcggcggcggcggctacaatggcgtgggcgccgcggcgtcgagggaggtcgacgactggtgcgccgacgagctgacggcgctgcggatcgacacgttccagcgcgtcatgatcgcgatgaaggcgaggggcttcaagggcatcgccatggggacactcatcatgctctacgcccagaaatctcttcgacggctggacatgcacgggagggacaggaagaagatgggcgcgaggcaggagcacgagaagcgggtggtgctcgagacgatcgtgagcctgctgccgagggagaggaacactctgtcggtgagcttcctgtcgatgctgctccgcgccgcgatccacctcgacacgacgctggcgtgccggctcgacctcgagaagcgaatggcggcgcagctcggccaggccgtgctcgacgacctcctcatcccgtcctcctcgcccgacgccgccgccgccacaacggcctacgacatcgacgccgtgcagaggatcctggccggctacctcgacctggactacaccacggatccgccgccacggctggactacaccaccgacgacgacttcagctcggcggcgtcgccgccgcacagcgacgtcgcccaggtcggcaggctcatggatagctacctcgccgagatcgcctccgacgagaacctgtccgttgacaagttcaccgccctcgccgagctcatcccggagcgcgccaggttcaacgaggacggcatgtaccgcgccattgacatctacttgaaggcgcatccgagtctggccgagggcgagaggaagaaggtgtgcagggcgatggactgccagaagctgtcgcgcgaggcgtgcgcgcacgcggcgcagaacgaccgcctgccggtgcagacggtggtgcaggtgctgtaccacgagcagcggcgcctccgcgcgccatcgcagccgccgagcgccgcgccgtcgtacgccggcggcgagtcgccggcgctgtcgtacaggccgacgccgagcttcaacggccggcaccggccgggcgttcccgacgaggtgtcccggctgcagcgcgagaacgacgagctcaggatggagctgctccggatgaagatgcgcctgagagacccatccgtggcgttctccgcaggaggagtcccgccgtccggtaggccgccgctgccgaagaagccgggcggcggcggcggcggaagcagcggcggattcatgaacagcatgtccaagaagctcgggaggctcaacccgttcttgcgatcggacgtgctcggcggcggcagggtgcggacgaagccgcccaaggatcggaggcactccatttcttga

SEQ ID NO: 11391 - DNA, 2661 bp, Oryza sativa
  Clone ID: TFbOSC404491j.C1.o1.fg
atgaggaagctcttcttctccgagttgacctcctgcaaggagaccaagctccactccgcgccccactcatggcttcccctcgagaaagggaagctctccaagttcgccggccactccacctcctccatagaatcgctgatgaaaatgccggagccggtggttcttccccacttcaagcctgcggattatgtggacatattggcccagattcatgaggagctggagtcttgccctcctgatgagaagtcgtgcctgtacctgctccagttccaggttttccgcggcctcggcgaggtgaagctgtcgcggaggagcctccagtccgcgtgggagaaggcgagcacgatacacgagaagctgatattcggggcatggctcaagtatgagaagaaaggggaggagccgatatccgacctcctcagctcgtgtggcaagtgctctcaggagttcaagctgctggatttcgtgtcgcagatctccaccgggtcgcatgagataagctatgatgatgagtcggatgtgttttggggctctccggtggtacatttccggataagagatgatatgattgcatgcgatcggcgaaagcttgctgctttgtcgactccgctgtatgcaatgcttaacggtggctttcgggaatcacatcttgaggttattgatatgtctcggaatggcatctcctcgattggtatgcgagcaatcagtaaattcagcttgacaggaaggttaccgtatttatcagcagatgctattttggaaatgcttgattttgctaataagttttgctgcaatggcctcaaggatgcttgtgagcgaaagcttgcttctttcatttgctcgaggcaggatgctatagacttcatggagtgtgctcttgagctgggttgttccatccttgctgctgcatgcttgcaggtgctcctgaatgagcttccagagtgcttgaatgatgaacaagtggttaggatattctcctgtgcaagtaagcagcagcgatccacaatggctggaaatgcttctttctccctatattgccttcttagtgaagtctccatgagcatcaacgcgacatcggatgtcacggtgaccttcttggaaaaattggtggattcagcatcagattctagacagaagcagttggccttgcatcagctggcgtgcacaagacttctaaggaaagattatgctgaagccgagcgcctgttcaatgccgcctttaccgctggacatctctattcagtagtgggtttggctagactggcctctatgaggggtaataagcatttttctctcaagttgcttgattctgtcatgtcatctcgctggccacttggatggatgtaccaagagagagcactatatttggagggtgataacaagttggaaaatcttaacaaggccactgagttggatcctacccttacatacccctacatgtttcgagctgcatctttgatgaaaagacaaagcgttgaagctgcccttatggagattaaccggatcctgggatttaagcttgttctggaatgcttagagctaaggttctgttgctatcttgcacttgaggaccatagagctgctttatgtgatgtccaggcaatcctcactcttgctccagattatcgtatgattggtggtcgggtgtctgcaaagcagctgcgtatgcttgtgatggagaatgttgagcagtggacaactgctgactgttggatgcagctttatgatcgttggtcatctgtggatgatataggatccctctcggtcatatatcaaatgctggagtcagatgctgctaaaggagttctctactttaggcaatctttgcttcttctcagattaaattgtcctgaggctgcaatgcgcagtttgcagctagctcgtgaacatgctgcaagccaacatgaacagcttgtttatgagggatggatattgtatgataccggccactgtgaggagggactgcagaaagcagaagcatccatcgcaatacaaagatcatttgaagcattctttctgaaagcttatgctttggctgattcgagtcttgacccttcaacttcagcaacagttgtatcacttcttgaagatgcattacgctgcccctctgatagactacggaagggtcaggctctgaacaaccttgggagtgtttatgtggattgcgggaagcttgacctggcagctgaatgctacatcaatgccctaaagattggtcataccagagctcatcaaggccttgccagggtccatttcctcagaaacagcagaactggtgcatatgaggaaatgaccaagctaatagagaaggccaggagcaacgcatcagcttatgagaagaggtcggagtactgtgatcgtgagctaacaaaatcagacctgcagatggtgaccaaactagaccctctgcgtgtatacccctacagataccgtgctgctgtgctgatggacaaccacaaagagaaggaggccatcgcggagctgacaaaagcaatcgccttcaaggcggacctgaacctgctccacctgcgagccgccttccacgagcatgtcggcgacatctcgagtgcactccgggactgccgcgcagcgctctccgtggatcctaaccaccaggagatgctcgagcttcatcaccgggtgaacagccaagaaccctga

SEQ ID NO: 11392 - DNA, 1734 bp, Oryza sativa
  Clone ID: TFbOSC402104j.C1.o34.gm
atgatgacccgtcgccaggatgcctactaccgctacccaaccacgtcgaccatcgtcgcgtcggcgccaatgcccaccggccaccacgtcctcaggatcgacggctactccctcaccaaggccaagttcgccgccggcgaagaatgcgacgagtcgtgcagcttcgtcgtcggcggccacgcctggcgcatcaggtactaccccaacggcgccgtcgtctccggctccggtggcttcgtatccctcatgctctcccttgatcatcagcccggcgccgcattgccggccgccgtcgtcaaggcgcggttcgcgttcagcttgctcgacatggacggcgagccggtgccgtcgcgcacctacgcgagcgacggcgtggtcagcttcagcgctaattcgtcgagcacgttcggggcggagaggttcatcggccacggcgagctcgaggcgtcggggcacctcaccggcgaccgcctcgccttccggtgcgatgtcaccgtcgtgaagcgcgacgggcctccgacgatgtcgaccctctgcccggtggagcacgacatgttcagatgcctgctcgacaccggggacgacgcggacgtcgcgttcagggccgccggcggcgagacgatcgccgcgcataggcgggtgctcgagcgacgggcaccggagctggccaagctctgtcgtcgtcgcggcggcgcctcctgcttcatgggactcgtcgggaggcacatcgacgtcggcgacatggacgccgctgcgttcaaggctctgcttcacttcgtgtacaccgacacgctgccggagacgatggccccgcgagaggtgccggccatggcgccgcagctgatcgcggcagcgcgtaaatacggcttggactgggagaggttgaggctcctctgtgaggacaaggcgtggggatggcgcgtcgacgacacgagcatggacacgacggcggcggctgctccggctaccggcgatgatccgaagcgtagccagcgaccaccgcgcgcctccttcactgccgccgccgcctcactgttccgtcacccggcctcgccggctggccgaaaagtgtcaacgacgccggcgaggccccgccggctggcccccttcccctcccctcctttgcctcaagccggcggcggtgcgctgtatgtcgtcttccccgtcgccggcggcggggcgccatcaccggctacctcctcctaccactctttcagctttgcccccgtcgcctcaaccggcccgccgcccgctcccgaccccgcggggggtaatgctttatattttagaatggtgggagctaaggctacactttactgctataagatcggcgtcttctctccacacgttctatccataagtgtcgtggcgacgtatactcagcttctcttcctcgctcgaaagggtgtcgccatgcgcgcgttcgagagcttcaccggtcgtcacgacgaccgccgcctcgccttcatcaaggacggcgtcgagctgcgagccgggctgccaccagggccggctgggacagtaaggacggtgcgactaccttcattttttttccacaccgaaccactaaagagtcagtgccggccctggccaccgccgccacccgtcggcgaccctgagtccggcggcctgcgccgccgcttgctctccttgctggacgggacggacgtcaccttcagggtcggcggcgaggcgttcgccgcgcatagctccgtggtcgccgcgtggtcgccg

SEQ ID NO: 11393 - DNA, 1068 bp, Oryza sativa
  Clone ID: TFbOSC401213j.C1.o7.fg
atgacgcagtgggcggatctggacgcgctccggccggcggtggccgccgacgtgcaggtcgtcacgtcggacgggaagagcatcgccgcccattcgttcgttcttggcacggcgtcgccggtgctggagcggatgatcgagcgggcacggcgggggtggaacgccgagtgcaccatccgcgtcctcggcgtctcctccgacgccgtcttcgccttcctccagttgctctacgcttccagggtgacgccggaggacgaggaggtggtgaccgcgcacgggccgcagctgctggcgctgtcgcacgcgtacaggatcgggtggctgaagcgcgcggcggaggcgtccgtgacggcgcggctcacgccggagcacgcggtggacatgctgaagctcgccaggctctgcgacgcgccgcggctgtacctgcggtgcgcgcgcctcgcggccaaggacttcgccgccgtcgagcggtccgagggctggcgcttcgcgcgccgccacgacgccgcgctggagctcgagatcctccagctcctcgaggacgccgaccagcggagggagcggtgggcgcgggagagggcgtcccgggaggcgtaccgccagctcggcgaggccatggactccctcgagcacatcttctccgacgacggctgctcctgcgccgacgccgacgccgacgccgacaccgacgcgccgccgtgccgcggcctgcgcctgctgatgcggcactacgcgacgtgcggcgcccgcaaggccgcgccgggcggcgggtgcacgcgctgcaagcgcatggtgcagctgttccgcctccacgcctccgtctgcgaccgggcggcgccgcacgacgacggcgaccgcccatgccgcgtgccgctgtgcagtcatttcaagggcaagatgcgggcggagaaggcggacaagacgtggcggctgctggtgaagaaggtgacgagggcgagggcgatgtcgcggctggcggcggggcgcgagcgcgaggtggtgccggaggtggtggccgcgtcgtgggcgaggtacagcagcagcggaggggccgccaggttgagatga

SEQ ID NO: 11394 - DNA, 762 bp, Oryza sativa
  Clone ID: TFbOSC401965j.C1.o36.fg
atgaagcaaatatctccgccccatcatgattttaatcctgtgtccgccactggttgcaaggactacatctccttctaccttttcctcgaagacgcggtcgatgagcctgtgatgggacaggttacatttagcttactcgaccaagacgggaagccggtgctgtcacgcacccataccacccgaatgtttagcttctcacttaatagctcctttggcttccacaaattcattagaagggaagatatggagcaatcgaaacatctcaaggacgactgcttcgccgtcagtgtccatttagttatcaccaagggagcaccttccgtcaaggtaccaccatcgaacttgcacagtcattacggtgatctcctctcaagtaaacagggcgccgacgttgagttcatgatgttcgaggctctacttatctttatctacacggatatgttgccaaagatggaccaagaagacgaggtagcaatggctcaacatctgctcgtcgcatcggatacgtatggactgcagaggctcatgttgatctgcgaagatagattatgcaaccatatcaatacagactccctggcaatcatgttggtgttggccgagaagcaccactgcatacgtcttaaggaggtgtgctttgagttcctcagctcctcaacggctctagtcgagttcatggaatcaagtgactttctgtattttatacggagctgtcctactgttttgaaggatctgatttacaatgtcgctgctcatggaaaatga

SEQ ID NO: 11395 - DNA, 1914 bp, Oryza sativa
  Clone ID: TFbOSC9665j.C1.o1.fg
atggcggcgtcgtcgtctgcggcggcttcaaccagctgcgccgtcgcagccgaagctaatggctcaacgtcgacgatcgtcgcgacgacgaagcccaccggccaccacatcctcaagatcgacggctactctcggactaaggccatggtcgccgccggcgacagcatcgactcctcccgcttccacgccggcgatcacgcgtggcgcatcaggtactaccccaatggcaccgaccgcagcaaccagaatcctgacgccatatccgtcatgctcgagctgcaggacgccgccgccggccgcaataatggcgccgccgccgccgccgccgtcaaggcgaagttcgtgttcaggctgctcaacaaggacggcgagccggtgccgtcgcgcacctaccgcagcagcgtgcacagcttcccttcctccgacggattcaagaattggggattcctccgattcatcacccacggcgacctcgagaagtcggggcacctcgccgacgacggcttcgccgtccggtgcgacgtcaccgtcatgggcggcatcgagctccgcgtcgagccggcgtcgtccctcgccgtgccggagccggacatgcaccgccacctcggccgccttctctccgccggggacggcgccgacgtcacgttcagggtggccggcggcgaggcgttcaccgcgcacaggtgcgtgctcgccgcccggtcgccggtgttcaaggccgagctatatagccgtggcggattcctaaggcccgccgccgccggaaggcccggaacacgcgtcatcgacgtcgacgacatggacgccggagcgttcggggcgctgctgcacttcgtgtacaccgacacgctgccggagatggcgtcggcggacgtgccggccatggcgcggcagctgatcgcggcggctgacaagtacaaagtggagaggctgaagctggtctgcgaggacaaattaagcaggcgtgtcgtcgccgacgacactagcatgacgccgacgccgatgtcgacgccgacgacgatgactgattcgacgacgaccgcatgccggtggggggcgaaatttcaaaccctgcgccagcgtccatgtcaacgcgagtgtcaagatcagctgctcgatctcgccggcgagcgggtggcacggtacagccaatccggcgacaagtgttccatctccaagaagaccgatcgatgggtttgcaatagcttcatcaagagggatgagctggagaagtccggccatgtcgtcggcaaccgcttcgccatccggtgcgacctcaccttcaacgtgcaggacctccgcgtgagggggctcgtcgccgtgcagctcccgccgcccgtcctgggctgccacctcgccgagcgcctcctgttcgacgacgagacggccgacgtgaggttcagggtccgcggcgagacgttcccggcgcaccgggcggagctcctcggctcctccatgaaggagcacgccgcgaggaccatccgcgtcgacgacatgaaggtccccgtgtttgccgcgctgctctacttcgtctacaccgacgagctgccggagatggaggacgacgagcgcacggtgattatggcgccgcaccttctcgtcccggcggacaggtacgacatggacaggctagctgaagaaggtgtgcgaggacaagatggtgaggcacctcgacgtcggcacggtggcgacgtcgctggcgttggccgagctccatggctgcccgcggctcaaggaggccatcttgaggttcctcgtcgtgtcgccgccggagaagttgaagacggtcatggcgagcgaggagtaccaacatgtgatcacggatttcccctccatagccacggagattgttcttgccatgctcgccgcaaattcggcttagcaagcgaattgacagtggagatgaggagatag

SEQ ID NO: 11396 - DNA, 1176 bp, Oryza sativa
  Clone ID: TFbOSC412646j.C1.o19.np
aagactacgacacaacaaatcgatcgacacatccaaaaatcgatcgacacgacaaatcgattttcttattatggaaataccgaaataggagttttggattactcggcgacgaacgcctctgccatcggcgatcccatcaactccgacctcttcaccgccggagggctaacctggagggtgaactgctacccgcgcggcgacaaggcagacaacaatggcgactacatctcgctctacctcgagctgatcagcaagtccaagaacatcaaggccatcttcgacgccttcatggtggatgaacacggcaacccgtccgatggatcgaacaggttagtgcaggtctacccacccgcgggctatcccgcgtggggatggccacgattcgtgaagcgaagcaatttgtcatcggtgttcgtggtggatggcaaggtcaggatcatgtgcgtcgtcggggtcaccggcggccatctcgacggcggcttattgccgctgccgccgccgaacatcggggtccatctcggcggcctgctggacagcgaggatggtgcggatgtcaccttcgccgtcggcggcgagacgttccacgcgcaccgggccgtgctcgccgcgcgctcgccggtgttcagggcggagctcctcgggtccatggcggaggccaccatgccgtgcgtcacgctgcgtgacatcgagccggcgacgttcagagctctgctacacttcgtgtacacggacgttctgcagatcgaaggctcttcgtcgacgagtacaactgatctgcttcagcgtttgctcgcggcggcggacaggttcgcgctggagaggctgaagctgatgtgcgcccagaagctgtgggagagcgtgtcagtggagacggtgatagcgactctgtgctgcgccgagatgcacagctgcccggagctgaagaacaggtgcatagatctcgtggtgacgaaagacaacttcatggaggtagcggtaaccaaggactactttcatcttgggcagagttttccgtcagttatcgaagagataacgggaaaccttcctcgcaccatgcaaagaggaccatggggccaaacatggagacagcatcgggtctccggttcactgggtggcgtcacttcgtcaagcagagtgatctacagccggatcatgtcagcgacaaaggcacggtca

SEQ ID NO: 11397 - DNA, 1293 bp, Oryza sativa
  Clone ID: TFbOSC415148j.C1.o5.fg
atggaggacgagggcgccgggggcgggggcattggcggcgacgcatccccggtgcacgtgggctccgcgacggaggtgggggtggggcgggacatcgtaccgtcaccgacgagctcacggtcggtgatgcagacggtgaacgggtcgcacatgttcgtgatccagggctactcgttggcgaaggggatggggattgggaagtacatcgcgagcgagacgttcacggtgggagggtgccagtgggcgatctacttctatcctgacgggaagaaccctgaggacaactccgcctacatctccgtcttcattgcgctcatctccgacggcatcgacgtccgcgtcctcttcgagctcaagctcctcgaccagagcggcaaggccaagcacaaggggcactcccagttcgaccgctcccttgagtctagcccctacaccctcaagaatcgcggctccatgtggggttataaaaggttctttcggcggactgctcttgagacatcggattttcttaaagacgattgcttaaagataaattgtactgtgggtgttgtggtatctactatggattactcaaagccacattcgatacatgttccagaatctgacataggctaccattttgggacactgttggacaatcaggagggtgtggatgttatatgtaatgtggcaggagaaaagtttcatgcccatcagttggtcttggctgcccgatcttcctttttcagatctgaactttttgagcatgaatcagatgaagagaagaatgaagttgatactagcaatgaaatcaaagagattgtcattgatgacatggagccaaaagtgttcaaggctgtgcttcattttatgtacagggacaatcttgttggtgatgatgagttgtctgcatcaagctcggactgctctatctttgatactttagctgggaaattattggctgctgctgacagatatgagttgccaagactacggttattgtgtgaatcttacttgtgcaagcatatttctgtaaactctgtggcaactaccctagcattggctgaccgacatcatgctatggagcttaaatctgtttgcctaaaatttgctgctgaaaatctttcagctgtaatccggaccgacgggtttgattacctcaaagacaactgccccgcgctgcaatcggagatactgaggacggtcgccgggtgtgaggaggaatgcagcagcggagggaagagccagagcgtgtgggggcagctctcggatggcggcgataccagcgggcgcagggtgaggccaagggtctga

SEQ ID NO: 11398 - DNA, 1161 bp, Oryza sativa
  Clone ID: TFbOSC400305j.C1.o21.fg
atgccgtcgtcgtcgtcggcggcggcggcggcgtgcgggcccccggagttcacgccggggtggaagacggtgtcgacgtgcgccccggacgtcgtcggcgagggcgtccacgtgttcgacatcttcgggtacagcgaccacaaggggatgggcgcccacgagcccatcaggtcgggggccttctccgtcgccggcctcgactgggtcgcctgcctctacgccgacggctacggcgtcgccggcatcgacgacgtctccgcctacctcaggctcctcggcgacgcgcccaccccgcgcgtgtgggtctcctgcgaggtcaagctcgtcgaccagcgcaccggggtggcctccacgccgcagcccttcctcaggtacgccctggcgttcggcgacaagtgcaaggccctccactgtatgatgatccccaggggccagatcgaggtggagccctacctcgtggatgatcgcctcaccatggagttccatgtcgtcgtcaggagagacccccgggtgtcgaggaccgcccggttcccgcgcatcttggtgccgccgcccgacatcaagcggcagtttgccaacctgctgcagagcaaggagggcgcagatgtcaccttcgatgtcgcgggggagccgttctccgtgcacaagctcgtgctcgcgatgcggtcgccagtgttcaaggcggagctctgcgggctgctgagggagccgggaacacagcctattaccatcgttgatatgcagcccgccgtcttcagggccctgctgcaattcatctataccgatcagttccccgtgacgcgcggtttcgagagacgcgacaattgtgaaatgatccggcacctgctcgttgctgcggacagatacgccgtggataggctaaagctgctatgccaaggtatcctttgcaagaatcttaatgttcacaatgtcgcgactacgctggcactggctgatcagcatcaatgcgacaagctgaaggatgcttgcatcgaatttatgtcatgttcaaagaagatgaagggtgtagtggcgagcaaagggtatgaggatctccaaagaatggcaccttctgtcttggcggatgccgtggcgcagatgtcgaagctcaacaaaatgtcaaggggtagtgttccacaagatgagtctaagagctgttag

SEQ ID NO: 11399 - DNA, 1032 bp, Oryza sativa
  Clone ID: TFbOSC400049j.C1.o16.fg
atgtcgccgccggtggcggaagaatcagaagggggtggcggtcgaatgcctgagtcgatggatcatcctccggtggtggaggaatcagaagccagacggcaacagcgacggccgggcgacgggaaacttcaccagcacggccagatcgacggcgccgtcgacgtggagtggagagcggatgaaaagagcaacgcggatttttcggtgcaggcgaagtaccagattagtttcgctaaccaggtgaagatgcaaccttcgttaaaatacattatggtaagaacttttattcgtgggtgttcttggacttggggctataagaagttcatcaaaagggaagatttcgagaagtctgacgatctcagggatgactcgttcaccatccggtgcgacattctcatcctccgcaagatccgcgccgaggagacgaccgagatactccccgctgctgaatcctttgtatccgtgcccccgtctgacatgaaccagcagttcggtgacctgctggagaccgagaagggcgcggatgtggtgttcgaggtcggcggccagacgttcgcggcgcaccggtgcgtgctcgcggcgcggtcgccggtcttcagagcggagctctacggcctgatgaaggaaggcgacactgctggagtcgtgcgcgttgaagaaatggaggcgcaagtgttcaaggtgttgctccgctttctgtacactgactctttgccggagatgaaggaggaagacgtcatgtgccagcatctgctcgtcgcggcggaccggtacaacctggagaggctcaaactgatctgcgaggagaagctgtgcaagtacattagcgtgggcaccgtgtcgaacatcctggcgctggctgatcagcaccgctgtgacgggctgaagaaagcgtgcttcaattttcttggctcaccggcgaacctgagtgctgtcgtcgccggtgacggcttcaagcatctgtccaagatttgcccctctcttatggaagagctggttgtcaaactggcacttccagctactcaagcttag

SEQ ID NO: 11400 - DNA, 1269 bp, Oryza sativa
  Clone ID: TFbOSC400049j.C1.o54.fg
atgaaggccaccgcggggctggtggaggcgcagaggagaccagccaggagtaaagcagttcgccgtcgacaggggagctgcggtggactcgatgtgtacgggcaggcgtccgtcgaggtggaggcctcagctcctacatctccgtcggacgtcgggctagacgcaggtatgacgacgacgacgacggcggcggctgcggctctcacgtccagcgtcggtgacggtcctccgccgtcgaggtccaccactaccatcaccgcgggacgaacctaccacatactcaagatcgaggggtactccagcaccttgaaagccggtcgtggccaggccctccgttcctctccgttcagtgcgggaggtcgcacctggtatatcagctactacccaaacggagggcgagaaaccaacaagcactgcatctctttcttcatccatcttgacgatgacacggtcaatgacgatgtcatggcacaagttacattcagcttgctcgaccgacacaggaatccggtgcggtcacacactgtcaccaccacattgtataacttctcggtggctagtagtaacgcgcttgggttcgaaaacttcattagaagggacgacttgcaacgatcggaatatctcaatgacgactgcttcgctatcgcggttcgtctggtcatcaccgaggaatcaccatccttcacggtgcccccatcgaacatgcacatggattatggtgatcttctatcaagcaaagagggaaccgatgtcgagtttgtggttggcggcgagacatttgccgcacacaggttggtgctagcggcacggtcgccggtgttcaaggcggagctattcaaaccaatggaggaaggcaccacggatgtcataaaaattgacaacatggatgcacaagtgtttaaagctctgcttgtttttatctacacggacacttggccagagataggtcaagacgagacgactatggttcaacaactactcgttgcagccaataagtatagcctatcaagactgaagataatgtgcgaagataagttgtgcagctatattgatacaagttcagtggttactatgctgatgctagcagacaagtaccaatgccatggtcttaagaaggtgtgcttcaatttccttgcctcttcaagagcattgtctttggtcatgaaagcagataatttctggtgtttaatccagagccatccaactatgttgaaggatttaatttacaacatcgttactcatcaattggaaattaaattatcagtgtag

SEQ ID NO: 11401 - DNA, 1277 bp, Oryza sativa
  Clone ID: TFbOSC401668j.C1.o22.np
tcggacgtgtccttctccgtcggcggcgagacgctcatccacgcgcaccgcgccgtgctcgccgcgcggtcgccggtgttcagggcggagctcctcggctccatggcggaggccaccatgccgtgcgtcacgctgcacgacatcgagccggcgacgttcagagctctactgcacttagtctacaccgacgccttgccagcgagctccacgtcgtcttcgacggcggcggcggcggttgagttcttccgaggattgctagcggcggcggacagatacgcgctcgataggctgaagctcatgtgcgctcagagcctatgggagatcgtgtcggcggagaccgtcgcggcgactctggcttgcgcggagatgcacagctgcacggagctcaaaactagatgcatcgacttcctcatgaaggacagcaacttcaagaaggcagcggtgacagatgactacctgcatctttatgcagagcttcccgttagtgatcaacgagataaaggcacggctccaggcttgagacttgaaatagccgacactccggtcaaccaacaaataaacagaaaagaagatggacccaccgttcattctcattaccttctctttcttcttcctcccctcttctctcttcatcctaccagatcggaactcgccgccctgcagagatggggtggggaggatttgcaaggagagctaaataatcaatcattatttccttaagctatactcgccatcaccccatagccgtgccgccgccgaacctgggcggccatctcgccgccatggtgggcagcgccgacggctccgacgtgtccttctccgtcggcggcgagacgctcatccgcgcgcaccgcgccgtgctcgccgcgcgctcgccggtgttcagcgcggagctcctcggctccatggcggagggcaccatgccgtgcgtcacgctgcacgacatcgagccggcgacgttcagagctctcctgcacttcgtgtacacggacgctttgccaccgagagacatactatctccttcgtttttcaagaaattgttcgcggcagcggacaggtttgcgttggacaggctgaagctgatgtgcgcccagaagctgtgggaaagcgtgacagtggagacggtggcggagactctggcctgtgccgagatgcacagctgcccggagctgaagagcaggtgcctcgacttcttcgttgaagagaacaacttcaggaaggtggtagtcactggtggttacctgcgtcttatgcagggtttcccatctgttatcgat

SEQ ID NO: 11402 - DNA, 1113 bp, Oryza sativa
  Clone ID: TFbOSC401879j.C1.o9.fg
atggcgtcgaggagcatatcaagctgcacaactgagacggcaaaaggcatccacaggttcgagatcttcagttacagcatgatgaacaccgaagccgaagacgactccatccggtccggcgtcttcaacgtaggaggattcgattgggcgttgctttactaccctgacggcatcgacgacgacagcaagggctacatcggcgtctacctcgagctgatcagcaagaacggcgagccatgggcactcgtcgacgtgaatctgatcaaccagctgcaacccgggcaacctcgtcagctgttcaccaagaccgatgtgcctaccccgttcagatcttcaagctttcaggagtctaccttggggtctctcaagtgcatgaagaggagcgatattgagagcactccagggttcatcgtcaatgactgcatcgtgatcgaatgcaatgttactgtcatctatgagccaaaagtgtctaaaaccagggcattgtgtgacgctgaaactagttcggcattgcgcgagatcgaggtgcctcctatggagatatcgtcggatttcgccaagatgttgaaggacggtgtaggagcagatgtgacattcagagttggagaagacacattccgtgcccacagggcggtgctagctgcgaggtctccagtatttcatgctcagctctgtggaccgatgaaggagaagaaggagacacaaatgcaggagataaccatccaagacatgcagccatctgtcttcgaggctttcctctatttcatctacaccgattgtgttccaagaatggatgatcttggcaatggtgagaagatgcatttgatgatgcatttgcttaaggccggtgaccggtatggattggagaggctcaggatcatgtgcgagagatttctagctacgaacctcgacacggagcatgtatctgcgatactgggtctagctgacttgctagatctcaagaagctcaaggaagcttgcatggagttcatggtcccatctgagagaatggatgccgtggctgcaagtcaagggtaccagcagctgaagagagcatttccctctctggcgtttgaagtgtgggagaggaggagccgtgttcgcaggaattaa

SEQ ID NO: 11403 - DNA, 1053 bp, Oryza sativa
  Clone ID: TFbOSC405158j.C1.o3.fg
atggcgtcgaggagcatatcaagctgcacaactgagacggcaaaaggcatccacaggttcgagatcttcagttacagcatgatgaacaccgaagccgaagacgactccatccggtccggcgtcttcaacggctacatcggcgtctacctcgagctgatcagcaagaacggcgagccatgggcactcgtcgacgtgaatctgatcaaccagctgcaacccgggcaacctcgtcagctgttcaccaagaccgatgtgcctaccccgttcagatcttcaagctttcaggagtctaccttggggtctctcaagtgcatgaagaggagcgatattgagagcactccagggttcatcgtcaatgactgcatcgtgatcgaatgcaatgttactgtcatctatgagccaaaagtgtctaaaaccagggcattgtgtgacgctgaaactagttcggcattgcgcgagatcgaggtgcctcctatggagatatcgtcggatttcgccaagatgttgaaggacggtgtaggagcagatgtgacattcagagttggagaagacacattccgtgcccacagggcggtgctagctgcgaggtctccagtatttcatgctcagctctgtggaccgatgaaggagaagaaggagacacaaatgcaggagataaccatccaagacatgcagccatctgtcttcgaggctttcctctatttcatctacaccgattgtgttccaagaatggatgatcttggcaatggtgagaagatgcatttgatgatgcatttgcttaaagccggtgaccggtatggattggagaggctcaggatcatgtgcgagagatttctagctacgaacctcgacacggagcatgtatctgcgatactgggtctagctgacttgctagatctcaagaagctcaaggaagcttgcatggagttcatggtcccatctgagagaatggatgccgtggctgcaagtcaagggtaccagcagctgaagagagcatttccctctctggcgtttgaagtgtgggagaggaggagccgtgttcgcaggaattaa

SEQ ID NO: 11404 - DNA, 619 bp, Oryza sativa
  Clone ID: TFbOSC100059j.C1.o1.gp
gatcaagggcgcacaaaataaattttgcggaaggacaacaggttatatgtcagttaatggaaacaaagcttgcaaagagataaaataaacctatctatcatataaacagataagcaccacaaaggtgctcccaaaatgtaaagagtaaactgactacggtacctgatttaggaagagaagaaagaatacccatatcccttataaattaagctaacagctcttagactcatcttgtggaacactaccccttgacattttgttgagcttcgacatctgcgccacggcatccgccaagacagaaggtgccattctttggagatcctcataccctttgctcgccactacacccttcatcttctttgaacatgacataaattcgatgcaagcatccttcagcttgtcgcattgatgctgatcagccagtgccagcgtagtcgcgacattgtgaacattaagattcttgcaaaggataccttggcatagcagctttagcctatccacggcgtatctgtccgcagcaacgagcaggtgccggatcatttcacaattgtcgcgtctctcgaaaccgcgcgtcacggggaactgatcggtatagatgaattgcagcagggccctgaag

SEQ ID NO: 11405 - DNA, 609 bp, Oryza sativa
  Clone ID: TFbOSC9673j.C1.o2.gp
aaactcgaccaaacaaaaatatcaattagaaaacttttgacgacctgggaaagaatttaatttggattgacagagattacatatgagaaagaaaactcggccatgcattttctataataaacacaatgactcggtgagattactttgacactaacactaatgaccaattttgcagaaactagtttgacttaatacccactaattaaaaatctagctaaactaattgtttcatgacgagttcagtcaaaactgaaggacatgttgccttcagatgctcgaagccatcggtagccatggccgccttgaggttgcccggagaagacaagaactcgacgcaagcctccttgagcgcgcggcaatggtgctgctccgccagcgccagcgtcacggcgacgttgcccatggcgacgcggcggcgcagcctgtcctcgcagatcagcctcagcctctccatcccgtacgcgtccgccgcggcgagcagccgccgcgccatggcgtcgtcatcgtcgtcgtcgtcgggcagcgtgtcggtgtagatgaagtggagcagcgccctgaacgcgtcggcgtccatggcggcgagccgcagcgtcgccggcgacgacggcg

SEQ ID NO: 11406 - DNA, 642 bp, Oryza sativa
  Clone ID: TFbOSC33617j.C1.o1.fg
tttccccctatttttactcttcttaaatatatattatacgccggtgacgacgacggcactatacccatcccgtggttgaacctcaatggccagctcggcgacatcgtggaccgtgccgacggctcggacgtgccgttctctgtcggcggcgagatgttccacgcacaccatgccgtgctcgccgcgcgctcgccggtgttcaagacggagctcctcgggtccatggcggagtccgccatgccgtgcgtcaccctgcacaacatcgacccggccacgttcaaagctctactacacttcgtgtacatggacgccttgctgtcgccgactagaggcggtgccagctcgacgtcgacgacaaccggatttttcaagagcttgctcatggcggtggacatgtacgcattgaagaggttgaagctgatgtgtgcacagaagctgtgggggagcgtgtcagtggagacggtggcgacgacactaggctacgccgagacgtaccattgcccggagctaaagagcaagtgcctcagcttcttgatggcggagagcagcttcaagaaggtggccttcactgatggctactttcatcttaggcaggatttcccgttaattatcgaagagataaaaaagcggattgagagttaa

SEQ ID NO: 11407 - DNA, 547 bp, Oryza sativa
  Clone ID: TFbOSC14613j.C1.o1.gm
aaggccgtactggagagatcggagtacctccgggacaaccgcttcacgatcaggtgtgacatcacggtcatgaagaatcccgaggcaaaggacactggcggcaggcgggtaaccctgccaccgtcggacctggcccggcacctcggcggcctcctcgccaccggagtgggcgccgacgtgacgttcgaggtcgacggcaagacgttcttggcgcatcggaatgtgctcgcggcccgatccccagtgttccaccaagagcttttctccctaacggagaaggggaatgccgcgactggcggtgccggtgtcatcatacgcgtcgacgacatggaggcgcaggacttcgaggctctgctccacttcatatacaccgactcgttgccggagatgaaaggtggagacgcagtggcgatgctcccaacctggtcgcggcggctaacagccatgttggcgtttgctggggaacaccaatgccccgagcttgagaagaagtgcttgcagctactcgaagatccagcaaatttgaggaacatcgtggagactgaag

SEQ ID NO: 11408 - DNA, 4011 bp, Oryza sativa
  Clone ID: TFbOSC34061j.C1.o19.gm
atggatatcgggccgcatagcatccagctgatcgcgccgccgtccctctatcacgccgcctccgctgccgccatgggtgatcaccgcgacccggctttccccgcggcggcgggcggctgccggctgcccaagacgtcgtcggtgagcgtcacggagtccgtcaccgcggtgcacgatttcaaggtgacgggttactcgctgatcgaggggctgggcatcggcaggtacgtcagctcatccaccttcaccgtcggcggcgtcgactgggccgtcaggttctaccccgacggctccaccgtcacctgcctcgggaacgcgtcggcgttcctctactactgcggcagggagaaggaggtcaggaccaggttcaccctgaatctgctcggcaaggacggcaaattgtcgcaggtgaccaattcctacatgaagcacaccttctccccggcgagtgacaattggggattcatcaaattcgccgagaaatcgaagctgcagagctcgccgttcctccacaacgactgcctgaccatcaggtgcttgctgaccgtcgtcagggaatcccacaccaaggatgttgaggtcaattctgttgttgtcccaccgtccaacctgcataccgattttgagaacatgctccaggatggtgaaggttcagatgtgacattcaccgtgggtggccaagagttccgtgctcataaatgtgttcttgccttccggtccccggtgttcaaggccgagcttttcggtccgatgaaagaaaatggcacgcaatgtatcaagatcgacgacatggagcctgaggtttttgaggctcttcttcacttcatttacacagataggctgccagatagctgcagagatggcaaggctgcagcaatgcagcacttgctagttgccgcggatcggtacggagtggacaggctgaggctgatttgtgagaggcggctcagcgaaaccattgatgtggaaacagtggcaaccactcttgttttagcagaacaacatcactgctcgcagctgagacaggcttgcattggggacagccttaccgaaattgctcctatggaggaattcttcatcactcacagaataagctgtggagaaatcgacgccaggagcttcgtggaggttgaggatgaggcagaccgagacgacggcgaggcggcggtgtggggcgcagagggccgtcagccccaaatcgaggaggcagtggtcgacgtgcgggcgccccctggaacagcgccgccgccgacgcctgcgaggaagaggacggcggctgcatcgccgcttggagcaacgccggcgcctgcgcctgagaggaagggcatggccgctgcatcgctgcctggagcaacaccgacgccgacccctgtgaccaagaggaaggggacgaccgctgcatctccgcgtggaactcagtcaacgacgcctgcgaggaaggggttggccgttgcttcgccgcctggaaagccgctgccgacgcctgggaggaagaggaattttgttgctggcgactggcgaggagggcgagaaaaggagcgcgggaacaattttccccctacgcgcgcgaggcagcgacgaccgcgattgggaagaaaaaatggttccctgcaaatgagtaacgacatatacggatatgggaacatggattattgggatgttgtggcagacatgttgacttcatcggctgcccgtacgtcctcacggagcgtgtgggagggcatcaccgggacgcacgacttcgaggtggtcggctactcgttgatggacggcttcggcgccggaaggcacgtctgctccggcgacttcagcgtcgccggccatgactggtatgtcgcgttctaccccgatggcctcgaccaggattccgccggctacgcgtcggcctgcctcgcctaccgcggcaaggagaggctcgtgagagccaagtacagcctgagcttggtggccagggacggcagggcgtcgccgctcgccggcgacacgctgcggtcgcactacttcacgccgacgagccgcagcgccgacgtcctcaagttcgtcgagaaatccaacctgtcgtcgtcgccgtcgtcgtcgtcgtactcgtgcctcgacgacgacaccctgaccatacggtgcgtggtcaccgtggtcaccggcccgcgcgtggtgagcgtcgcgccggccaaggagaggggcccccgcgtcacggtgccgccgccgagcctccacgagcacctggcgcggatgctgcgcgacgggcggggctcggacgtggcgttccgcgtgggcggcagggtgctccgcgcgcaccggtgcgtgctcgccgcgcggtcgccggtgttcgacgcggagctcctgggcccgatgatggagaccaccgctccgtgcatcgagatccacggcgtcgagcccgccgccttcgaggcgctcctccgcttcgtctacacggacagctggccgctcgccggcgtcgacgtcgcggcgacggtgcgcctgctctccgcggcggacaggtacgggctggagaggctgcggctgatgtgcgaggagaagctgcacgagggcatcgacgtggacaacgccgccgacgtcctcgccatggcggagctccaccattgctcgcagctcagagacgcctgcgtcgcgttcattgcctcgccgagcacgctgggtcccgtcctggcgtcgagcggcttcgaggatctcatcatggcgaccggcgcttcggtgaccaaggagattttgcacaagcagccgccgtcgcagccgcagcccggcatgggcggcccgcctccgccgccacagggcgcggcggggcagccgccgcagtggggcgcgatcccgccgccgatgccgccgcaccagtacggcgcgccgccgccccagcagccgccggcgatgtggggccagcccccgccgcaggcgcactacgggcaggtgcccccgccccagccgtactacgccgcgccaccgccgcaggcgatgcccgcccccgcggccgcggacgaggtgaagacgctctggatcggcgacctgcagccctggatggacgagagctacatctacaactgcttcgcggccaccggggaggttcaatctgtgaagcttatccgggacaaacaaagtggacagcttcagggttatggctttgttgagtttacaagtcgtgcagctgctgatcgaattcttcagacttataatggacagatgatgccgaatgttgagatggtcttccgattgaattgggccagtgctggcgagaagcgtgatgatacccctgactacaccatttttgtcggggatttggctgcagatgttacagactacctactacaagagacattcagggtccattacccttcggttaagggtgcaaaagttgtaactgacaaaatgacaatgcgttcaaagggttatgggtttgtgaaatttggtgatcctacagagcaagctcgtgcaatgactgaaatgaatggaatgctttgctcttccagaccgatgcgtattggtccagcggcaaataagaaaacaacaggggttcaggagagagtaccaaatgctcaaggagctcagtctgagaatgatcctaacaataccaccatattcgttggtggtcttgaccccaacgtcactgaagatgtcttgaaacaagttttcgctccttatggagaagttgtccatgttaagattcctgttgggaaaagatgtggttttgttcaatatgttaacaggccttctgctgagcaagcactggcagtgctacaagggaccttgattggtgggcagaatgttagactttcgtggggtcgaagcctttcaaacaaacagcctcagcacgactcgaatcagtggggtgctggtgctggtgctggtggttactatggtggctatggacaaggttatgaggcttatggtgggtatgcacaacctcaggatcctaacatgtatggttatggagcctatgctggttatcccaattaccaacagcaacaagtagcacagcagcagccgccgcagcagctttag

SEQ ID NO: 11409 - DNA, 1914 bp, Oryza sativa
  Clone ID: TFbOSC419840j.C1.o2.fg
atggccgggagcgaggcggcggcggcgcaggaggcggagatggacccggacttctcgggcgggggcggtgggggccccagcttcgagttcgccttcaactcggtcaacttctccgaccgggtgctccggatcgaggtcgtcgcgggggacgacgacgacgacgacgaccacgcgcccggctccagccgggacggcggggccggctcgctctcggattgggcgcgccaccgcaagcgccgccgcgaggagctcctcaaggagaaaggccgttggataattggtgatgcaagggatacaattgtgcaacctagaaattttggaagaacctgtaatcttgtactaattgattatacctgtaggatgatatggcatactcgcctcgggttgaggggacaatgtggtcaattgtttgagataaaacttcagttgcttgttagctgtgccgatcatgatctcaatgcttgttttgtgcttcttaggtcatgctcaaaggtagagcccgagtctgaagcagtcatgccagaccagataaattgcaaagtagaaccagaagaatgtgatgcatatgaagaaaatcaagaagaacctgtagcaatgatggacgactctccacccagtgttggccctgatggtgatgatggaccaagtatggactcaccttggagtggtggggtgagcacaccagttctaagagtaaagaacatttatatcagttcagcgattcttgcagcaaaaagtcctttctttttcaagcttttctcaaatggcatgaaagaatctgatgagaggcaggcaacccttagaattactgattcagaggaaaatgcccttatggagcttttaagctttatgtacagtggaaagttgacatcaactgaccctactcttctactggatattctgatggctgccgacaagtttgaggttatttcgtgcatgaggtactgcagtcagttgctcacaagcttgactatgactacagaatctgcactactctacctagatcttccatgctccatttcgatggctgctgcagttcaacctctgacagatgcagccaaggaatatctttccaacaaatacaaggatttgactaagttccaagatgaagtgatgaacatccctcttgctggaatcgaagccatcttgtcaagtaatgacctccaggtggcatctgaagatgctatctacgatttcttgatcaggtgggctcgcgcacaataccctaaatcagaggaaaggcgtgagatcttgagttctcgtttgcttccgctcgtgcgattcagtcacatgacctgtaggaagctgcggaaggtcctaatatgcaccgatctggaccatgagcaagcaaccaagtgtgtcactgaggcacttctatataaagctgatgctccacacaggcaacgtgctctcgcagcagacgtaacaacctgtcagaaatttgcagagcgggcttacaagtacagacctttgaaagttgttgagtttgaccgaccctacccacagtgtatagcatacttggatctaaagcgcgaagagtgctcccggctcttcccgtcaggtcggatgtactctcaagccttccatcttgcagggcagggcttcttcctctcagcacactgtaacatggaacagcagagtacgttctactgcttcggtctcttcttagggatgcaagagaagggctcaatgagcgtgacagtagattatgagtttgctgcaaggacaagaccgtcaggagagtttgtgagcaagtacaagggtaactacacgttcaccggtgggaaggcggttggttacaggaatctctttgcgataccatggtcgacgttcatggctgacgacagcctcttcttcctcgacggcgtgttgcatctgagagctgaattgacgataaagcaacccactgtctaa

SEQ ID NO: 11410 - DNA, 1107 bp, Oryza sativa
  Clone ID: TFbOSC401762j.C1.o40.fg
atgccaaccgccaccggcagccgcacaccggtgcggtctgcctccgccgtcatagccggcacggagagcggccagcaccatctcaagatcgacggctactcccgcatcaaggacgagctgcccaccggcagtgacatcaagtctcgatctttccgcgccggaggccatagctggcacctgcgctactaccccaacggcttcaactcggactgcgccgagtgcatctccatcttcctccagctcgactacaatgtcatgaaaggcgtgaaagcgcagtacaagttcagcttgctcgaccgtgccaggaagccgtcgtactccaggagtagtggcaaggcggacgtcttcctcaacaccggttggggttaccggacttacatcgaaagggggcttctggaatcgtcggagtatctcagagacgactgcctcacgatcgtgtgtgacttcaccgtcttcaaggacttgcggaccgaggacatcgacgttgatgacgcgatgccaccgccgcagtcgcctcctacagtggtggtcccgccatctgacctgcaccggcacctcggaggtctcctcgccaccggagagggcgccgacgtgacgttcgaggtcgagggcaagacgttcgcggcacacaggtgggtgctcgcggcccggtctccagtgttccgtgtggcgctcttcggcgccacgaccggtggcgccgatgatgtagtgcgcgtcaatatcgatgctatgaaggtgcaggactttgaggctctgctccactacatgtacaccgactcgctgccggagatgaaaggaggagaggcggcggcgatgctcccagaccttgtcgcggcggcgaacaggtacaagatggagaggctaaggctggtgtgcgaacacaagctatgcgagtacgtgaacgggagaacggttgttgccatgcttgcatttgcgggggagcaccagtgcaatggccttaaggagaagtgcctgcgttttcttgatgacccggtgaaactgagattgattgtgcaggcagagggagtcgagaatttgagcaaaagttacccttctattttgaaagatgtaattgccaagtttgttgcaacacccgtagatagctga

SEQ ID NO: 11411 - DNA, 1050 bp, Oryza sativa
  Clone ID: TFbOSC412646j.C1.o21.fg
atgttggacggcggcttcatcgagctgaagctccggtacgaggacctcgccgccggcgacttcgtccgctccgacgacatctacgccggcggccacacgtggcgtgtcctctgctaccctcgcggcggcggcgcgatgaacagcaatggccagcggatcggcggcgagtacctctccatcaagctcgacctcgtcacccggtccaccaatgtcagggccatcttcgccgcgttcctcgtccacctcgacggccacccgtccccggtccacgccaagagcttcgtcgccgtctaccctctcggcgccggcggccgcggcggcggcaaggccgccgccgggtggatgtacttcgcgtcgcggagcgagctcgagaagaagttcgtgtccggcgacggctgggtcaccgtcgtctgcggcgtcctgatcccgagcgacagcccacaggcgctgtccccgccgccgccgccgcctccgtcgtccggtggaggaggcgggcacatcggccgcctgctctacggcgccgccgacgacaccgcggacgtcgcgctcgtcgtcggcggcgagacgttccgcgcgcaccgcgccgtgctcgccgcgcgctcgccggtcttcaaggccgccctcttcggctccatggcggaggccaccgcgccgtcggtcgcgctccgggacatggacccggcggcgttccgcgcggtgctccacttcatctacacggacgcgctgcccgacgacatcgacgagctcgccggattctccccggtggacatgttccagcacctgctcgccgcggcggagcggtacgagctcggcgggctgaagctgctgtccaccaagaagctgctcgacaacgtcacgccggagaacgtcgccgggatcatcgtctgcgccgagacgtacggctgcccggagctgaagaagaagtgcctcgactacctcgcgcgcgaggacgaacacttcaggaaggcggcgacgacgcaggggtaccttcgattgttgcaggatttcccttccctcatggatgaaatacgagctgtgattgagagatga

SEQ ID NO: 11412 - DNA, 2388 bp, Oryza sativa
  Clone ID: TFbOSC2852j.C1.o4.fg
atgttgacttcatcggctgcccgtacgtcctcacggagcgtgtgggagggcatcaccgggacgcacgacttcgaggtggtcggctactcgttgatggacggcttcggcgccggaaggcacgtctgctccggcgacttcagcgtcgccggccatgactggtatgtcgcgttctaccccgatggcctcgaccaggattccgccggctacgcgtcggcctgcctcgcctaccgcggcaaggagaggctcgtgagagccaagtacagcctgagcttggtggccagggacggcagggcgtcgccgctcgccggcgacacgctgcggtcgcactacttcacgccgacgagccgcagcgccgacgtcctcaagttcgtcgagaaatccaacctgtcgtcgtcgccgtcgtcgtcgtcgtactcgtgcctcgacgacgacaccctgaccatacggtgcgtggtcaccgtggtcaccggcccgcgcgtggtgagcgtcgcgccggccaaggagaggggcccccgcgtcacggtgccgccgccgagcctccacgagcacctggcgcggatgctgcgcgacgggcggggctcggacgtggcgttccgcgtgggcggcagggtgctccgcgcgcaccggtgcgtgctcgccgcgcggtcgccggtgttcgacgcggagctcctgggcccgatgatggagaccaccgctccgtgcatcgagatccacggcgtcgagcccgccgccttcgaggcgctcctccgcttcgtctacacggacagctggccgctcgccggcgtcgacgtcgcggcgacggtgcgcctgctctccgcggcggacaggtacgggctggagaggctgcggctgatgtgcgaggagaagctgcacgagggcatcgacgtggacaacgccgccgacgtcctcgccatggcggagctccaccattgctcgcagctcagagacgcctgcgtcgcgttcattgcctcgccgagcacgctgggtcccgtcctggcgtcgagcggcttcgaggatctcatcatggcgaccggcgcttcggtgaccaaggagattttgcacaaggtgtccgaatcgtggagcggtcctgctagggcatctcgtcgcattgatgcagcagccgccgtcgcagccgcagcccggcatgggcggcccgcctccgccgccacagggcgcggcggggcagccgccgcagtggggcgcgatcccgccgccgatgccgccgcaccagtacggcgcgccgccgccccagcagccgccggcgatgtggggccagcccccgccgcaggcgcactacgggcaggtgcccccgccccagccgtactacgccgcgccccgccgcaggcgatgcccgcccccgcggccgcggacgaggtgaagacgctctggatcggcgacctgcagccctggatggacgagagctacatctacaactgcttcgcggccaccggggaggttcaatctgtgaagcttatccgggacaaacaaagtggacagcttcagggttatggctttgttgagtttacaagtcgtgcagctgctgatcgaattcttcagacttataatggacagatgatgccgaatgttgagatggtcttccgattgaattgggccagtgctggcgagaagcgtgatgatacccctgactacaccatttttgtcggggatttggctgcagatgttacagactacctactacaagagacattcagggtccattacccttcggttaagggtgcaaaagttgtaactgacaaaatgacaatgcgttcaaagggttatgggtttgtgaaatttggtgatcctacagagcaagctcgtgcaatgactgaaatgaatggaatgctttgctcttccagaccgatgcgtattggtccagcggcaaataagaaaacaacaggggttcaggagagagtaccaaatgctcaaggagctcagtctgagaatgatcctaacaataccaccatattcgttggtggtcttgaccccaacgtcactgaagatgtcttgaaacaagttttcgctccttatggagaagttgtccatgttaagattcctgttgggaaaagatgtggttttgttcaatatgttaacaggccttctgctgagcaagcactggcagtgctacaagggaccttgattggtgggcagaatgttagactttcgtggggtcgaagcctttcaaacaaacagcctcagcacgactcgaatcagtggggtgctggtgctggtgctggtggttactatggtggctatggacaaggttatgaggcttatggtgggtatgcacaacctcaggatcctaacatgtatggttatggagcctatgctggttatcccaattaccaacagcaacaagtagcacagcagcagccgccgcagcagtga

SEQ ID NO: 11413 - DNA, 1818 bp, Oryza sativa
  Clone ID: TFbOSC22376j.C1.o7.fg
atggacccggacttctcgcgggcgagccgaggcccgagcttcgcgttcgccttcaactccgtcaacttctccgaccgggtgctgcggatcgagatcgtcgccggggacgacgcggcgggggccaagggcgccgcgggggaagggtgctcctcgctcgccgactgggcgcaccagcggaagcgacgccgggaggagctccgccgcgagaaagctgtcgcatttgattttaggagttatcctaaatttgagtctaaaaagaagtgggccaccaacagaaacagttgcttccccctccgcgggatagctcttggtcgcccgcactgccgattgggagcaagcgcggtgcggtacttccggagagcgagatctcgggaatgtgaatcaggaaaatacacggatctggaaacctgtaaagttgaagcagaagaatgtgatacctatgaggaaaataatgaggaacctgtagctatgatagaagaatctccaccagatattggacaagatggtgaggatggagacagctgcgattcatcctggagtatggagtgtacccaagtcttgagagtaaagtctatttacatcagttctgcaattctagctgcggaaagccctttcttttataagcttttctcaaatggcatgaaagaatctgatcagaggcatgctactcttagaataactgcttcagatagcttttatctgatcattgtatgtctatctgaaacagaggaaaatgccctcatggagcttttgagctttatgtatagtggaaagttgacaacaaatcagccaacccttctgctggatatcttgatgattgctgataaattcgaggttgtttcttgcatgaggcattgcagtcaattactaagaagcttgcctatgactacagaatctgcactgctctatctagaccttccttcgagcatttcaatggctgctgcagttcagccactgactgacactgccaaggcattccttgccaacaagtacaaagatttgaccaagcttcaagatgaagcgatgaatattcctctggctggtattgaagccatcctatggagtaatgatctgcaggtggcatcagaggacgccatctatgattttgtgatcaagtgggcacgttctcaatacccaaaactggaggagaggcgagagatcttgggtactcgtttgttgccactggttcggttttgtcatatgacctgcagaaagctgcggaaggtccttgcatgcaatgatctggatcatgaacaggcaactaaatgtgtcaccgaggcacttctatacaaagctgatgcaccacatcgacagcgtacccttgctgcagatgttttgacttgtaggaaatatgctgagcgagcttacaaatatcgtccacttaaggtggtggaatttgatcgaccatatccacagtgtatagcatacttggatctgaagcgtgaggagtgcagtcggcttttcccatctggacggatatactcacaagcgttccatctcgcagggcagggcttctttctctcagcacactgtaacatggatcagcaaagtgcattccattgctttggtctgttcctagggatgcaagagaaaggctcgactagtgttactgtagattacgagtttgccgcaagaacaaggccatcaggcgagtttgtcagcaagtacaagggctactataccttcaccggtggaaaggcggttggataccggaatctatttgcaattccatggtcatcgttcatggctgatgacagcctcttcttcatcgagggggtactacacttgagagctgaattaaccataaaacaaccctag

SEQ ID NO: 11414 - DNA, 1185 bp, Oryza sativa
  Clone ID: TFbOSC415318j.C1.o8.fg
atggccgcagccgccgcctcaactgtgccccagtcgtcttccaccagcagcacaccgcaaaacaccatctccactcactccactgagcttgtcaggggctcgcatgagttcaccgtcgccggctacagcctacagaagaggaagggcgccgggcactccatcaggtccggctcattcgaggtcggtggatacagctgggcgatccgattctaccctgctggcagcacgaaggaagaagaaagacacgtgtccgtgtacctcgagctgcgaagcactgtggtagagaaagttaccgcgaggttcagtttccacgtccatggcgctagcgcgagctcgttgcatatgcgcggtagttttgacgactacacgcctaccagcaaatcatgggggtacccgaaatttatggagatagaaaccgtggagtcggagtacctgatcaacgactgcctgacgttgctctgcgacgtggaggttgtcaagacggtgaagaccggagcaaccattagctgcttcatcacggttccgccgccggccatctgccgtgatctcgagctgctggtggggagcaaggagggctccgacgtgacgctccagttggagcagagcgagtacgacgctcacagagcggttctcgcggcgcggtctccggtgttcagcgctcagttcttcggcccaatggcggacgaggacgccgccgccgccggcagccggaggaacgtgcggatccacgacatcaaaccggcggtgttcgaggccgtgctccactttgtctacaccgacacgttgccgccggccaccacgagctggtccgcgagccaccgcgacaagcgtcctaagctcagcgacgtcgcggccgccagctgctcggaagaagaggtgagagtgatgatcggagagcggctcgcggcggccgacagatttgacctggagaggatgaggctgctgtgcgaggacgcgctgtgggagaccatcgacgtggcgaacgcggcggcgacgctgcggctggctgaccggcaccattgcccgcagctcaaggagctctgcatggagtacatcgcctcggctggggtgttggcggccgtgatgacaaccgaggggttcagggagctcaagctggactgcccctcacttctgatcgagatcctggagaactttggaaaacgcagcgaggccgatgaggaataa

SEQ ID NO: 11415 - DNA, 1185 bp, Oryza sativa
  Clone ID: TFbOSC900359j.C1.o12.fg
atggcgagcagcagctcgccgtgtaagctcgtctcttgcggcgacaaccgccacttcatgttccgggttgacggggcggcgatacgccggcccgtcgggcgcatagtcaaggagacctgcgaaatcggcaatggctacacatgcgaagcatctcttttcgtgccgtcattactgggtgagagaaaggtgatgatgattctggccgtgacggtaaacagcgaccgagctcagtcgttggcgagagcgcacaaggtgttcattgacatggcactcttggacgataccaagtcgcctgttcttccgccgttcgccagatcggtgatgtcgccgtccgccgctgcaggtagcagtcctaagctgccgccgcccgtcgccgggagcaacctagctgctagctgcaaactggtagcctcgagggatcacctcttggccaactgtgtaaaaggcggcatcctggcggcgttgtgctgggttgtctttgttccctcgtcgccgcggtcgccgtactcgttgttagcccactgccttgccaccatgtcaaacggtcgagacctcaccgacgtctgcttcgacgtcgacggcaagagtttccacgcgcaccgcctcataatggcgcgtcagtcggaggtgtttagggcagagctacttggctccatggccgagagcaagatggagtgcatcaccatctccgacatgagcgcctccaccttcaagcacatgctccactacatctactgcaacgacctgcccacctgtgtaaaagacacagacgatcagtcctcctggatcttcgaattgcagcacctgctcgtcaccgccgatcgatacggagtggatacgttgaaggatttgtgcgaggacacgctctgcgctgacatcaccacggacacggtgacatcaacactggagctggcggagacgagatcatatccgaagctaagaacgtcctgtcttgtattcctatcgaatacacaaaatttcgccgaggtggcaacgactaaggagtactataatctgatacagagctacccgagtgtgctgtccgagataaggaacaggtttaagagaccacggccgtctctgatgctagctccgtcaaccgtcaccgaaaatcaaaacaagagaccacggctgtctcctaagctaactccatcagccgacaccaaagatgaaaacaacccttag

SEQ ID NO: 11416 - DNA, 873 bp, Oryza sativa
  Clone ID: TFbOSC400305j.C1.o24.fg
atggcgcgcgcaaagacggtgtcgaagtgcatcacggagacggcggagggaagccacgtgttcagcatcaccgagtacagccagaagagggggatgggcgtcggcaaaggtgtcgaggtgcacgcgtcctccgacctgaggctgctcgaccacaccaccggcctgtctacttcagtgacaaagacattgcccaaagcatcggcgtatctccgcgacgatcgcctcgacatcgagtgtgttgtcactgtcatgaaagagccacgggtgtctcagaccaaatcttcccccaaagtcgcggtgccgccgtcagacatcgcggcgcatcttggcaagctgctggaatcgaaggaggcggccgatgtcacattctatgtcggggaggatacctttgcggcgcacaaggtcgtgctcgcgatgcgatcaccggtcttcaaggcggagctctttggcccgatgagggaggcgggggcacaggtcttacccatcaaagacattcagcctgatgttttcaaggccctgctccatttcatctacactgattcattgtctatcattgatgatcttgtgggagatgaccgtggtgaaatgattcggcacttgctcgtggccgcggatcgttacgccatggagaggctgaagctgatatgtgaaagtgacctctgtgagaatcttaatgtgcagactgtggcagctaccttggctctagctgatcaacatcattgtgcgtcactcagggatgcttgcattgagtttatgtcctcttcttcaatggatgatattgtggcgacacaggggtttgtagatctcaaaacaaattgtccttcagtcttggtggatgcatttgtgaacatgagtatgctcaacaaaaggtag

SEQ ID NO: 11417 - DNA, 804 bp, Oryza sativa
  Clone ID: TFbOSC934j.C1.o1.fg
atggcgtccatgtacaggcttccaaggaacgccatctgcgctgcgtgctatgaaggtgccaaggccatcatcgccttcttcaacgacgacgacgacgagcacgccgatgctgatcaaggctcggtgaagcccagcagattgacaaagctcaatagcacaaccaagggattgagagatgcgtgggaggaggtgaagcagatgcgatgcagagaggaggagaccaagcagagggcatcgtttctccagcaaggcttcgcggcggcgtggaaagacggcatccacaccgacatcgccgtcaggcctggaactgggcccccaatccaagcccataaggccatccttgcgaccaggtcggaggtgttccgccacatcctcgccggcgacgacgactgcaaggcccccgccggcgactctctgtcgctaccggagctgacccacgacgagctctcccacctcctcgccttcctctacacgggctccctggcgacgtgcacggaggagcggcacctgcacgcgctgctggtcgccggcgacaagtacgacgtgccgttcctccggcgagcgtgcgaggcgcggctggcggcgggggtggaggcgggcaacgtgctgcggacgctggaggtggcggagctgagctcgagcgcggcgctcaaggagcgcgccatgggggcggtggtggagcacgcggaggaggtggtgttctcgccggagtacgaggagttcgccgtcaggaacgccgccctttgcgtccagatcacccgcgctctgcttgccaataaagcatttcccgccaagacgccttaa

SEQ ID NO: 11418 - DNA, 1206 bp, Oryza sativa
  Clone ID: TFbOSC400049j.C1.o25.fg
atgtcgttcgctggcgtatctttcatctgcgacggcgtgcacgtgtgttcttctccggccaatggcgccgccggcagcgccgcctatgggtaccacctccttgtcatcaacaactacacgcgcacgaagcaagccatccccaatggatttcgcatcaagtccggcaagttcaagctaggaggccacacttggcacatcaagtactgccccaacggcgaccgatcgaccatctcgggcttcgtctccttccacctcgttcttgattgtgacggcggcgatggcgccgtggcggcggagcccgtgaatgccaagttcgagttcagcttcgccgaccaggtcgcgaagcatcaggcgacgcggctgcgcgcgaccaaggtgtgcgagttctcccgcgactgcagcgcgtggcacgtcgggcggttcgtgcggagggaggcgctggagcggtcgaggtatctcgtcgacgactgcttcacggtcaggtgcgacatcatggtcgtccacgccggcgccggcgccaatggcgtggccgccgccacggcggctccatcgatggccggcgcggtggagagcttcggccgcctcctggacacgaagcttggcgccgacgtggcgttcgaggtcggcggcgagacgttcgccgcgcaccggtgcgtgctcgcggcccggtccaaggtgttcgacgctgagctcttcggccccatgaaagaaggcacggcggcgagcgtcgtgcggatcgacgacatggacgccgatttgttcaggggactccttagcttcatctacacggacgaattgcccgagagagaggaccacggcggagaaaaggagacgagctctgacgacgacgacgacgacgacgacgacgacaatggtgctcaatcggaccaaaaacacaaacaatttacatggctgcagcaattgatcgtagccgcggacagatacgatctgcagaggctgaagcttctgtgcgaggaggagatgtacgaccacataggcgagaagacggtggagaccatgctcatcctcgccgatcaccaccattgccgcgtgctcaaggacgcatgcttgggtttcctcgggtctcatggcaacctgcaaaagatgatggcggctgatggcttggatcgtgtgatcaagaacttcccctctcttaccaaagagattatcggcagatttgcagtcgtcatggcaaacaaatcttag

SEQ ID NO: 11419 - DNA, 1188 bp, Oryza sativa
  Clone ID: TFbOSC569j.C1.o1.fg
atgtcgacggcgacccccacgcccaacgtcgtcgacggcgactgcggcggcaccccgccgtcacggtcagcctccaccatcatcgcggcacgaaccctccatgtgctcacgattcatggctactccgacaccttgaaatccaacgtcgaccctagccagcacctgctcctttcctctccgttcagcgctggaggacacacctggtgcatccgctactgcccaatcgggtgcactgaggaaagcaaggacttcatctccatctacctcgttctcgaggacaccatcaccgacgtagtatcggcacaggttacgttcagcttgctcgaccaacaggggaacccgatgccatctcacaccctcacaaccccactgcttaaattctctcttcaaggcactctacctaaggccctggggtataacagcttcatcagaagagacgacttagagcgatctggacatctcaaggacgattgctttgccattggggtccatgtggttgtcaccaaggaagcagaaccgtcatccatcaccgtgccaccatcggacatgcacctgcattatggcgatcttctctcgagtgaagaacggtacgccaccgatgttgagttcctagttggcggcgagaccttcaccgcgcatcgattggtgctcgcagcacgatcacctgtcttcatggtggagctttttgggccgatgaaggagggtactactgtaaacaagatacatatatttgatatggaggcgcaagtattcagggctttacttaagtttatctacacagacatgttgccggagatggatcaagaagatgagaccgcaatggttcaacatctacttgttgcagcggataagtatggcttgcataggctgaagatgatctgtgtagaaatattaagtaaccatattgatgcctactccgtggcaaccatcttggtgctagctgagaagcactattgctatggtctcaaggaggcatgctttgagttccttaactcctcagcaatattgtccgcgattgtaaatacaagtgactttctgtatttgatccaaagctgccctgatgttttggaggacataagtttcaacatcgttgctcgtcaattggagagagcaattttcctatcagaaaaccaagaaggccaaatcaacagcgtagaaatcagaattaattcggtcatgacaaattga

SEQ ID NO: 11420 - DNA, 159 bp, Oryza sativa
  Clone ID: TFbOSC569j.C1.o2.gm
atgggagtcgtcaaatcgtcagcagttgtgttcttgatggagtcggatcaattaaaggaaatttatccagaagagtccgagttcaaggaggatgcggcatggatcaaattgactggcacgcccgcacctcaccaagatttggacctgcactggagctaa

SEQ ID NO: 11421 - DNA, 741 bp, Oryza sativa
  Clone ID: TFbOSC401835j.C1.o31.fg
atgtggtgccagtcgtgcaaggaggagtacgaggaggaggacgccgggacgtgcaaggagtgctacgaggaggcgagcgagacggaggaggagctcaagcgcgagatcgacgacctccgctcccgcctccacttcctccgcctcccttccccttccctcgacgcctcctccctctcccactccgacctcctcctccacgccatccccgccgatgcgcccgcccgccccgacacccccgccgtccccgcccaccgcgtcatcctcgccagcagatctcctgttttcagagctatgcttgagaacgagatggaagagagccggagtggcatcatcaaaatatacgatgtgtcctacgacgtccttcgtgctttcgtccattacatgtacacagcagaagctctccttgacgagcagatggcatctgatctcctggtgttggctgagaagtacgaagtgaagaacctgaaggcctactgtgagaaattcttaacatccaaagtgagcaacgacaatgccatcacgcattatgcgtttgcgcatcgccacagcgcgaagcagctgctcgagacatccctggcagcgatcatggacaacatgtcaacgctggcagatcgggaggaatacaaggagcttgttgagaaggacccaaggcttgttgtggagatatatgaagcctatctgaacagacaagtgaacactgctgctgggaaggagacagattccagtagtaggaaggggtaa

SEQ ID NO: 11422 - DNA, 1767 bp, Oryza sativa
  Clone ID: TFbOSC401916j.C1.o9.fg
atggactatttcacggggacggggactatcgtggtctccgacgacagcctctacgccgccttcggctacggcgaccccttcggcttcgccccgcgcgcgaggcccccgatccgttccctgcccttcgccgccggcggctaccagtggtgcctctggttccaccccaccaccttcgccggcttcttcggcttcggcgtcgagctcctcaccgccggcgccaaggccagggcgtccttcgagttcggccccgtcgacgccgcctcccacaacgtcatcgtgcggatgccgcccttcctcttcgaccacccccaccaccccatggtcatcatggtctggcccaaggccatgctcgccgaggaggcgacactgttcgtccgcgaccacgccgtcgtgttccgggtcgacgtcaccgtcgtcccggacgagccgctgcctccggacgccggcgtcggcgacgacgacgtgctgccgccctcggacatgctggcccagctcggcaacgtctacgacaccaaggagggcgcggacgtgacgttctccgtcgacggcgagctattcgccgcgcaccgggtcatcctcgccatgcgctcgccggtgttcagggcggcggtgtacggcgagatgagggagagcggccgcggcggcggaccgatcgccatcgacgacatgcgccccgacgtgttcgacgcgctgctccgctacatctacaccgacgccctccccgccgccgccgacgacgacgacatggaggcaacgtggagcgacctcctggtcgccgccgaccggtacggcgtggagaggctgaagctgatctgcgagcgcgcgctgcgcgggaggctcgacgccggcaacgtcgccgacatgctggcgctggccgaccggcagcactgcgagacgctcaaggatgcttgcatcaagttcatggcgacgtcggggaagatggaggaggtgaaggcgagccagggattaataaagatggtggccgatagagaaacgggagccaaagaccaaatcggcgtctaccttgagctcatcaccaagggaaccaaggcgagagcctcctacaagctcagactactcaaccatgtcaccgcctgtccttgcttgtggtacacctgcccactcaaaatctatgactctatcgatgataacaaatctttcacctggggaaccaagaaattcgctgacaggagcaagctagaagtcgcatcggagtatctacaagacgttcgcctcgtaatcgagtgcgatgtcatgccattagtaaggatcgaagcgatcgcggaaatcatccgatcaccttcttctccttggtcgcaactgtcagaagacattggcaagctgctagagatggagaccggacggagccgacgtgagcttcaaggtcaacgctccactttgaacaccattgatcgtgtcgctagcaccataagacgggccaatgagagggaagagaaatatctcggtgaagaagagaggaaggagttgatcaagcatctgctcattaccgtggatcgctatgctatcgaggggttgaagacgatgctcgaagacggactctgcaaggtccttagcttaggcaacgtcaaggagatgtttgccctaactgatcagcatgattgcagcatattgaaggatgtgtgttttgaatttatcacctcctcatcggtccatggattgggcgatgtggctttgagtgaagggtatgagagcctacgagaatcttgtcttgctgccatagtagatgccttacagcgagtacaatag

SEQ ID NO: 11423 - DNA, 1110 bp, Oryza sativa
  Clone ID: TFbOSC400049j.C1.o7.fg
atgtcccccgccgtaggccgtggcaacccgccgtcgcggtcagcctcctcctccaccatcgtggccgagacggcgaccgggtatcacctcctcaagatcaacggctactccctcaccaaggccaccacccccaccggctcgtttctcccttcgagcccgttcaccgtcggcggccaccgctggaacatcaaatactaccccaatggagatgacgtcaagaccgccgattacatatctttctttctcgtactagaagaagaagagaccaacatgggtttgacggtgcaggccaagttcaagtttagtttcgctaaccaggtgaagaagcaaccttcgctgaaatacaggcccataaagacatttaatctcgaggattcttgtggttggggctatgtggagttcatcaaaagggtagatctcgagaagtccgatgatcttagggacgattctttcaccatccggtgcgacattgtcgtcgtccgtgagatccgcaccgaggagacgaccgagatactccccgtcgaatcctttgtacccgtgcccccgtccgacatggaccagcagttcggcgacctgctggagaccgagaagggcgcggatgtggtgtttgaggtcggcggccagacgttcgccgcgcaccggtgcgtgctcgcggcgcggtcgccggtgttcagggcggcgctctacggctcgatgaaggagggcgacactgatggagtcgtgcacattgaagacatggaggcgcaggtgttcaagctgttgctccgcttcgtgtacaccgactcgttgccggagatggagacggaggaagacgtcgtatgccagcatctgctcgtcacggcggatcgatacgacctgcacaggctcaagctgatgtgcgagaacaggttatgcaagtacattggtgtaagcacggtgtcgaacatcctggcactagctgatcagcaccactgcgacgggctgaagaaggcgtgcttcagttttcttggctcaccggcgaacctgagtgctgtcgtcgccagcgacggcttcaagcatctgagcaggagctgcccctctcttatggaagaactggtcgttatgcttgcacttccgcctagtcatgcttag

SEQ ID NO: 11424 - DNA, 363 bp, Oryza sativa
  Clone ID: TFbOSC405157j.C1.o3.gm
atggcatcgctgtacgggtcgatgagggagcaccgcgcgccgcggatcgccgtcgacgacatggagccggaggtgttcgacgcgctcctccgcttcgtctacagcgacacgctggcgctccccggcgacctcggggaaggcgagtacaaggagatggtgcggcagctgctggaggcggccgaccggtacgccatggacaggctcagggtgatctgcgagctcatcctctccaggagcctcgacgccaagaccgtcgcggcgacgctcgccatggctgaccagcacagcactactgcgacgcgctcaaggatgtttgtgttcagttcatggccgttgggttggatgaccacaattaatgattga

SEQ ID NO: 11425 - DNA, 1503 bp, Oryza sativa
  Clone ID: TFbOSC400049j.C1.o3.fg
atggccaccgccgcctgcggcgagagcccttcgcggttgggctccgcctccgccatcgtcgccgacacggagaccaggtaccacctcctcaagatcggctgctactcgcgcaccaaggcgacgacccccaccggctccttcctcagttccggccagttcaccgtcggcggccaccgctggcgcatcaattactaccccaatggggaaagcgccgactccgcggattacatatcgctttacctcttgctagacgacaaggccaccaatagcagtgtgaaggtgcaggcacagttcaagttccagattagttccaccgaccaggtgaagaacacaccttcattggcatccacgaatgtaaatacatatggtgaggattctagctggtcttggggtcacagaaagttcatcaaacgggaagatttcgagaagtccaatgatctcagggacgactccttcaccatccggtgcgacgtagcggttatcggagagatccgaactgagaagacgaccgagatcccatcagccacaacattcgtcactgtacccccgtctgacctgaaccagcagctcgtcgacctgctggagaccgagaagggcgccgacgtggtgtttgaggtcagcggtgagacgttcgcggcgcacagatgcttgctagcagcccggtcgccggtattcagcgcggagctctacggcttgatgaaggagggcgacaccgccggagtcgtgcgtatcgaagacatggaggcgcaggtgttcaagctgttgctccgcttcatgtacaccgactcgttaccaaagatggaggaggaagacgtcatgtggcaacatctgcttgtcgcggcagatcggcatgatctacagaggctcaagctgatctgcgaggacaggttgtgcaactacattggcgtcagcacggtgttgaacatcctggtgcttgctgatcagcatcactgcgacgggctgaagaaggcgtgttttagttttcttggctcactggagaacctgagtgctgttgtcaccggcgatggcttggagcatctgagcaggagctacccctctcttatgaaagaactatttgttgtgatggcacttccaccgaatcatgttctgaacctttctcatcaggtatactatgaaaaccaaaacttcaatgttttactgcttttgatcaagaatagtgacttgactggagttaatttgaagaaaacaggctggcagggcccgtcacttgtgtctgaatatgatgtatcatattcttcaggggatccaggaaaattgccaccaatcgagcgtgtgactgtggagaatgctcaaggggtggatcactgccccgtttcagcttccggcagagagtggtgctcagcttgtggactggtggctgatggcaaggagcgtaatgcccggatcttcgagcagagatcgcgcacagcaggtcagctatttagtggcatcagagagatcatgatctggaaggaggctggaatttttcggcaatgtgattag

SEQ ID NO: 11426 - DNA, 982 bp, Oryza sativa
  Clone ID: TFbOSC401879j.C1.o6.np
cggcgcagacggtggcgagcacattggcattggccgaccgccatggctgccgcgggctcagggaagcctgccgaggattggtggacgaagagatcctcgccgccgtcgtcgggggtgatgaagccgaaccccttggtggcgtcgaaccacttcaccgtccccttcaccctctccgacgccatctcgacctcgccctcgccctctcgccgccgccgccgccgcaacccaaaaccctagaaaccctagatcgtcccaggcgttcccggcgtgggggcacctgaggttcatgcggcggcgcgagctggaggagatggggttcgtccgcgacgaccgcctcaccatcgagtgcgtcgtcaacgtcgtcctggaccccgtcgtcaccgccggcgacgcgccggagctcgaccatccgccgtcgaacatcctcggccacctcgccgggctcctcggcgacaagggcaccgccgacgtgacgctcgtcgtgcggggcgaggagttcgccgcgcaccgggcggtgctcgccatgcgttcgccggtgttcaaggcggcgctctacgggccaatgaaggagtccacggacgcgaacgccggccgcgtcgccatcgacagcgtcgagccggcggtgttccgggctctcctccacttcatctacaccgacacgaccgccgccatggacgacctcgacgacgacgacgacgacaaggcgcagatgatcatgcaccttctcgaggccgccgaccggtacgacgtcgagaggctgaagctgatctgcgagctcatgctctgcaagagcatcgccgtggacaccgtcgcggcgacgctggcaatggcggatcagcaccattgccagaagctcaaggaggcgtgcatcgagttcttggccacctccaagaagatggaaggcgtcatggaaagccaagggtacgagaagatgaagctatcttgcccttctttcatggtggatttgtgggagataataggc

SEQ ID NO: 11427 - DNA, 1036 bp, Oryza sativa
  Clone ID: TFbOSC31366j.C1.o2.gm
atgggtcaatgcgccatgtctcacacgcgctctaccaccgccggcgccgccggcggtaagccgccgatcgcgccgccgccgacgtcctccgcctccgccattgtcgccgacacggccagcgggtaccacctcttcaagatcaacgactactcgcgtaccagggacatcttccccaccggcagtgccctcaagtcccgcgcgttcaccattggcggccaccaatggcgcatccattactaccccaacggcaacacggaggagtgcggcgagtacatctccctgtttcttcatctcgacgagattgtcaccgacaagaacgtgtacgcgcagcacgggttccgtttattcgacgagtttgccggtgataatgatgacgatgatgaactgcagccttcctccatcgctgacctcgggcaggtcagtacctttggtggcaacaacattgggttgggacgactgaggtttatcaaaagggaagagttggagaaatcgaagtatctgaagaacgactccttcaccgtcagatgcgatgtcgtcgtcaccaagcggatccgctcggaggagacgccattggtggtgaggacctctccaaagccaaaggtggcgaggctcgtcaccgtgccgccgtccgatctgcaccggcatcttcaggacctcctctgcgccgagaagggcgccgacgtggtgttcgaggccggtggcgagacttttaccgctcaccggtgcgtgctcgcggcccggtcaccggtcttcagcgcggagctgtttggatcaatgaaggagagcgacaccacggtggtcatccgcatcgacgacatggaggcacaagtgtttagggccttgctccgcttcgcgtacaccgactcgttgccggagatgaaggagaaagacgaaggcgccatgtgccagcacctgctcgtcgcggcggacaggtacgccatggagaggctcaagctggtgtgcgaggagaagctatgcgagcgcatcgatgtgagctcggtggcgaccgtcctggcgctagctgagcagcaccatt

SEQ ID NO: 11428 - DNA, 390 bp, Oryza sativa
  Clone ID: TFbOSC400299j.C1.o36.gm
atggtcgccgccgccgaatttccgtcctacgtctccgtgccgccgtccgacctgcaccgccacctcggcaagctgctcaccagtggggacggcacggacgtcactctcgaggccggcggcgagacgtacaaggcgcacaggtccgtgctcgccgcccgctcgtccgtgctcaaggcggagctcctcggcccgatggcgcagccgcggagcaccgccgccgccacgccaacgcgcatcaacgacatcgaggcgccggtgttcagggcgatgctgcacttcatatacaccgaccacctgagctcgaccatggcgaccgacggcttcgagcatctcaccacaagctgccctgccattctcaaggagctcatgtccaagcttgttgttcactga

SEQ ID NO: 11429 - DNA, 1401 bp, Oryza sativa
  Clone ID: TFbOSC400294j.C1.o19.fg
atgacttacaaacctgtcagagatgagttgtctatgccaggtgttcacccgtcacatcagggtgaccgagtgtccggccatgagaaagacgacctgcagagctctggagtctggaggtctagctctttactgaacatgttgtccatagctcaaacgctgaaaatagcaagagatcggtctagcttaactcatcacgcctctactattaaacattgcaagaccttcagaatgctccatccatctccagaatcacatcctaccttcagaatgacagacaactgcaacactttctccaccattgtcgcggaggccgtgagcgggtcacatgtgatcaagatagctgggtactcaagaatcaaggtgttactccgcaacggtgagtccctgacatccatccctttcagcgttgcaggccacagctggaccatcagattctaccccaacggtgattccgcggagagccaagattacctatcgttctatctgatccttgactccgccaattcctacgacgtgaaggtgattttcagcttcgagttgcttggcaagaatgggagatcagtgtcgtcttacagcttcactacagatctccgcaccttctcctacaaaggctcattgtggggatacaacaagttcattcaccaaacggtattggaagaatcgtcagcccatttaagagacgattcgttttccatcaggtgtgacatcaaagtgttcaaggagatctacagccaagaaaccaagggtgttcatagcaagtttgtggaggttcctccaagcaacctgcatcaacatctaggcaacctcctagacagcatggatggatcagacgtggtcttcgaggtcggcgaggagagattctctgctcataggtgcgttcttgctgctcggtcatcggtcttcaaggccgagcttcttggcaccatgaaggagaaagccgatggagccattcaagtcgatgatatggagcctggagtgtttaagtctttgctgcatttcatttacaccgattccctggacacgatggctcaagaagatcagagcagagacgaagcaagcgaggaggaggatttggtgatggctcagcatctacttgtcgcagcggaccggtacaacgtcgagagactgaagctgatatgcgaggagaagctatgcgagagcattgactccagcatggtggcaaccagtttggcgttagctgagcagcacaattgcaatgggctcaaggaagcttgctttgagttccttgcatctccttccaacctactggagatgatggcaagcgatggttatgaccatcttaaaaccagctgccctgctgttctcaaggagctcactacaagatttctgcctccggaaacgaaagcatcagaagagataaccattggtctatataattag

SEQ ID NO: 11430 - DNA, 1842 bp, Oryza sativa
  Clone ID: TFbOSC900305j.C1.o6.fg
atgacatcacatggggagctcaaagacatgtttgtaaagattcttcacttttcacagaaagtgatatccaatgacaagatattgaaagcaatgacatcaaatgggaagctcaaagacatgtttgcaaagattcttcactcattgcctgcaaattatggaaaggaaaagcacaataatgtggagaatggcattacacttgttggggcatcacgtgaaattctcatcgatgttgtatggaagaaagtgatattcaatgacaagatattagaagcaatgacatcaaatgggaagctcaaagacatgtttgcaaagattcttcactcattgcctgcaaattatggaaaggttaaaatgaaaagcacaataatgtggagaatgaagagtttaattattgtcaccattcaagggagtaaatacaagtatcttgaaccactatctttgatcatggaccagcttagtacaatgttctactgggctgaagatcgtttacatcctcggcagggtgaccgagtgtccggccatgagaaagacgacctgcagagctctggagtctggaggtctagctctttactgaacatgttgtccatagctcaaacgctgaaaatagcaagagatcggtctagcttaactcatcacgcctctactattaaacattgcaagaccttcagaatgctccatccatctccagaatcacatcctaccttcagaatgacagacaactgcaacactttctccaccattgtcgcggaggccgtgagcgggtcacatgtgatcaagatagctgggtactcaagaatcaaggtgttactccgcaacggtgagtccctgacatccatccctttcagcgttgcaggccacagctggaccatcagattctaccccaacggtgattccgcggagagccaagattacctatcgttctatctgatccttgactccgccaattcctacgacgtgaaggtgattttcagcttcgagttgcttggcaagaatgggagatcagtgtcgtcttacagcttcactacagatctccgcaccttctcctacaaaggctcattgtggggatacaacaagttcattcaccaaacggtattggaagaatcgtcagcccatttaagagacgattcgttttccatcaggtgtgacatcaaagtgttcaaggagatctacagccaagaaaccaagggtgttcatagcaagtttgtggaggttcctccaagcaacctgcatcaacatctaggcaacctcctagacagcatggatggatcagacgtggtcttcgaggtcggcgaggagagattctctgctcataggtgcgttcttgctgctcggtcatcggtcttcaaggccgagcttcttggcaccatgaaggagaaagccgatggagccattcaagtcgatgatatggagcctggagtgtttaagtctttgctgcatttcatttacaccgattccctggacacgatggctcaagaagatcagagcagagacgaagcaagcgaggaggaggatttggtgatggctcagcatctacttgtcgcagcggaccggtacaacgtcgagagactgaagctgatatgcgaggagaagctatgcgagagcattgactccagcatggtggcaaccagtttggcgttagctgagcagcacaattgcaatgggctcaaggaagcttgctttgagttccttgcatctccttccaacctactggagatgatggcaagcgatggttatgaccatcttaaaaccagctgccctgctgttctcaaggagctcactacaagatttctgcctccggaaacgaaagcatcagaagagataaccattggtctatataattag

SEQ ID NO: 11431 - DNA, 1791 bp, Oryza sativa
  Clone ID: TFbOSC412646j.C1.o23.fg
atggaggataaggtgctacccgagtggtatagtaaagaagataacggtgagtacctctcgctcttcctcgagctggtccgcgaatccacttccaacaatgtcagggccatttttgacgccttcttggtggaaaaagacgacgagccatcttccacccacgcagacaggggcgtgcatgttcacccaaccaatggctataccgcatggggatggccacagttcgtgaagcgaagcgatctcgagtcgtcgtcgtcgtcgtacgtggtggatggcaaggtcagaatcatgtgtgtggtcatcgtcatacgagacaacaccgtgcccgtgccaccgtctgacattggtgcccatctcggtggcctgctggaccgcggggaagggacggatgtctccttcctcgtcgacggcgagacgttcccggctcaccgtgccgtgctcgccgcccgctcgccggtgttccgtgccgagctccttggttccatggcggagtccaagatgtcctccatcactttacacgacatcgagcctttgacgttcagagctctacttcggttcatctacaccgacaagttgcctgccgacgacggcggtgatcagctcaagatggcagcaatggcgaccgatgagctattccagaaattgcttgcagctgctgataggtatgatttgagcaggttaaagttgatgtgtgcgcagaagctatgggaggcagtgtcagtggacacggttgcgacgacattgatccacgctgagatgcatggttgcccagagctgaagagtagctgtcttgacttcttcgtgcaggacaagaacttcaaggagaccgtgctaactgagggctatgtgcaattggtgcagcgttttccctcgattaaggatgagatcagaggtcgcaccgaaaggaagaagggcggaggctgcctgctagcggggagaagggcgaggcgcggcaaccatcgggttgggaagctggcgagcatgcgcggagagagggaggaggcggggaggccgatgaatgggacggggaggccggcgagggggcgaggaggccgacgagtgggatggggaggccggcgagcatgcgaggagagggagaaggcggggaaaagggcggagggtgatagccatcgggtggggaggccgatgaacgggacggggaggtcggcgtgcgcgcgaggagagggagaaggcggggaaaagggtggagggcgacagccatcgttgcacggagggggaggaggcggggaggccctcagcgcgtcgatcctggtggcctcaactccccgcgtcttcacccgcgacgccgccggtagtctccatcctgacaacagcgacgctgccggtgtccatcctactgcttctgccacacccttgataatgggtgctagaaagctatgtgtagctttggtctttgggctgctggcagcagacgtgatggtaacaagcatattgaaggggtcgtttgttttgatgttggtgcccaaaagctttgaatctgaccacgcaagggttcgtggccagcaacaaccgaaagtttgccaagggcttatggccggcaacaccgcaacaggagactgccagactggagacggggagaggcgtgtgaggctcagagaggcttgggcgttcaggcgttggcgattagaggatagaggcggccctggcgtgccggtggccagccggccactcggccaggcgcccggcgacctggcgccatcgacgcggagagccggagaggagacacgtcgcggtcgcggagttagggagtcactcgtggaagcggaatcgtga

SEQ ID NO: 11432 - DNA, 1113 bp, Oryza sativa
  Clone ID: TFbOSC410511j.C1.o2.fg
atggcgtccaactctccggcgacctccgacgccgccaccggcgacgtgccggagccgagcaggtcgtccagcgtcgtcaaggcaatgtccgggtaccacgtgctcaagatggaggggtacgccgccggggtcaagggcctcggcgttggcaagttcatcgactccggcagcttcgacgtcggcggccatcgctggtgcataagatactaccccaaacgcagcccggcctcccccggcgacggcgactggatatccatctacctgaacctgtgtagcacggccgccgccatcggcgacgccaatgcaagtttcaccattagtctcctcgaccaggacgacgacgagcatcagccggtggcggcgcacagccggagctgctcctcaacggttaccttctcctccgccgccaccaaggcttggggtttcccccgattcgtggagaggaagacgttggaggagtcgccatacctgagggacgacagcttcgtcctccgctgcgacgtcaccgtcttcaaggagaccatcatcgagccagctgctccgacgccgctcgtcgccgtgcctccgccggacatgcaccggcatctcgggagcctcctctccggcgggcatggggcggacgtcacgctccaggtcggcgacgagacgttcgcggcgcaccggtgcgtgctcgccgcccggtcgccggtgttcatggcggagctcttcggcccgatggcgacgagccgtcacaacgacagggagacgatccgtgtccacgacatggagccgagggtgttcgaggccatgctccacttcatctacaacgactcgttgcccaaggtagacgacgacgaggtggtagccatggcgcagcatctgctcgtcgcggcggacaggtacggcatggagaggctgaagctgatgtgcgaggacacgctgtgcagccacgtcgacgccagcacggcggctacggcgttgacgttggctgagcagcatcactgtgaggggctcaaggatgcttgcttcaaattcatggcggatcctgataatctcaaggtcgtcatggagagtgacggctatctgcatctgacaaggagctgctcttatgttcttaagaagttggctacttga

SEQ ID NO: 11433 - DNA, 843 bp, Oryza sativa
  Clone ID: TFbOSC401965j.C1.o5.fg
atggcgacaacgacggcgacgacacttgcggccagcgccggcgacggttcttccccgccgtcgcggtccaccgtcatgaccatcgcggcgcaggcttatcacgtactcaagatcaacggtgcaagggggttcaaaaacttcattaggagagacgaattagagcgatcggaatatctcaatgatgactactttgccattgctgcccatgtaatcatcccaaaggaaaagccatctgtcgtcgtaccaccgtcgaacatgcatctgcattatggtgatctcctcgtaagcaaagaaggcaccgatgtcaagttcctggtcggtggcgagatgtttgcggcgcaccggttggtgctggcggcacggtcactggtcttcaaggcagagcttttcgggccgacgaagaaaggcaccatagatgcgatacagattgacaacatgaaagcacgagtgttcaaggctctacttgggttcatctacacagacatttggccagagataggtcatggaaaagacaatgtagctatggctcaacagttgcttgctgctgcagacaggtatggcttacagaggttaaagtttgtctacgaagataagttgtgcaaccacattgatacatactcagtgtcaaccatgttggtgctagtggagaagcaccattgttgcaaactcaaggaggcatgctctacgttccttagttccatgagccctcctattgttgaagatccaaattccagcatatttggtagtgaattgaagaagacggtttcttcttcagagaaccatggaagtcaaattaaccgtacagatattaggattcaactgtggcaaaatgcagatgtctag

SEQ ID NO: 11434 - DNA, 1065 bp, Oryza sativa
  Clone ID: TFbOSC401879j.C1.o12.fg
atggagacagtaagaggaacgcaccggtttacatttcacggctacagcttgtgcaagggcggcggcgccggccggtgcattcgctccggcaccttcaccgtcggcggctacgactggtgcatctgcttctacccggagggccagggcggcggcggcggcgaccgggaacacgtctcggtcaagctcaggctggtcacccgctgcgccacggccaccgcgttctacgagctccgcctgctcgaccaggacaccggccgcgccgccgccgtcgcccgggcctccggcgcgcccagggtgttcgcgtcgagcaatcccggcacagcgtgcttcggccgccgcgcgttcatggagcggagcaagctggaggcgtcgcccgcgtgcctgcgcggcgacagcgtcgtcatcgactgcgccgtccgagtcgtcgtccacgaccccgtcgtcgccgccgtgcggcgccgcgaggcgccggacgacgtcccgccgtcgaacatactccggcagctggtggcgcaggtggagtccgagggcgccgacgtgacgttcgccgtgcagggggagacgttcacggcgcaccgcctgatgctcgccgcgcggtcgccggtgttcaaggcggagctctacggcgccatgaaggagaaggacgccgaccacgtcatcgccatcgtcgacgtgcagccggccgtgttcaaggccctcctccatttcatctacaccgacgacatgccacccgacctcggcctcgccgccgctgacgacgacgacaccgacagaatcgacatggcacgccacctgctcgtcgccgccgaccgatacgccgtcgagaggctgcgggtgatctgcgagcgcgtgctccggcgaagcctcggagtcgagacggtgatcgacacgatggcattggccgaacagcatagctgcggcgagctcaaggaagcttgcctcgagttcatcgattctcatagcaagcgaatcgtggagagtgatggttacaagaacctcaagagggcgtgccctttgctcgtcgcagacatgtgggagaggatcgtcctatcacgtctagagtaa

SEQ ID NO: 11435 - DNA, 2091 bp, Oryza sativa
  Clone ID: TFbOSC900182j.C1.o6.fg
atgagcttgcttgaaaattcagtagattctaacctacaaatccatcgaacgactaataataggaaggcggcgctggcccgcgaggtccgcacgcaggtcgacgccctccaccggtgcttctcctggcgccacgccgaccgcgccgccgccaagcgcgccacccacgtcctcgccgagctcgccaaaaacgaggaggttgtgaacgtgatcgtagagggcggcgccgtgcccgccctggtgtgccacctgaaggagccgcccgcggtggcggtgttgcaggaggagcagcagcctcggccgttcgagcacgaggtcgagaagggggctgccttcgctctcggcctcctagcagtaaagcctgaacatcaacaacttatagttgacgccggtgccttaccactgctggtgaatcttctaaaaaggcacaaaaatgctacaaacttgcgggcagttaacagtgttatcaggagagcagctgatgcaatcaccaatctagctcatgaaaatagcaacatcaaaacttgtgtcagaattgaaggcggaattccacctcttgttgaattgctagaatcacaggatctcaaggtgcagagagcagctgcaggggccttgcggacgctggctttcaaaaacgatgaaaacaaaagtcagattgttgattgcaatgcgttgccaactttgatattaatgcttcgatcagaggatgctgcgattcactacgaagcagttggtgtcattggaaacttggttcattcatccccaaatatcaagaaagaggttctcaatgcaggggccctgcaacctgtaattgggttattaagttcctgttgtacggagagtcaaagagaggctgctttgttgctagggcagtttgcttcggctgattctgattgcaaggtccatattgtgcaaagaggtgcagtccgtccgctgattgaaatgctacagtcagctgatgtccaacttagagaaatgtctgcttttgcccttgggaggcttgcccagagaagttcatttgtttcccaggacacacataaccaagcaggcattgcatataatggtggtttggtgcctctactaaagcttctagactcaaaaaatggatctctgcaacataatgctgcatttgccctttacggagttgctgacaacgaggactatgtgtccgacttcattaaagttggaggtgtacaaaagttgcaagatggagaatttatcgtgcaggccacaaaggattgtgtagctaagacccttaagaggttagaggagaagataaatggacgagtgttaaaacacttgctttatatgatgagagtaggagaaaaatctgtgcagaggcgggttgctctggccctggcacacctctgtgcgcctgaagatcaaagaacaatttttattgataataatggccttgagttgcttcttgatcttctggtttcggtgagcctgaagcatcagctagatggttcagtagcactatacaaattggccaacaaagctgcagcactttctcccatggatgctgcacctccatctccaacaccacaggtttatcttggtgagcaatatgtgaacagttcgacactttcagatgttaccttcttggtggaaggaaagcgcttttatgcacatagaattgcattacttgcttcttcggatgcatttcgtgcaatgtttgatggcggatatagggaaaaggacgcgagagacatagaaattccaaatatcagatggaatgtgtttgaactcatgatgagatttatctatacaggttcagtggaagtaactagcgatatctctcaggatcttcttagagctgctgatcagtatctattagaaggcctcaaacgtctgtgtgaatatacaattgcgcaggatgtgaatgtagacaacgtttctgacatgtatgacctatctgaagcttttcatgcaatgtcactcagacatacatgtgtcctatttatcttggagcagtttgaaaagatttgcgtcaaatctgggtcaagccagctgatccagcgtgtcatcccagagctccgcaacttcttcgctaaggcgctaaggccaagccacaggaatgcgcagccatga

SEQ ID NO: 11436 - DNA, 1149 bp, Oryza sativa
  Clone ID: TFbOSC423269j.C1.o4.fg
atggcgacggagtgcacgacgtcgacgagcacgacggcgacggtggaggggcggcacaggttccgcgtcgccgggtacggcgccaccaagggcgccgcgcccggccaccgcgtggcgtcggggaccttcaccgtcggcgggttcgactgggccgtcgtgttctacccggagggcgtcacggccgccgacatggacttcgtctcggtctacctcgagctcaagaacgccgccgccgccgctggcggcggcggaggcggcgcggtggcgcgcgcgttctacgacctcaggctgatccacccggccaccggcgagccgcggtccgtgcgctggcccatggacggctcgacgtcgcgcgtgttctcccaggcgttcccggcgtgggggcacctgaggttcatgcggcggcgcgagctggaggagatggggttcgtccgcgacgaccgcctcaccatcgagtgcgtcgtcaacgtcgtcctggaccccgtcgtcaccgccggcgacgcgccggagctcgaccatccgccgtcgaacatcctcggccacctcgccgggctcctcggcgacaagggcaccgccgacgtgacgctcgtcgtgcggggcgaggagttcgccgcgcaccgggcggtgctcgccatgcgttcgccggtgttcaaggcggcgctctacgggccaatgaaggagtccacggacgcgaacgccggccgcgtcgccatcgacagcgtcgagccggcggtgttccgggctctcctccacttcatctacaccgacacgaccgccgccatggacgacctcgacgacgacgacgacgacaaggcgcagatgatcatgcaccttctcgaggccgccgaccggtacgacgtcgagaggctgaagctgatctgcgagctcatgctctgcaagagcatcgccgtggacaccgtcgcggcgacgctggcaatggcggatcagcaccattgccagaagctcaaggaggcgtgcatcgagttcttggccacctccaagaagatggaaggcgtcatggaaagccaagggtacgagaagatgaagctatcttgcccttctttcatggtggatttgtgggagataataggcaggaagatgacctcttattctgttattcccaatatctatgcaagagacaaggactaa

SEQ ID NO: 11437 - DNA, 2068 bp, Oryza sativa
  Clone ID: TFbOSC100059j.C1.o4.np
ctattgaggcgattaatgctggtcatggagtcgaggcgtctcagctttccggtcgatcggccgcgagtccactctgtcggcttgtcttcgccaccgccattgctgataacaacaacgacttcaccgccggcctgcctccgtcgccgccgagtggtgcctccgtctacacggctggcctattatgccgccgctgttgggcgtctacgacttcaccgccggcctgcctccgtcgccgccgactggtgtctccgcctacacggctggcctattatgccgccgctgttgggcgtctacgacttcaccgccggcctgcctctgccgccactgactggtgtttttgcctatacggttggcggactccgccgctgttaatgggcttcatcatctacaccactggcttggttccactagcgctgactggtgtttttgtcaccattgatggactgctttattcccacatcggctacttctgctgtcatcgagggaatacgacaaagctaagtcatcatttatttcattctttatatgatattttgtcttttcctttgcctcactacatcaacttcaccaccggctcgcctcgaccgccggcgattggtgtttccgcctgcacggctggcctttatgccgccgttgttgggcgtctacgtcttcaccgaccggccgcctcgtccggcgccgactgatgcttccgcctgcacggctggcctattatgccgccgttgttgggcgtctacgtcttcaccgaccggcttgccttcgccgccgccgactggtgttcccgcctgcacggctggcctttatgccgccgttgttgggcgtctacgtcttcaccgaccggcttgccttcgccgctgccgactggtgtttccgcctgcacggctggcctttatgccgccgttgttgggcgtctacgtcttcaccgaccggccgcctcgtccgccgccgactggtgcttccgcctgcacggctggcctattatgccgccgttgttgggcgtctacgtcttcaccgaccggcttgccttcgccgctgccgactggtgtttccgcctgcacggctggcctttatgccgccgttgttgggcgtctacgtcttcaccgaccggcttgccttcgccgctgccgactggtgtttccacctgcacggctggcctattatgctgccgttgttgggcgtctacgtcttcaccgaccggccgccgcatccgccgctgactggtgtcactgcctgcacggctggcctgttataacaccaactgatgctaccttcttcacggtgccctcacctctacgtctggtttatacagctaccactactgatggacatcatcgtcttccgttgccgactggttatgccgccgccgactagtgcttttatcttcacaactgcgcgtcttcgctaccagtttgcttctgttgccgccgacttgtgttcacttcatcacggcgatgcaactttgtcatcatggtggagcgacttcatctttattatcttcggcactggcaaattctattgctgctacttcgcaagttttactacttcaccaaccacgacgtctttgtgaacctcgacatctcggcatgcaatgccatgatattttactacaacaagtgactctccaatattcaggatttctacttggacaccttcaacacatatcttcaatcaagcaatgactactcgacgacaagaagctataattctcgactctatgttcagttgtttcccaactaaccaaagaacattctacttcaacaacttcaaatatttcggtttagacgagttgggcaacaacatcaactctcctccaattatttgtcttcacggttggcctactacgcaactgccgatagaggatctcatcgttatcatcggctgctacatcgctattgactggatcaccgacatcgtcatcttcatcaacatcttgtcaagcctcatcaacatagcctactctgctgccgttgatgggaaacttcatcatcatagtcagctatctctgttgccgctaatcatcattaccgtcggatgcgtttgtcgccgccgattattttcttcatcttca

SEQ ID NO: 11438 - DNA, 323 bp, Oryza sativa
  Clone ID: TFbOSC100059j.C1.o5.np
atgataaaaatcagattgagtttccccctgactgatttggatcaagtcagagaagaggagcttgaagaagtggtcgacggaaaggaagtgaaaactcccgaagcgaaaacgaagtcggcgactcatgaagttaattccatcgtgctcgttgataggaaactcgacgcaacccctacctggcgcgccaactgtcgaaacatgaattcggcaataataaaacggggtagcgcacgagacctaaaagtggatggatgtggagacaaaggatttagacaggttcaggccctctcaatgagaggtaataccctactcctgtttgggga

SEQ ID NO: 11439 - DNA, 1068 bp, Oryza sativa
  Clone ID: TFbOSC400305j.C1.o22.fg
atgaagcggcaccagatggagtcggtgccgaggacggtctcgacggtggtgcccaacacggcggaggccacccacgtgttcgacatcgtggggtacagccagatgaaggggaggggccgcgaggagcacgtcacgtcggggaccttcgtcgtcggcggcctccactgggccatcctcctcttcccggacacccacgtcatcctcctcgacgacgaggaagacaacgtcaccgccttcctcgagctccagagccaggggggaagcaaggtgcgggcgtgctgcgacgtcaggctggtcgaccagaccaccggcctcgcctcctctgctgcgccggcgcagccggatgccaagacattcaaggtgttcaatgccgatgaatccaacagggtcagctgtctcaagatgaagaggaccgaattcgaggcgccgccgtatctcgtcgacgatcggattaccctggagtgtgtggtcactgtcaagaaggagccgagggtgtcgagagctagaccagtcccgaggatcaaggtgccgccgagcaacatgatgcagcaactcggcgatctgctggagtccaaggagggggcagatgtggtgttcgatgtcgcgggggagaccttcccggcgcacaagcttgtgctggcgatgcggtctcctgtcttcaaagcggagctatgcgggccgatgagggagagcgggacagagcctatcagcattgtggatatgcaaccggttgtgttcaaggccctgctccagttcatctatactgattggttgccgtcaattcgtgatcttgagggagacgataacagcgagatgatccggcacttgcttgtcgccgcggacagatatgctgtggacaggctgaagctgttgtgtcaaagcatcctttgcaagaatcttcgtgttggtaacgttgcaactacactggctctggctgatcaacatcattgtggcatgcttaaggatgcttgcattgaatttatgtcatgtccaaacatgttggatgatgtagtggcatcccaagggtttgtggatcttgaaaacacagctccttctctcgtcgcttag

SEQ ID NO: 11440 - DNA, 903 bp, Oryza sativa
  Clone ID: TFbOSC405158j.C1.o2.fg
atggagacggcgccgtcatcgtccatgtcaccggccagcggcacgtacgtcttggacgtccacggcttcagcggcctgaggaggcagcactgcggcggcggcggctgcatcgtctcgccgacgttcaccgtcgccggcctcgagtgggccatccggtaccacccggagggcgacgccgacgaggtgaccgacgacgtggccgtgttcgtcgtgctggtcaccaaggacgccacggcgtgggcgcacgtcgaattccggctgctcgaccaggccgccggcgagatggtcaccttcttcggggagaaggatccgatcttgttcgactccggcagcgaggacctgtccacctggggcaccggagagctcaccgccaggagcttcctagacggctcgccatacgtcgcaggcgactgcctcaagatagagtgcgccgtcgacgtctgccgcgaccgcctcacgttccaccacgacacgccgccctccggcgagccgttccgccagtaccccgccgacgacgagccggccgacgtcaccttcaagatcgccggtgagaccttccccgcccatgtctccgtgctcgccgcccgtgctcccggcctgctcaccaacacgacgtcgcaggcggcaaccatcaccatcgacgacgacgacgacgacacgccggcggcggcggcggcattcggagcgctcctccacttcgcctacaccgacacgctccccgtggcgagcggcctcgacggcgccggccacacggcgctgctggggcgcctcctcgtcgcggcggggcggtacggcatggcgaggctgggggcgatctgcgagcgcgccatgtgcaggagcctcgacgcggggacggcggcggacacgctggccatggccgacggcacggcttcgacgcgctga

SEQ ID NO: 11441 - DNA, 1035 bp, Oryza sativa
  Clone ID: TFbOSC401879j.C1.o11.fg
atggcatcgtctcgccccatctcggagagcaccatcacgaggtcgacgtgcgcgacgcggacggcgcgcgccacgcaccagttcgagatcgtcgggtacagcctcaagaggtgcctcgccgccggcgagttcgtccggtcctccgccttcgccgcctgcggctacaggtggtccgtccgcgtctaccccggcgggttcgggccggcgcaccgggagttcgtgtcggtgttcgtcaagatgatgaccaacaggggcaaggcggcggcgcggttcgacctccggctgatcgaccgcgccaccgggctgccccgctcggtgttccgggcggcgcagccagtggtgttcgactactccgtcaagcacaagaagtgcaagggcaagcggggcacccgcgcgttcatgcggcggcgcgacctcgagtcgtcggcgttcgtccgcgacgaccgcctcatcgtcgagtgcgtcatcgacgtcgtcgtcgccaacggcggcgacgacgacacggcggccgcggcgtcccccctcgccggcgtgccggcgccggacctgtcgaggcacctcggcgagctgctggagcgggcggacggcgtgggcgcggacgtcacgttcgacgtcagggggcaacccttcgccgcccaccggatcgtgctcgccatgcgctcgccggtgttcatggcatcgctgtacgggtcgatgagggagcaccgcgcgccgcggatcgccgtcgacgacatggagccggaggtgttcgacgcgctcctccgcttcgtctacagcgacacgctggcgctccccggcgacctcggggaaggcgagtacaaggagatggtgcggcagctgctggaggcggccgaccggtacgccatggacaggctcagggtgatctgcgagctcatcctctccaggagcctcgacgccaagaccgtcgcggcgacgctcgccatggctgaccagcacagcactactgcgacgcgctcaaggatgtttgtgttcagttcatggccgttgggttggatgaccacaattaatgattga

SEQ ID NO: 11442 - DNA, 996 bp, Oryza sativa
  Clone ID: TFbOSC400239j.C1.o24.gm
atggatatcgggccgcatagcatccagctgatcgcgccgccgtccctctatcacgccgcctccgctgccgccatgggtgatcaccgcgacccggctttccccgcggcggcgggcggctgccggctgcccaagacgtcgtcggtgagcgtcacggagtccgtcaccgcggtgcacgatttcaaggtgacgggttactcgctgatcgaggggctgggcatcggcaggtacgtcagctcatccaccttcaccgtcggcggcgtcgactgggccgtcaggttctaccccgacggctccaccgtcacctgcctcgggaacgcgtcggcgttcctctactactgcggcagggagaaggaggtcaggaccaggttcaccctgaatctgctcggcaaggacggcaaattgtcgcaggtgaccaattcctacatgaagcacaccttctccccggcgagtgacaattggggattcatcaaattcgccgagaaatcgaagctgcagagctcgccgttcctccacaacgactgcctgaccatcaggtgcttgctgaccgtcgtcagggaatcccacaccaaggatgttgaggtcaattctgttgttgtcccaccgtccaacctgcataccgattttgagaacatgctccaggatggtgaaggttcagatgtgacattcaccgtgggtggccaagagttccgtgctcataaatgtgttcttgccttccggtccccggtgttcaaggccgagcttttcggtccgatgaaagaaaatggcacgcaatgtatcaagatcgacgacatggagcctgaggtttttgaggctcttcttcacttcatttacacagataggctgccagatagctgcagagatggcaaggctgcagcaatgcagcacttgctagttgccgcggatcgggacagccttaccgaaattgctcctatggaggaattcttcatcactcacagaataagctgtggagaaatcgacgccaggagcttcgtgtga

SEQ ID NO: 11443 - DNA, 2157 bp, Oryza sativa
  Clone ID: TFbOSC400049j.C1.o33.fg
atgtcgtcgccgtcgtcgcagcagccggcgtccgccatcaaggcgcccacgacgagcggctaccaccgcctcaggatagactactaccgcagcctgggatcccccactgggtgggcgctctcgtcccgcgacttcgtcgtcggcgggcggcagtggagaatctcctactaccctaacggcaaccgcccggagaacgccgagttcatatcagtgttcctgtgcctggacagctcttctccgaagccggcgatgctgcaggtgacgatcaccttcgacgatgaggccaagaagcagtcgcagcttcgtaaggcccccgtgatcaccattgcaccgggagcttgttggggatatcacaggttcgtgaagagggatgatcttgcgaggtcgaagcggatcaggcccgacgggttcttcacgatacggtgcgacgtgtccctgatcgaccacttcacggcgcaggaggacgagccggtgttcgtctcggtgccaccttccgagctgcggcgcgacctcggcggcctgctcgacaccgggagcggcggcgacgtcgtgttccaggtcggcggcgaggccttcaccgcccacaggggcctgctcgcggcgcggtcgccggtcctcgccgccgcgctctacggcccaatgatggaaggcggtggccttcaaggcggcgtcgctatcaagatagacgacatggatcctctcgtgttcaaggcactgctcaggtacgcctacaccgactcgctgccgccgcagatgcagcagggcgagctcgaggaggagggacgcgccatggcgcagcatctcctcgccgcagccgatcggtacgggatggaacggctgaggctgctatgcgaagctcagctttgcaagcacatcgaggtggccagcgtggcgagtatcctgatcttggccgaccaacacggatgctccggcttgaagaacgcttgcttcgagttccttaagagccctgggaagtttgcagctgccatggcgacacaagagtacgattacctgaagacgaaccactgtgctctggcggatgaggtcgtcaagggaaaccaggcaaaatggatgctagctactgttgaaactttcatgaggcaccgactgaactctaagagcattttagagactgctacaagagaaattgcgctccacgcctccacatcaaatgagacaccccctgtgtttctcgacctggaggaatcccttcgggccaagggcgatatgacgctgcgcgaggaggccacattgaaggtcttgaaggtggtcgcgaccctgggcaaggccatctccaccggggcgatcgccgccgtggggtattatgttcccggcattgttggagctaaatttggtgaaccatctcttcctcggctaccaagattcgccatggctgctgtcacttcatggtttgctggaaaggtgatgtattatgcaatcttgcaaggaagtactgaattcattttgaaacatggagaagaacgcatgaagatggagctatctaacataatactcaataagcacagtgatgataaaacactggttgaagctgtaaaaacgcagttctttgctgagcatctgtttagtgatcagtatcaagataggacacttttcaggtggcatctacgccgtacttatgttgacagcgcctttatggaaagggtgaaggagatcgaagtgaagagctcaaatgatgggcctggattaatttctggacagagaattataagcactagaccatttggagacctcatggaggacccactggcgtgtatacttggttctccagacagcaacatggaaagcaacaagtctgctgagcacacgggtactatcgtgaagagaagggagattgcttgcccacctgcagttctggttgaaccaatcaggttgcaacctaatgtgcccatctgcagtttgttagcacgatcgcgaacagggtcaaatttggaggtgaacccggtgattcttgacctggaggaatctctactggccaaggggaacatgacgcttgaggaggaggtcacaatccgggtcagcaagatgaccgcgagcgtgttcaaggtcttcgccaccgcggcgtttggtgcgtcgagttattatgccctcggcctcggtgagctttctctgcatgcgcgcgcccgtctcgatctgtga

SEQ ID NO: 11444 - DNA, 1797 bp, Oryza sativa
  Clone ID: TFbOSC9666j.C1.o2.fg
atgcctttccattcctcggctacaatcaatctccgtacctcgtacctcgagccggtggcgtcgcgcacgtacggtggcaacgtgcacaggttcccgagccccaggggttcttcctcgtggggattccacaagttcatccgccacgacgagctcgagaggtcgggccacctcaccggcgaccgcttcgccgtccgctgcgacgtcaccgtcatgagggccacggagctccgcgtcgagccggcgtgcctcgccgtgccggagccggacctgcgcgcccacctccgccgcctcctctccaccggcgacggcgcggacgtcacgttcagggtcggcggcggcgagacgttcgccgcgcataggtgcgtgctcgctgcccggtcgccggtgttcaaggccgagctctgtggtcgtggcggcgcggccgccggtagatgcgtcgacgtcgacgacatgggcgccggggagttcggggctctgcttcacttcgtgtacacggacacgttgctggagatggcctcgcgcgacgtgccagccatggcgcggcggttgatcgcggcggccggcaaataccaagtggagaggctgaagctggtatgcgaggacatgttgcgcaggcgcgtcgacacgagcatggccatggcgacgacgacggattcggcagctaccaccgacgatcagcttagccagcgtccatggctgacgcagcttttcttcaagtttgcatcacgcatggtcggtggcatggtcgtcgacgcgttcacacctgagcctcccactgccgccgagaaatccggcgacgcctcgccgtcgctatcgccatcgccgtcgtgctcgaccgtcgccgtctccgaggcgagtggtcaccacgtcctgaggatagagggatacaagaggacgaagatgatgatggcaaccggcgaacacctcaactccggcgagttccacgtcggcggctacacatggcgtctccggtactatccaaataggtacgaccaggagttctccagctcgatatccttcgctctggtgcggaccggccgcgacgacgacgatgtcgtcgtccgagcacgcgtcaagatcagcttgctcgacgtcgccggcgagccggtgacacggtacagccacagcgacaacaagtgcacgttctacgagggacatgatctctgggccatcaagagcttcatcaggagggttgatctggaggattccgggcatctcgacgacggcggcggtggcggcgactccttcgccgtccggtgcgacctcaccttcaacgtcccggacatccgcgtcgacgtcgacgacgcggccgccgtcacggtgcccgccgtgccgccgcctctcctgcatcgccacctcggcgacctcctcgcctccgaggcggcggccgacgtgaggttcaatgtcgacggcgaggcgttcgcggcgcaccggtgcatcctggcggcgcggtcgccggtgttccgggcggagctgttcggctccatgcgggagcgcgccgcgagggccatcgtccgcgtcgacgacatggacgccgacgcgttcgcggcgttcctgcacttcgtctacaccgacgagctgccggagatggacgacgatggcgaggaggcggcggcggtgatggcgaagcacctgctcgtcgccgccgacaggtacggcatggagaggctgaagaaggtgtgcgaggacgtgctgttcaggcacgtcgtcgtggccacggcggcgacatcgctggcgttggccgagcagcatgactgccccgagctcaaggacgccatcttgaggtttaagctctag

SEQ ID NO: 11445 - DNA, 924 bp, Oryza sativa
  Clone ID: TFbOSC34061j.C1.o16.fg
atggctagcagttcgacatcgtcgagatgcctgacggcgagcgtcaccgggacgcacaacttggaggtgacgagctactcgctgctcgaaggcatgggggtcggcaagttcgtgagctcgaccaccttctccgtcgccggctacgactggaacctccgcttctaccccgacggcatcacggacaacgacagaaaggaaggctacggggctgtttggatgcttgcttcagtttaccaaatttctatagctaaggaacatgcaattcgccggattcggttcactggcaacgacagcttcaagatcgagtgttcgctgaccgtcataagcgagtctcgcgctgaagacgtgagcacgatcccagtcccgccgtcgaacctgcaccagcacctcgccggcatgttgcacggcgtcgagatcgcggatgtggagttcagcgtcggcggcgagccgttccgcgcccacgcgtgcgtgctggcggcgcggtcgccggtgttcagggcggagctcctcggaccagctgctgcacggagcatcaagatcgacgacgacgacgacatggagcccgcgacattcaaggcgcttcttcacttcatctacacggatcacctgccgaacgactccggattcggcaaagacgcggcaatgcagcggcgtctgctggtggctgccgatcgctacggggtggacaggctgagggcgatgtgcggggtcaagctgtacaagagcgttagcgttgggacggtcgtggattccctggaattcgcagagaagcaccactgcgcgcagctcaaggatgcttgccttggattcatggcttcacctaacgttcttggtgtcgtcaggaaaaccgatggattcaagcgtctcgtggagggctgcccttgggtcttgaaggagattttagacaaggtgcctagattctga

SEQ ID NO: 11446 - DNA, 1149 bp, Oryza sativa
  Clone ID: TFbOSC401668j.C1.o19.fg
atggaacatcggggaacgcgcggcgagcacagcccggtgcgcatgaaacatctcgctgccaacagagaaggagatgtccgagccattggcgctgcccaccatgatgccgagttggttccccaggttggaaggtggcactgcaataggttcgttgtggttgcgcagaatgatgaggccacatatgaatgtaaccacatagcgagagtcaagttcactcagcttgacgaagcgccaccaggcatcaaagcggaagccctgggatgccttgcttaccagcagactcctctgggaatgttgcacggctggtattccaccttgtgctcgatgaaattggagacgagatccatcacacatggctgggtggggacgccgaaggctggggtgggagatcgggagatgaggatagtgacgggacagcgtcggaggctgggaatgcttctcgttggagagcgtaggagccgggggggggggcagccgtgcgagccgccgaagacgagggaggagaggtggggtggggaaatttcgctggagatgaagaagaggagtagcggaggaggtgggggttggggagtacggatggcctcgtcggcacggtgccggcggcgcgcgcgagggttgggggatggagcggccgcgatacacatgtgccgggtggaccacttgaacggctccgacgtgttcttcttcgtcggtggcgagacgttccatgcgcaccgggccctgcttgccgtgtgctcgccggtcttcaaggctctgctccttagctccacggcggaggcagcagcctgcagcatcaccctgaacgacatcaagccagcgatgttcgaagctttgctgcacttcatgtacaccggcgacttcctgccagcgggagcccactcgtcgtcgcctgacagcagcgacaccaacaccgacacgctccaccggctgctcgcggcggcgcacgagtataagctcgacaggctgaagctcatgtgcgcccgaaaactcgaggagagcttgtcggtggagacggtggcgaggacactgggctatgccaagatgtgcggctgctcggagttgaagagcaagtgtctcgacttacttcttcttggcgaagaagaacatcaaagcattggccacacatggctacttctggctctggcataa

SEQ ID NO: 11447 - DNA, 1275 bp, Oryza sativa
  Clone ID: TFbOSC400432j.C1.o4.fg
atggacgacgacgccggcgacgcctcgccgccgccggccgccgcgggggttggcgccaccgccgcccagtcgcgggacatggcggcgtcgccgaccagctcccgctccgtgacggagacggtgaacggctcccaccgcttcgtgatccagggctactcgctcgccaaggggatgggcgtcgggaagcacatcgccagcgagaccttctccgtcggcggctaccagtgggcggtctacttctaccccgacgggaagaaccccgaggacaactccgcctacgtctccgtcttcatcgccctcgcctccgagggcaccgacgtccgcgccctcttcgagctcacgctgctcgaccagagcggcaagggcaagcacaaggtccactcccacttcgaccgctccctcgagtccggcccatacaccctcaagtaccgcggctccatgtggggttacaaaaggttctttcggcgaaccgctcttgagacgtcggactttttgaaagatgattgcttgaagataaattgcactgtgggtgttgtggtgtcgactattgattactccagaccacactctatcctggttccagactctgatataggctatcattttggtacgcttttggacaatcatgaaggggtcgatgttgttcttagtgtgggaggagagagatttcatgcacataagttggtgttggctgcacgatctactgtatttagatcaaaatttttcgatgatgaggatggggagaagaatgagcctggtgagaatgatgatgtacaagagattgttattgatgatatggaaccaaaggttttcaaggcaatgcttcattttatctacagagatacacttgttgatgataacgagttgggtgggtcaagctctgagggctctatcttcgatacattggcagcgaagttgttggctgcagcagacaagtatgacttagcaaggctaagattgctatgtgaatcttacttgtgcaaagccatttctgtggctacagttgcaagtactctagcattggctgatcgacaccatgctatggagcttaaagctgtttgcctaaagtttgctgcagaaaacctttcagctgtaatccggaccgaaggattcgattacctcaaggacaactgcccatcacttcaatccgagatactgagaactctcgccggctgcgaagaggagtgcagcagcggcggcaagagccagagcgtgtggggtcagctctcggatggtggtgacacgagtggccgtagggttaggccaagaacctaa

SEQ ID NO: 11448 - DNA, 1218 bp, Oryza sativa
  Clone ID: TFbOSC400049j.C1.o10.gm
atggtggtcgagcaacgccccaaccaccaacgcttggggcgcattcacggcgccaaggacggtgccccgctggctccaaggatgttgcttcaagtgcttgggcctaagggtttccggccatgccgcccgccgcccgccgcccgccgcctgagcccgccgcggtcggactccacctccaccatcgtggccggcacggcggccgggtcccacctcctcaagatcgacgggtactcgctcaccaaggggacccccaatggctcgttccttatctccagccagttcaccgtcggcggccaccgctggcgcatcaggtactatcccaacgggttctcatccagctccgccgatttcatttcgcttttcctcgtgctagacgagaaggtgaaggtgcaggcgaagtcggacttccagatcagttacaccggccaggtggatgagccaccgtggttggcaaccatgaaagcggatactttcgatggtgcgggctttcggtctttcggctatgaaaagttcgtcagaaggtgtgactttgagaagctcatcagggacgactctttcaccatccgttgcgacattgttgtcatcgacgagatccgcgccgaggagtcgaccgagatcaccaccaccacagccgccgtcgtcaccgtgcccccgtctgacctgaaccagcagctcggcgacctgctggagagcgagaagggcgcggatgtggtgttcgaggtcggcggccagacgctcgcggcgcaccggtgcgtgctcgcggcgcggtcgccggtcttcaaggcggagctctatggcttgatgaaggagggtggcaccgccgccggagccgtgcacatcgaggacattgagccgcgcgtgttcaaggtgctgctccgcttcatgtacaccgactcgctcccggagatggaggaggaagacgtcatgtgccagcatctgctcgtcgcggcggaccggtacaacctcgagaggctcaagctgatctgcgaggagaagttgtgcaggcacattagcgtcggcacggtatggaacatcctgccgctggctgatcagcaccactgtgacgggctgaagaaagcgtgcttcgatttcctcggctcactggcaaacctgagtgctgtcgtcgccagtgatggcttcaagcatctttgcaggagttgcccctctcttatggaagagctggttgtcacgctggcacttccagggagtcatgcttag

SEQ ID NO: 11449 - DNA, 1077 bp, Oryza sativa
  Clone ID: TFbOSC9665j.C1.o2.fg
atgtctaccaagaaatccggcgccgccgacgtccagccatcgccgtcgtcgtgctcgaccatcgtcgtcaccgaggcgagcggccaccacgtcctcaagatcgatggttacacgaggacgacgatgatggtcgccaccggcgaacacctcgactccggcgagttccacgtcggcggctacgcctggcatctccggtactaccccaacggctacgaccaggagttctcgagctcgatatccttcgctctcgtccggaccgccggcgccggcgacaatgtccgtctccatgcgagagccaagatcagcttgctcgacctcgccggcgagccggtggcacggtacagccaacccgtcgacaagtgttccacctccaaggcaagcgatccatgggtttgcaagagcttcatcgagagggatgagctggagaagtccggccatgtcgtcggcgaccgcctcgccgtccggtgcgacctcaccttcaacgtgcaggaccgcctggtgagggagctcgtcgccgtgccgccgcccctcctgcgccgccacatcggcgagctcctcggcgacgccaggacgtccgacgtgaggttcaaggtcggcggcgagacgttcccggcgcaccggtgcgtcctcgcggcgcggtcgccggtgttcagggcggagctcctcggccccatgagggagcacgccgcgacgaccatccgcgtcgacgacatggacgcctccgtgttcgccgctctgctgcgcttcgtctacaccgacgagctgccggagctggacggcggcagcgcggcggcgatggcgcagcacctgctggtggcggcggacaggtacgacatggagaggctgaagaaggtgtgcgaggacaggatggtcaggcacctcgacgtcggcacggcggcgacgtcgctggcgttggccgagcagcacgattgccctgagctcaagaaggccatcctgaggttcatggcgtcgccggcgaggttgaaggcggtcatggcgagcgatgggtatgagcacctggtgacaagcttcccctccatagccacggagattcttgcaatgtttgctgcacattga

SEQ ID NO: 11450 - DNA, 1257 bp, Oryza sativa
  Clone ID: TFbOSC401824j.C1.o49.fg
atggagagagtgttgatggcatgtcttgagctggattcttcacaattcctactgaatggggatggcagtgtgatcggcagcccatttgatatccagcttgagtgcaatagcttcacaggctccaaagctgttcaagatcatagccgatatactcttccttcacagtgcactaatgcccctgatccacctccattacccggaacttcttatggcacacacagaacttccaggaatgcaaaggcttgcaggtgtgtccctgaagagatccaggatttctgggacaggatgttcttcgaagcgtatcaatatgatctccgtgttttgacggaagatggcaatgagatcatgtcacattcctgcgttgttggtattaaatctcctgttctaagagctatgttggaagaagctaaagtacaaggtggcatccgacacatcctgatacctggtgtaccatcagaagcagtacatgttttcatcagatttctttattcctcgcgttttgagcagtatcagatgaagaggtatgtacttcatctgcttgtactctcccacgttttctcagtaccatctctgaagagagtctgcatcaaccaactggagacatctttgctttctcctgagaacgtggtagacatactacaacttgctagactgtgcgacgcgccgcggctctccctcgtatgcactcgtatgatcatcggagatttcaaggctatcactcaaacagaagggtggagagtgatgagacaagccaacccaagcctggagcaggagctgcttgagtccctcgtcgaagaagatacaaaaaggcaagagagagcaagaaggctggaggagaataaggtttatctgcagctacatgaagctatggaagctcttattcatatatgtcgagatggatgcaggacaattggccctcgagatcaaacgctaaagagcagtcaggccgtttgcaggtttcctgcctgcaagggcatcgagctgctcctgcgccatttctcggcgtgcaaaatgcgggtgcctggtggctgcgctaactgcaagcgcatatggcagcttcttgagctgcattctcgcatgtgctctgcacttgaaacttgccatgttcccctctgtaggcatttcaaggagaaaatgcaacatctgagcagaaaggaggaggccaagtggaatcttttggtgtccaaggtgttggagagcaaagcaacaaccagttccatctcagaaaggagaaaatttccatccctgaaaacatag

SEQ ID NO: 11451 - DNA, 708 bp, Oryza sativa
  Clone ID: TFbOSC401315j.C1.o10.fg
atggatggaacggacgtgacattcgacattggtcaggacatattctcagcgcacaagtgcatactcgctgctcgttcatctgtcttcaaggctgagttctttggcgccatgagtgccaaagcccataggaccatcaaaattgaagatatggaagctggtgtgtttagatcactactgcatttcatctacactgacgctctgcctgagacggctttagatgttgtgatgactcagcacttgcttgtcgcagcagatcggtacaatgtagagaggctgaagctgatttgcgaggagaagctgtcaaagcacattgactccaacatggtggctaccactttggctctagctgagcagcatagctgccacggattgaaggaagcatgcttcaagttccttagttctgatgccaatcttgagaggatgaaggccagtgaaggttatgagcatttgaaggttagttgcccatttgttctcaaggaacttattgcgagattcatctctccggaaatggaagctgcaagggaaataaccatggatcttcaaaacttgaagatttgggttgaaacttttgatagtttgtgttataattttgagaattataagaagttctggagatccaataaagataccagaaaaggaaaggaaatggtgttctgcacccatggacggatctacagtagaaaggccggtgtcaggcgacaccgataa

SEQ ID NO: 11452 - DNA, 1098 bp, Oryza sativa
  Clone ID: TFbOSC400305j.C1.o15.fg
atggggacgggatccaagaagaagaagacggtgtcgtggtgcacgacggaggtatcggagggcacgcacgcgttcaagatcgtcggctacagcctcaacaagggcatcggcgtcgggaccttcatccggtcgggcaccttcgccgtcggcggccacgattgggccatccgcctctaccccgacggagtcaccgaggattccatggactacgtgtcggtgtatctggagctgatgaccgagaacgccaaggccatggcgttctacacgctgggcctggttgatccggtcaccggagggatccgctgcaattggtcccgatcatcgccgaggctgttcgattcctccgattcgagccgtttcgggccaagatccccactcttcataccgagaagtgatctggagatggaggaatctggctacattgtgaatgatcgcctcacggttgaatgcgaggttactgtcaccaaggggccgcaggtgtcaagaaccattggttgctctgaaatcggcgtgccaccttcagagctatctgaacattttgggaagctgttggaggaggaagaggatgtagggagggatgtggttttcagtgtcgagggagagtccttcgccgcgcacaagctcgtgctcgccgcgcgatcgcccgtcttcaaggcggagttttacggggagatgattgaaaggggcacattttccatagatatcaaggacatgcagccttctgtcttcagggctctcctgcatttcatctacactgatgtgttgcctgctgacattggcgatcttgagggagatgattatgtcgaatttatccggcatctagtcgtggcggcggatagatatgccatggataggttgaagttgatgtgccaaagcatccttggaaagtatgttgatgtgaagaacgtggcgactacgctggctttagctgaccagcataactgtgataagcttaaggatgtttgcattcagtacatttgctctctggatgaggttgatgctatggtcaggaccaaaggctatgcaaatctcaaaagaagttgcccttctgtgttggcagatttatttgagaagacaagcaagttccgtgcttcttga

SEQ ID NO: 11453 - DNA, 903 bp, Oryza sativa
  Clone ID: TFbOSC401879j.C1.o10.fg
atggagacggcgccgtcatcgtccatgtcaccggccagcggcacgtacgtcttggacgtccacggcttcagcggcctgaggaggcagcactgcggcggcggcggctgcatcgtctcgccgacgttcaccgtcgccggcctcgagtgggccatccggtaccacccggagggcgacgccgacgaggtgaccgacgacgtggccgtgttcgtcgtgctggtcaccaaggacgccacggcgtgggcgcacgtcgaattccggctgctcgaccaggccgccggcgagatggtcaccttcttcggggagaaggatccgatcttgttcgactccggcagcgaggacctgtccacctggggcaccggcgagctcgccgccaggagcttcctcgacggctcgccctacgtcgccggcgactgcctcaagatcgagtgcgccgtcgacgtctgccgcgaccgcctcacgttccaccacgacacgccgccctccggcgagccgttccgccagtaccccgccgacgacgagccggccgacgtcaccttcaagatcgccggtgagaccttccccgcccatgtctccgtgctcgccgcccgtgctcccggcctgctcaacaacacgacgtcgcaggcggcaaccatcaccatcgacgacgacgacgacgacacgccggcggcggcggcggcattcggagcgctcctccacttcgcctacaccgacacgctccccgtggcgagcggcctcgacggcgccggccacacggcgctgctggggcgcctcctcgtcgcggcggggcggtacggcatggcgaggctgggggcgatctgcgagcgcgccatgtgcaggagcctcgacgcggggacggcggcggacacgctggccatggccgacggcacggcttcgacgcgctga

SEQ ID NO: 11454 - DNA, 1116 bp, Oryza sativa
  Clone ID: TFbOSC23856j.C1.o1.gm
atggcaaaccattgcaacaacacctcctctgtcacggttgctgaagttgcaagagggtcgcatgtaatcaagattgatggatacttaaggaccaaggagctgatggagaatggcaagtatgtttcatctatcccattcagtgttggaggtcatagctggttcatcacatacttccccaatggagttaacacagagagtaaggattacctgtcggtttttctgaccattgattttgcttgcgccgggggcgtgaaggcaaccttcagctttgcattgctagacaagaatggtagatcagtgcaattatacagcaaattgtaccctttacacaccttcacggaaaaaggttcagattggggccactctaagttcatgaagaaaactgatttggaacgctcagtacatttgagcaacgattcattctccatcatgtgcgatttgactgtcatgaaggatatctgtagcaaagaaaccacacaaaagcagtttgtggtggttcctcctagtgacctgcaccagcatctgggagacctcctcttgaagaacatggatagtacggacgtgacgttcaacgttggtcaggatatattctcagcgcacaagtgcatactcgctgctcgttcatctgtcttcagagctgagttctttggcgccatgagtgctaaagcccgtaggaccatcaaaattgaagatatagaagctggggtgttcagagcattgttgcatttcatctacactgactcactgcctgagactgctcaaaatattgtgatggctcagcacctagttgtggcagcagatcggtacaatgtcgggaggctgaagctaatatgcgaggagaagctatcaaagcacattgactccaacatggtggctaccactttggccctagctgagcagcacagttgctatggactcaaggaagcttgctttgagttccttgcttctcgctccaatcttgagaggatgatggccagtgatgattatgagcatctgaaaatcagttgcccgtctgttctcatggagcttgttgcgagccgtgcgccgccgccgctctggtcatcgtcgtcgctcgggaaggccgccgtcgggttcgccaagtcatcgccgtcctag

SEQ ID NO: 11455 - DNA, 1062 bp, Oryza sativa
  Clone ID: TFbOSC401315j.C1.o11.fg
atggcaaaccattgcaacaacacctcctctgtcacggttgctgaagttgcaagagggtcgcatgtaatcaagattgatggatacttaaggaccaaggagctgatggagaatggcaagtatgtttcatctatcccattcagtgttggaggtcatagctggttcatcacatacttccccaatggagttaacacagagagtaaggattacctgtcggtttttctgaccattgattttgcttgcgccgggggcgtgaaggcaaccttcagctttgcattgctagacaagaatggtagatcagtgcaattatacagcaaattgtaccctttacacaccttcacggaaaaaggttcagattggggccactctaagttcatgaagaaaactgatttggaacgctcagtacatttgagcaacgattcattctccatcatgtgcgatttgactgtcatgaaggatatctgtagcaaagaaaccacacaaaagcagtttgtggtggttcctcctagtgacctgcaccagcatctgggagacctcctcttgaagaacatggatagtacggacgtgacgttcaacgttggtcaggatatattctcagcgcacaagtgcatactcgctgctcgttcatctgtcttcagagctgagttctttggcgccatgagtgctaaagcccgtaggaccatcaaaattgaagatatagaagctggggtgttcagagcattgttgcatttcatctacactgactcactgcctgagactgctcaaaatattgtgatggctcagcacctagttgtggcagcagatcggtacaatgtcgggaggctgaagctaatatgcgaggagaagctatcaaagcacattgactccaacatggtggctaccactttggccctagctgagcagcacagttgctatggactcaaggaagcttgctttgagttccttgcttctcgctccaatcttgagaggatgatggccagtgatgattatgagcatctgaaaatcagttgcccgtctgttctcatggagcttgttgcgaggttcctccctcagcaagagaaataa

SEQ ID NO: 11456 - DNA, 1086 bp, Oryza sativa
  Clone ID: TFbOSC400049j.C1.o28.fg
atgggcgcctcggcgtcgtcgtccgccggccgcagcaagccgccgccgccgccgccgtgctccagctcgggcgtcgccgtgagcacgtctcgcgggtaccacctcttcgagatccgcaaccactcccgcatcaagtcgatgaccccgctgggccgcggcgagacggcggaggccgccgactacgccgccgtctacctcgactatgtcatcgacagctacccgcccaagtccgtcaccgcctacttcctcctacgcctcgtcgacaaggtctccaacgacctcatggacccgccgcccgacgacgacgtgcgcgccgccgcggtgcacgagttcagcgccgggcagaacagctggggctactacgcgttctggaagaaggacgagctggagagctcggggcgcatcgtggacgacgtgctcaccatccggtgcgacgtcggcgtcgtcggccggtacgccacggccaagacggacgccgccgccgccgccgcctccgtggcgtcgtccgtccacgtgccgccggccgacctggggcaccagctcggcgccctccgctcgcgcgcggtgggcgccgacgtgacgttccaggtcggcgccggctccggcgcgcgacggttcggcgcgcaccggtgcgtgctcgccgcacggtcgccggtgttcgaggcggagctgtacggcccgatggtggagcgggacgccgggcgcgtcatccggatcgacgacatggacccccaggtgttcgacgcgttgctcgacttcatgtacaccgacgccctgcccgggatgaggaagcgcgacgcggtggccatgtcgcagcagctgctcgtcgcggcggacaggtacgacctgaagaggctgaggctgctgtgcgagcatgagctgtgcaagcacgtgaacaagggcacggtggccagcatgctggcattggtcgaacagcaacgccctagctgccaggggctcaagaaggcatgctttgagtacctccgaaaaacaccgaaagttctacgtgaaatcatggcgacggaagcgttcgatcaccttgtgaatgagttgttattgtccaacaagcttgccatccgtgaatga

SEQ ID NO: 11457 - DNA, 1146 bp, Oryza sativa
  Clone ID: TFbOSC18902j.C1.o3.fg
atggcagctgccagcaccaccgatcaaggtgtagccgttatcaacgacagcccactgtgcaagctcctctcttccggcgacggtcggcacgtcacgttccgggtcgactacgcgggcgcgaggcgacccgccgtcgccggccgtacgctgtgcacgacgtgcgccatcggcgacagcggcgcgtacaggtgtgaggcgttcttcaggctgctgatcgggcggagaaagctggtcgccttctccgtgggtgtgtccggcccacgctaccgagacgtgcacaaggtggtggtcgatctcgtcctcgtcgacaatgccaggtcggtggccctgcagccgcctacgagatccatggctatccaggccgccgccgggagcaaccaaggagggtgcgggttgctcgtctccaaggattacctcgaggagaactgcgtgcaggatggcgtcctggtggcggtgtgctccgtgctctttctcccggagttgccaccttgcctatggctggactcgctaggccaccgtctcgccgccatgtcgaacaagaaggacagtactctcaccgacgtatgcttcgacgtcgatggcgagaggttcaacgcgcaccgcctggtgatggcggcgcagtcggaggtgttcaggagcttgctgttcggctccgatgacgccgagaccaagacggagaccgcagtcgtcaccatcgacggcatcagcgccaccaccttcaagcacatgctccactacatctactgcaaccagctaccgccaccggccaccggcgacggtgacgacgatgacggcgaggcagaccatgtcacgaggatcgccgagctgcagcggctgctcgtcgcggccgacgcgtacggggtggaggcgctgaggcaggcgtgcgaggacacgctgtgcgccgggatcaacatggacacggtcgcctcgacgctggcgctgacggagaaggggtcgtacccgaagctgagggggtcgtgcctcgagttcctgtccaacacgcagatttactcggtggcgaccaacgacgagtgctacgaggtggtgcagagctacccggacgtgctgacggagatacgggacagttgtctaatatattatcgttatgctactttcgtcgttgttactgagttagaggatttgtga

SEQ ID NO: 11458 - DNA, 1146 bp, Oryza sativa
  Clone ID: TFbOSC900359j.C1.o10.fg
atggcagctgccagcaccaccgatcaaggtgtagccgttatcaacgacagcccactgtgcaagctcctctcttccggcgacggtcggcacgtcacgttccgggtcgactacgcggccgcgaggcgacccgccgtcgccggccgtacgctgcgcacgacgtgcgccatcggcgacagcggcgcgtacaggtgtgaggcgtccttcaggctgctgatcgggcggagaaagctggccgccttcgccgtggttgtgtccggcccacgctaccgagacgtgcacaaggtggtggtcgatctcgtcctcgtcgacaatgccaggtcggtggccctgcagccgcctacgagatccatggctatccaggccgccgccgggagcaaccaaggagggtgcgggttgctcgtctccaaggattacctcgaggagaactgcgtgcaggatggcgtcctggtggcggtgtgctccgtgctctttctcccggagttgccaccttgcctatggctggactcgctaggccaccgtctcgccgccatgtcgaacaagaaggacagtactctcaccgacgtatgcttcgacgtcgatggcgagaggttcaacgcgcaccgcctggtgatggcggcgcagtcggaggtgttcaggagcttgctgttcggctccgatgacgccgagaccaagacggagaccgcagtcgtcaccatcgacggcatcagcgccaccaccttcaagcacatgctccactacatctactgcaaccagctaccgccaccggccaccggcgacggtgacgacgatgacggcgaggcagaccatgtcacgaggatcgccgagctgcagcggctgctcgtcgcggccgacgcgtacggggtggaggcgctgaggcaggcgtgcgaggacacgctgtgcgccgggatcaacatggacacggtcgcctcgacgctggcgctgacggagaaggggtcgtacccgaagctgagggggtcgtgcctcgagttcctgtccaacacgcagatttactcggtggcgaccaacgacgagtgctacgaggtggtgcagagctacccggacgtgctgacggagatacgggacagttgtctaatatattatcgttatgctactttcgtcgttgttactgagttagaggatttgtga

SEQ ID NO: 11459 - DNA, 1896 bp, Oryza sativa
  Clone ID: TFbOSC547j.C1.o9.fg
atggcgacggcgagcatcgcgtccaatgtcgccggcggcggctgtcccaccccgtctcggtcagccgccgcctccaccgtcgtcacaacgcaagcctatcacgtgctcaagatcgatggctactcccgcaccttacaagtccactgttacagatctctcagttccttcccgttcaacgcgggagaccgcacttggtacatctgctactacccacacggaaagaacgacattagcaaggacttcatctctatctacctcgttctctatgacgccatcgccgaggctgtcatggtgcaggctaccttcagcctgctcgaccagcacgggaaaccagtgccgtctcacacccacgccacccgactgttgagcacttcgaaccaagacgacatggctaacaacctagggtttgaaaccttcattgcaaagggcgacttggaaaaatcgggacatgtccaagacgattgcttcgctatcggggtccatgtggtaatcaccaaggaaacgccgccacccatcatcgcggtgccaccgtcgtcggacatgcacctgcattacggcgatcttctctcaagtaaacggtgcgccgatgtagagttcctagttggcggcgagaccttcgccgcgcacagattggtgctcgcggtgcgctcgcctgtctttgtggcggagcactttgggccaatgaaggagggtgtaaacgtaaacgacgtgatagagataaatgacatggatgcacaagtgttcaaagctctacttaacttcatctacacggatacgttgctagagatggatcaagaagaagatgcgacaatggctcagcatctacttgttgctgcggacaaatatggcctagaaaggctaaaggttaaatgcgaagaaaggttgagtaaccacatcgatgctgactctgtagcaaccctcttggtgctaaccgacaagcacaattgtcgtggtctgaacaaggcgtgcatcgagttctttagctccccaacagcactggctaagatcatagaaacagatgaatttcagtatttaacccaaagccatcctaatattttggaggatataatttctaacattgttgcttctcagttggagaaggcaattttctctccggaaaatgagggaggcaaaattaacaaggtagacattaggattcagccatggcaaaattcaaatgcccgatgtggcaaagcggcgggtgcagactgcagaggccggcaggcgaggcgggagagaggagggcggcggcgcgaccttgcggcggagcgcgaggacgtcgataccgcagatgtcgacgccgtcgaggagcacagcacccggcgcaggctcccagaggcggttgagcgcgcggagcagcgtggacttgccgctgccgctgggcccgatgacaccgacgaccacccctcgcggcacgtccaggtattgacggtcagatattatgatttaaggacsgtcaacacccgccccccccgccgccaccaccggcgtcccttcttccccgacgccgtccacgaccaggaggtgctccctgacatcatgctcttcaattcaatcgttgatcgcacatgtcagcagcacgtacactggaacacaaagctgacgcagaagagacgaggtgtactcgctcacctgaagctgagcccatcggagagacagcggagaagaagcaagcaggagagcggagaggagaggaagacgaagatagaaaaaacggaaatagcgggcgtcgactgttcaatcgtcgtcctcctttctgctccttccgccggtgaagatgaacgaggcatcgacgcctcagagaaaaacccccaccacacagagcatccaggcagcactgataggaagaggcctggctggagctcgacagccgacgatgaagacctgcagccgtag

SEQ ID NO: 11460 - DNA, 1344 bp, Oryza sativa
  Clone ID: TFbOSC413709j.C1.o6.gm
atgagcgacggggcgcgcgtggaggcggcgccgcggctcgcgcaatggcgcgtcgacgtgctcccctgctacacctaccgcaagtccgagcccttccgcatcggcctctggaactggtacctatctgtggagagaaataacaagcaaacttgtgttaagaagaccatagttcatccaggaatttttgacaagccgctgaaacacgaaggttttgtgtgggcaattgatagtactgttacaggaagatttgtgattgagatagagtttcttgacctgaaaattgcagatccatcttacaattcccttactggctctaattctgcattccagggtggtgaaccagcctcaatttgggcttcccaccaaatcaagaaatcttcagacaacactgcactgtcatccttggcgagaatgctgcaagaaggcatcctcaccgacatcacaatcaacgctaccgacggcagcattatggcccaccgtgcaatcctggccagccgttcccctgtcttcaggagcatgttctcgcacgacctcaaggagaaagaactctcaacagttgacatctctgacatgtcccttgaagcatgccaggccttcctcaactacatttatggtgacctacgcagcgaagagttcctcacccacaggttagctcttctcagagctgccgataagtatgacatctctgatcttaaggaggcatgccatgagagcctgttagaggacatcgacacgaagaatgtgctcgagaggcttcagatggcgcacttgtaccgattgcaaaagctcaaggatggctgcttgagatttctggtagatttcagaaaggtgtatgaaatgcatgacgatttcaaggtgttcctccagacagcagacagggatatcatagctgaaatcttccaaggcactggagcaacgacggcggcggtgctcgggctgagctccacggcctcctcgccgatggcgacccacgcgcggcgagcggcggaggcgcgggtgtggcgcggcggcctgcgagcgacggagacgcgggagtggcggcgcgcccccacgcgacgtgacggccccatctccctcgatggtcgcctcgccggaatagtactaagggcacgcagccgcaactcgtcgccgcaccggttgaatccgcgtagctcgagcggtagcggcgtctacgggagcggcggcggaggtgggcgcgctgatgagaccgccggtcttaagggcgacccttacgcggttggagtcgatgccgtcatggagttccccggcagcccgtcgtacggccccgaccgcgtcatctacctccgcccgctctccggtgagttccccggctactacggctga

SEQ ID NO: 11461 - DNA, 1080 bp, Oryza sativa
  Clone ID: TFbOSC400049j.C1.o17.fg
atgtcccctgccgcctgccgcggcaacccgtcgcggtccgcctccgcctcggccgtcgtggtcgacacggccaccgggtaccacctcctcaagatcgaaggctactcgctcaccaagggcatccccaccagcttgagcctcaaatccagccagttcaccgtcggcggctaccgctggcgcatcgattacttctccaacggagactgcgcggactccgccgattacatatcgctttttctctcgctggacgaaagggccaacaaggatgtgaaggtgcgggcgagctggagattccagatcggttacactggcaatgtggataagccgccttcgttgtcaacggcgaaagcatgtactacttttggtgttggacctgatggttcttggtcttggggttatgacaggtttattagaagggaagattttgagaagtccgacaatctcagggatgactctttcaccatccggtgcgacattgccgtcgtccgccgattccgcgccgaggagacgaccgagatactccctgtcgaagcctttgtgtccgtgcccccatccgacatgaaccagcagttcggcgacctgctggagaccgagaagggcgctgacgtggtgttcgagtcgccggtcttcagagcggagctctacagctcgatgaaggagggtgacactgctggagtcgtgcgcatcgaagacatggaggcgcaggtgttcaagctgctgctccgctttgtgtacaccgactcgttgccggagatggggaatgatgatgaagacgtcatgtgccagcatctgctcgtcgcggcggaccggtacaacctggagaggctcaagttgatctacgaggagaagttgtgcagctacattagcgtcgacgctgtatcgaacatcctggcgctggctgatcagcaccactgcgacgggctgaagaaagcatgctttcattttctggcctcaccgggaaacctgaatgctgtcatcaccagtgatggcctcaagcatctgagcaggagcttcccctcacttatggaagagctggttgccatgctggcgcctctgctgagtcatgctttagtgatttag

SEQ ID NO: 11462 - DNA, 1179 bp, Oryza sativa
  Clone ID: TFbOSC415318j.C1.o9.fg
atggccgccgcctcaaatgtgcccccgtcgtcttccacaagcagcagctcaccacacaacaccacatccacgcactccactgagctggtcaagggtacgcaccggttcaccgtcgccggattcagcctgcagaagagaaacggcgccggacacttcgccaaatcaggctccttcgatgtcggcgggtacagttgggcggtcatgttctacgctgccggcgagaaggaggaagatcaaggacatgtgtccgtgttcctcgagctgcaaagcaccggcgtagagaaagttacggtgaagtacacattcaacatcagtggcagctcgttgctgtcggcagggtggggtgatttcaagcctagcagcaaatgtcgtttggggttcaacaaattcatggagatcgaaaccgtggaggatgtgtacctgatgaacgactgcgtgacgattcactgcgccgtcgaggttgtcagggagaagaaggccagagcaaccgtgagccgccgcatcgcggtgccgccgccggccatctgccgtcatctcgagcagctgctggagagcaagaaaggctcggaccttacggtccaggtcggagagagtaagtacgacgtgcacagggcggtgctcgcggcccggtcgccggtgttccgcgcccagttcttcgggccaatggcggcggcgaacaggcgcgccagcggcggcggcggcaggtgcgtgcgcgtccatgacatgagaccggcggcgttcgaggccgtgctccacttcgtctacacggacacgttgccgccggttaaggaggaagagggcttcctgacgaacaactccgcgagccgccgccacctcgtcaatctcagggacgcggccgccggatgctcgaagggagaggtgagggtgatggtccgcgagtggctggcggcggcggaccggttcggcctggagaggatgcggctgctgtgcgaggacgcgctgtgcgagagcataggcgtggcgaacgcggcggcgacgctgcggctggcggaccggcaccactgcgcgctgctcagggcgttgtgcatggagtacatcgcctcgcccggcatgttggcggccgtgatggcaacaaaggggttcaaggagctcaaggtggcatgtccctctcttctcatcgagatcctggagaaggttggatgctgccgttcggaataa

SEQ ID NO: 11463 - DNA, 1116 bp, Oryza sativa
  Clone ID: TFbOSC401762j.C1.o46.fg
atggccaccgcgcccaccgtcgccggcggcaaactgctgcgttccgcctctgcgattgtaggcggcacggagagcggccagcacctgctcgagatcaacggctactccagcatcaaggacgccgtctccatcggcaactgcgtccagtctcggcatttccgcgttggcggccacgattggtacatccgctactaccccaacggcttcaactcgaacgtttccgattgcatatccatctacctcgtcttggacggccacgaggcccacgactactattacggtcgctcaatcgtgagagcagagctcacgttgagcttactcgaccaagaacgggagccagtgacatcctacatctacagccatgggttgcaaattttcgatggctacggccgctatcggggatctctgcgtttcatccagaaggccgtactggagagatcggagtacctccgggacaaccgcttcacgatcaggtgtgacatcacggtcatgaagaatcccgaggcaaaggacactggcggcaggcgggtaaccctgccaccgtcggacctggcccggcacctcggcggcctcctcgccaccggagtgggcgccgacgtgacgttcgaggtcgacggcaagacgttcttggcgcatcggaatgtgctcgcggcccgatccccagtgttccaccaagagcttttctccctaacggagaaggggaatgccgcgactggcggtgccggtgtcatcatacgcgtcgacgacatggaggcgcaggacttcgaggctctgctccacttcatatacaccgactcgttgccggagatgaaaggtggagacgcagtggcgatgctcccagacctggtcgcggcggctaacaggtataagatggagagactaaggttggtctgtgaagataagctatgtgagtatgtaactgtgagaaccgtggcagccatgttggcgtttgctggggaacaccaatgccccgagcttgagaagaagtgcttgcagctactcgaagatccagcaaatttgaggaacatcgtggagactgaaggtcttgagcatctgacgaaaagctacccctttgttttgaaggatctaattgccatgtttgctacaaaaccgtag

SEQ ID NO: 11464 - DNA, 825 bp, Oryza sativa
  Clone ID: TFbOSC2852j.C1.o2.fg
atgggtgatcaccgcgacccggctttccccgcggcggcgggcggctgccggctgcccaagacgtcgtcggtgagcgtcacggagtccgtcaccgcggtgcacgatttcaaggtgacgggttactcgctgatcgaggggctgggcatcggcaggtacgtcagctcatccaccttcaccgtcggcggcgtcgactgggccgtcaggttctaccccgacggctccaccgtcacctgcctcgggaacgcgtcggcgttcctctactactgcggcagggagaaggaggtcaggaccaggttcaccctgaatctgctcggcaaggacggcaaattgtcgcaggtgaccaattcctacatgaagcacaccttctccccggcgagtgacaattggggattcatcaaattcgccgagaaatcgaagctgcagagctcgccgttcctccacaacgactgcctgaccatcaggtgcttgctgaccgtcgtcagggaatcccacaccaaggatgttgaggtcaattctgttgttgtcccaccgtccaacctgcataccgattttgagaacatgctccaggatggtgaaggttcagatgtgacattcaccgtgggtggccaagagttccgtgctcataaatgtgttcttgccttccggtccccggtgttcaaggccgagcttttcggtccgatgaaagaaaatggcacgcaatgtatcaagatcgacgacatggagcctgaggtttttgaggctcttcttcacttcatttacaaacccccgataggctgccagatagctgcagagatggcaaggctgcagcaatgcagcacttgctag

SEQ ID NO: 11465 - DNA, 1715 bp, Oryza sativa
  Clone ID: TFbOSC9673j.C1.o1.fg
aattcaaagctttaagagtgttggatctagagagcagtgtgaaattgcaaaactctgatcttaacaacgtggtggatctatttcagttaagttacctgacggagtcggaaaaatgcaatctctacaggaactgtcaggaattatacattccgaaatgctgtttccaaaggatcccagattggatggcttcaatgaataatctctacaggctatgcatcaggtctaagcaagtgacaaagcaaatcctccagatccttggagacttgcctgcattgctagacctggagctgcgttcagaatcagatgatcccatggaaattctcattatcagcaaatgcatattccgatgcctgaagatcttccgtctgtatggatcgttcgtcggcctgatcttcgaggatggatccatgcagaaggtcagagaaatctcggttgttgttagagcacacaaggcaaaatctgcattcgctgatcatcctgatcttggcattcgcaacctcacctctcttatggatctcaatgtatggattaattgcgagggagctagggttcaagaggtgaaggtgttggaagctgccattgcagatgcaaccgctctacttcccaaccatccgacaccacatttcttcagagaaaatgaagaaaatatggtgaaagattatcttcccaaccatccgacaccacatttcttcagagaaaatgaagagaagatgtacgttccaaactctcgtctcatgtcgtgtgcttcgctgctctccgccgccatccgccgcggcgtcgccggctgccgtgcctcgccgccgtccgcctccgccatcgtgtcgcggccggcgaccgggtcccacatcctcaggatcgacgggtacaccaacacgaagagcatcctcgccaccggcgagtccgccacgtcgaggaggttcgccgtcggcggccacagcttcgtcatgcgatactaccccaacggcctcgacgacggctgcgccgactccatctccctcttcgtcgacgtcgccggcggcggcggctgcggccggagcggcatcgccggccatgcccggttcagcgtgctcgaccacgccggctcgccggcgcgccgcaccgacgacgcctcgtcggaggctctcgccgccggcgccgacgctggcgtcgtcgtgccgccgtccgacctgcaccggcacctcgctgagctcctctggagcaaggaaggcgccgacgtcgtcatcgagctagacggcggcgacggcgagacgacgacgttccacgcgcaccggtgggtgctcgcggcgaggtcacccgtactcaaggccaagctctccgcctcgccgtcgtcgccggcgacgctgcggctcgccgccatggacgccgacgcgttcagggcgctgctccacttcatctacaccgacacgctgcccgacgacgacgacgatgacgacgccatggcgcggcggctgctcgccgcggcggacgcgtacgggatggagaggctgaggctgatctgcgaggacaggctgcgccgccgcgtcgccatgggcaacgtcgccgtgacgctggcgctggcggagcagcaccattgccgcgcgctcaaggaggcttgcgtcgagttcttgtcttctccgggcaacctcaaggcggccatggctaccgatggcttcgagcatctgaaggcaacatgtccttcagttttgactgaactcgtcatgaaacaattagtttag

SEQ ID NO: 11466 - DNA, 1062 bp, Oryza sativa
  Clone ID: TFbOSC3760j.C1.o3.fg
atgggttgctgcttctcggtgatcgacgacgacggctacgagcacgacgacgccgtgtcgggctcggtgaacgaggtgccgagggtgaccggcgtgcaccagttcacgatccggcagtacagcggcgtcaagggcaagggcgtcggcaattccgtcctctcccggaacttcaccgtcgccggccgcgagtggttcgtccgcttctaccccgacggctacaacagcgacacgtccgaccacgtcgccttcttcctccagtccctctaccggccatcgtgcggctccgtgtaccacgtcgagttctccttcgcgctgctcggcggcggcggcggcggcggcgccgtactccacgacgtgcggatcgatcgcccgtgcaggttcgacaaccgcaacaactcgtggggcatccgcaagtacatcgcccgggagcagctggagggcgccgccctgggcgccatccacgacgacgcgctgacggtgcgctgcaccatgcacgtcatccagcgccgccgcggcgccggccggcccgtcgtcaccggcgccggcggccccgtccgcgtgcccgtgccgccgtcgtgccacgccaggaacgccatggagttcctcctcagcggcgacgccccgttcgacctggagatccacgtcggcgacgcgacgttcggggcgcaccgcctcgcgctcgccggccagtcgctctacttccggaagctcctctacggccaggtcgggaacgaggcgagctcgccggcgatccgcctccgggagatgagcccggaggcgttcggcgccgtgctccactacgtctaccacgacagcctgccgccggaggcgaacaagggccggaacgcggctgccatggcgcgggaggtgttcgaggccgccgacatgtacgccatggagaggctgaagctgatgtgcgcgagcaacctgtgccgcttcatcggcgacgacaccgcgagcggcatcatggagttggcaaaagcgcactcgtgcgatccgctcaagaaagcgtgcgaaaattacatgaaacgcagaaggattccattcaaccctgatagctga

SEQ ID NO: 11467 - DNA, 721 bp, Oryza sativa
  Clone ID: TFbOSC31354j.C1.o1.fg
accccaagttcatcaggagagaagatttggagaaatcggagtatctcagggacgattcgttcaccatccggtgcgacatcatcgtggtcgacaattaccgtgccgaggacgccagcagcggcgctgccggcttcgtctccgtgcccccgtccaacctccatagccacctcggcgacctcctcaagaacgagaagggcaccgacgtagtgttcgaggtcgccggccagaggttcacagcgcaccggtgcgtgctcgcggcacggtcaccggtcttcaacgcggagctctttggcatgatgatggagagcgacaccaccaccaacgatgccatccaaatcggtgacatggcggcgccggtgttcaaggcgttgctccacttcgtgtacaccgactcgttgccggagacgatggaggagagggaggacaccatgtgcgagcatctgctcgtcgcggcggatcggtacaacctggagaggctgaagctgatctgcgaggaaagattgtgcaagtacattggcataggcacggtgatggacatcctcgcgctggctgatcaacaccactgcaaggggctgaagaaggcgtgcttcgattttctcaggtcgccggcgaacctgagtgccgtcaccggcagcgaaagcttcgagcatctgagcaggagcttcccctctcttatgaaggagcttgttgacattctaggaacttcacataattatgcttg

SEQ ID NO: 11468 - DNA, 465 bp, Oryza sativa
  Clone ID: TFbOSC900229j.C1.o20.gm
atggggaattggagcggtggatgcagggagaaatttcgtgaagtttttgagtggaaggacgcggatgtggcgttcgaggtcggcggcggcggcggggtgagattcgccgcgcaccggtgcgtgctcgcggcgcggtccaaggttttcaaggcggagctcttcggcgcgatgaaagagggcgacgccgcatgcgtcgtccgcatcgacgacatggagccgcaggtgttcaggacgctgctcttcttcgtgtacaccgactcgttgccggagatgagaaaggaggaggaagaagccatatgccagcgtctgcttgtcgcagccgaagtgtacggcatggagaggctcaagctgatatgcgagagcaagttgtgcaagtacattgacgtgggcacagtggcgtccatcatggcgttggttgaccagagctgcccgttcatcacggaggagttgattggcatgctctga

SEQ ID NO: 11469 - DNA, 1083 bp, Oryza sativa
  Clone ID: TFbOSC402103j.C1.o15.fg
atggcgggctcctccccgtcggctgcggcaagcggcggcggctgcgaagcggtgccgagcacgtcgaccatcgtggccgagatggcgacgggctcgcacgtgctcaccgtcgacggctactccggcaccaaggggctcgccgtcggcgtgcacgtcaagtccggcacgttcgtcgccggcggccacagctggcacatcaagtacttccccaacggcgccaccgacgagacctccgagtggacgaagggcgccgccgcgaccgtcaaggcgcggtgcaagctcaccctgctcctcgacggccgcgacgggagggcggcattgccgccgccgccgccgttcaccaagagctgcgagctccggaccttctcctccggcaagggcggctccgatcagtggggccacaagaagttcgtgcggcggaaggagctcgaggacccgtcgaagcgtctcctccgccatgaccgcttcagcgtccggtgtgacgtcaccgtcgccgtggggatccgcaccgacgacaccaccgcgaagctcccgccaccgtccgacctgcaccgccacctcggccgcctcctcaagacgaatgcgggcgccgacgtcacgttcgacgtcgccggccacaagttcgccgcgcaccggtgcgtcctcgccgcgcggtcgccggtgttcatggcggagctcctcggcccgatgaaggaggaggacaccgagagccacgtcgtggccatccgcgacatggacgcgagggcgttcaaggccatgctccacttcatctacaccgactcgctgcccaatgtcgacgacggcggcgaggcggcggccatggcgcagcatctgctcgcggcggcggacaggtacgacatcgagaggctaaagctgatctgcgaggacaagctaagcggcggcgtcgacgcgaccacggcggcgacgacgctggcgctggcggagcagcacggctgctgccggctgaaggaggcgtgcctcaggttcatggcgtctccggccaacctcaaggcggccatggcgagcgatggcttcgagcatctggctaagctgcccttctctcctcaaagaattagttgctaa

SEQ ID NO: 11470 - DNA, 1098 bp, Oryza sativa
  Clone ID: TFbOSC405423j.C1.o13.fg
atggcgggctcctccccgtcggctgcggcaagcggcggcggctgcgaagcggtgccgagcacgtcgaccatcgtggccgagatggcgacgggctcgcatgtgctcaccgtcgacggctactccggcaccaaggggctcgccgtcggcgtgcacgtcaagtccggcacgttcgtcgccggcggccacagctggcacatcaagtacttccccaacggcgccaccgacgagacctccgagtggacgaagggcgccgccgcgaccgtcaaggcgcggtgcaagctcaccctgctcctcgacggccgcgacgggagggcggcattgccgccgccgccgccgttcaccaagagctgcgagctccggaccttctcctccggcaagggcggctccgatcagtggggccacaagaagttcgtgcggcggaaggagctcgaggacccgtcgaagcgtctcctccgccatgaccgcttcagcgtccggtgtgacgtcaccgtcgccgtggggatccgcaccgacgacaccaccgcgaagctcccgccaccgtccgacctgcaccgccacctcggccgcctcctcaagacgaatgcgggcgccgacgtcacgttcgacgtcgccggccacaagttcgccgcgcaccggtgcgtcctcgccgcgcggtcgccggtgttcatggcggagctcctcggcccgatgaaggaggaggacaccgagagccacgtcgtggccatccgcgacatggacgcgagggcgttcaaggccatgctccacttcatctacaccgactcgctgcccaatgtcgacgacggcggcgaggcggcggccatggcgcagcatctgctcgcggcggcggacaggtacgacatcgagaggctaaagctgatctgcgaggacaagctaagcggcggcgtcgacgcgaccacggcggcgacgacgctggcgctggcggagcagcacggctgctgccggctgaaggaggcgtgcctcaggttcatggcgtctccggccaacctcaaggcggccatggcgagcgatggcttcgagcatctggctagaagctgcccttctctcctcaaagaattagttgctaatctcgctgtttaa

SEQ ID NO: 11471 - DNA, 1125 bp, Oryza sativa
  Clone ID: TFbOSC900390j.C1.o2.fg
atgtactccataaccgccgcgccggcgacggtgtcccacctcgtcaggatcgacggctactcccgcaccaagaacctccgcaggggaaggttcatcgaggccatgaacttcaccgtcggcggccaccgctggttcatccggttctaccccaacggccacggcccccgcgatgtcggcgtcgtctccgtctacgtcggcatcgcgggcgcctaccgccgcggcggcggcgacgccaagccggtcatcgccgacgccaggttcagcctcgtggaccgcgacgggaggccggcgccgccgtcgttcgtccagggcatgcccgccgtcgacttctccgggaacgacttcgggatgaacatcaagagggcggagctcgagacgtcggggtttctcaaggacgacggcttcctcgtccgctgcgaactcggattcgtcaacagcgccggcgacggcgacggccgcagaggggttcagatcaaggaggggatcaaggtgccaccgcccaacctgcaccgccacctcgccgatctcctctggaagaaccaatccagcggcgacgtcttcatcgaggtccaggggaagacgttcacggcgcaccggtggatgctcgcggcgagatcgccggtcatggcggccgagctctcgtcatccgactccgacgacgcggcctacaccgacgccgacgccaccaagaacacaatgatgacgctgcgcgtcgacgacgacatggacgccgagacgttcagggcgctgctccacttcatctacaccgacgcgctgccgccgccgccccagccccgcgcccgcgacacgaaggagaaggaggacgaggcggcggcggccgaggcggcgaggcggctgcacgcggcggcggcgaggtacgggatggagaggctgcagctgatgtgcgaggacgcgctgtgcaggagcctgagcgtcctcacggtggcgtcgacgctggtgttcgcggagaagcacggatgccgcgtgctcaaggcggcgtgcctggacttcctctcgtgcaagaggaagctgaggcaggtgacgaggctggacgatgacttccgtctgctcaccaccacttgcccttccgttatcaaggagctcttcgcgcaggtcttgaagtag

SEQ ID NO: 11472 - DNA, 1080 bp, Oryza sativa
  Clone ID: TFbOSC547j.C1.o6.fg
atgacgacgacgacgatcacgtccagcgtctgtgccggtcctccgccgtcgaggtccaccaccaccatcacagcggaacgaacctaccacataatcaagatcccggggtactccagcaccttgaaagtcggtcatggccaggccctccgtacctctccgttcagtgcgggaggtcgcacctggtatatcagctactacccaaacggagggcgagaaaccaacaagcactgcatctctttcttcatccatcttgacgatgacacggtcaatgacgatgtcatggcgcaggttacgttcagcttgctcgaccgacacaggaatccagtgcggtcacacactatcaccaccacattatataacttctcggtgcctaatagtagcgcgcttgggttcgaaaacttcattagaagggacgagttacaacgatcggaatatctcaatgacgactgcttcgctatcgcggttcgtctggtcatcacggaggaaccatcatccttcacggtgcccccatcgaacatgcacctagattatggtgatcttctatcaagcaaagagggcaccgatatcgagtttgtggttcgcggcgagacatttgccgcacacaggttggtgctagcggcacggtcgctggtgttcaaggcggagctattcagaccaatggagggaggcaccacggatgtcataaaaattgataacatggatgcacaagtgtttaaagctctgcttgtttttatctacacggacacttggccagagatagatcaagatgagacgactatggttcaactactcgttgcagccaataagtatagcctatcaagactgaagataatgtgcgaagataggttgtgcagctatattgatacaagttcagtggttaccatgctgatgctagcagacaagtaccaatgccatggtctcaagaaggtgtgcttcaatttccttgcctcttcgagagcattgtctttggccatgaaagcagataatttccggtgtttaatccagggctgtcctactatgttgaaggatttaatttacaacatcgttactcatcaattggaaattaaattatcagtgtag

SEQ ID NO: 11473 - DNA, 5418 bp, Oryza sativa
  Clone ID: TFbOSC400049j.C1.o26.fg
atgtccttcgccggcgtctctttcatatcggatggcgagacgacgccgtgttcttctccggccaacaatggcgccgccgccggcagcacgtacgggtatcaccttcttgttatcagtaactactctcacaccaaggaaaccatctccactggcgactccatcgagtccggccagttcatgctaggaggccacacttggcacgccgagtactgccccaatggcgacgactcgaccaactccgactgcgtgtccttctggctcgtccgtgacgacgatgacgacgacgacgacgatggcgacgacgccgtgaaggtgcagccgctgaaggtcaagttcgagttcagcttcgccgagcaggcggccaagcacgaggcgaggcgcgtgctcgtgtccatggcgtgcgacttctccggcacctccggctggtgcgacacgcggttcgtgcggagggaggtgttggatgttagcagtaatcttgtgtgccacggtttagccacagtacgccgatcgctggggaaattcctaacaattggtatcagagcacggtttaggaagtggactcgtgaccgcgcattggaaggcgtcttcatgccgcgtcgtcgctcgtcgtcaccgatcgtgcgcactcctcatgactccggcggccgcgccacgggcagcggcgggggtgaccgcgggctggtgatccaccgcgtggtgaaagaaggaggcggctcggtgaactacccgctgctgaccaagaccaactacaacgactgggcgctactgatgaagatcaagctgcaggctcgctgcctgtgggcggcgatcgagcccgacggcgtggacgtccctctacatgaggaccggatggctcttgacgctatctgcagtgccgtgccgccggagatgattggcaccctggcgaccaaagcgtcggcccgggaagcctgggaatgcatcaagacaatgcgagtcggcaacgaccggattcgcaaggcgagtgcacagaaagtgcgctctgagtatgaatcgcttgcgttccgcggtgacgagaccgtggaagatttcgctctacggctcacaaccatcgtcaaccaacttgcaaccctcggtgatcctgaacctgctgataaagtcgtcgaaaagtaccttcgggtagctcgtcccaggttcaatcaactcatcttgtctattgaaactcttctcgatatctctactctgtccatggaggaagttactggcagactgaaagccgctgaggattctgggcaatcctcgttgcacaccgccgatgggaagctgtacctaactgaggaggagtgggctgaacgtcagaagaagaaggatcaagaggcaaagcggggtgactcgggcagctctggcggccgcggcaagcgccgtggcgggagagggcgcactggtggcggcgggactgcgagccccgagagcacgaactctggttcggcgcgcaagggagacaaatgccgaaattgcggcaaacttgggcactgggcgaaggactgcaggagcaagtccaagcgcgaagaacaggctcacgtcgcccaggaggatgaagaagagcacaccttgatgttgctcaccggcggctgcgttgacacggtcgacgcggcggcgccggagggcgacacgcccacaccgccccaccaagccgtggtggaactcgtggagatgaaagtatttgcagcgctcgacgacgcggctgaccatgatcccgggcgctggattatggattccggagcgtcaaaccatatgacgggcagcaggatggcgttcgccgacctcgacacgaacatcaccgggaacgtgcgactcggcgatggatccgtggtccggatcgcaggacggggcacaattctctttgcctgcaagaatggtgagcaccgcactctgtcgaacacctattatcttccccgtcttactgccaatattatcagcattgggcaattggatgagaccggcttcaaagtgctggcggaggatggcatcatgcgggtctgggatgagcagcggcgtctgcttgcccggatccctcgcaccccagggcgactgtacatgcttgacatcaacctggcgcgcccggtctgtttggcggcacacgccgacgaagacgcgtggcgctggcatgctcgcctcgggcacataaacttcagggcgctctgcaagatgggcaaggaggagctggtacgtggtctaccatgtttgtcgcaggttgatcaggtttgtgaggcctgtctcgccgggaaacaccggaggtcgccgttcccgcggcaggcactttgccggtctgacgagccgctggcgctgctacatggagatctctgtggaccgatcacgccggcgacacccagtggcaaccgctatttccttctactcgtcgacgactacagccggtacatgtgggtcgccctcctctccaccaaagatgcggcgccggctgccatcaagcgtattcaggcggcggcagaaaggaagagtggacgcaagctccgcgcgttgcggacggatcgcgggggagaattcacgtctacacagttcgccgagtactgcgccgagctgggaatgcggcgcgagctcacggcgccctactctccgcaacagaacggcgttgtcgagcggcgaaaccaatccgtggtgggcacggcgcggagtatgctcaaggcgaaggggctgccaggtatgttttggggagaggcgataaataccgccgtgtatctgctcaacaggtcgtcgtccaagggtatcggcggcaagaccccgtacgcgctgtggaacggcgttccgccggccgtgcaccatctgcgcacgtttgggtgtgtggcacacgtgaagacgaccaccccgaacctgaagaaactggatgacaggagtcgtccaatgatctttgtcggctacaagccggggtccaaggcgtatcgcgcctatgatccggctactcggcgtgttcacatctcccgtgacatcgtcttcgacgaagcggcccagtgggactgggatgctgaggcggccgctgatctcgacaccgacttcgtcgttgagtacaccacggtgtaccatcctggctcgctgtcaggaacacgccaagacgctggggagccgcctgctcgatcttcatcatcgccgcgaacgccatcagactcaccgacagccggccgaacaccttcggtgcatggcgatgcgctggcggttgaatttgtgtcgccaccaactggagcagctgctaatcttgatgcagaccacgacgacgcaccactccgtttccgcacgatggacaatgtgctggggccggccatgctgccaggtctcgctaatcgtgaggtccaggaagagctgatgatggtgagcggagaagaaccggcaacgttcggtcaagctgaacgcgacgaggattggcgtcgggcaatgctcgatgaaatctcttcgatagaggagaacaagacctggaggctcgtcgatctgccttcgggacatcggccaattgggctgaaatgggtgtataaactgaagaaagatgctcagggcgtcgtcgtcaaacacaaggcgagattggtggcaaagggctacgtgcagagggctggaattgactttgatgaggtattcgctcctgttgctcgtcttgattctgttcgtttgttgctcgctctcgctgcgcaggaaggttggatggtgcatcatatggacgttaaatcagcgttcctcaatggggaactgattgaggaggtgtatgttgttcagccaccggggtttgagatcgatggacaggagaacaaggtttacaggcttgataaggcgctgtatggtcttcgccaagcacccagagcttggaacaccaagctagactgcacactgaagaaacttggcttcaagcagagcccgttggagcatgggctgtacgcgcgcggcgatggcagtgggcgactgctcgtcggtgtgtatgtggatgatctggtaattgtcgggggtgatagtggcatgatcaagggattcaaagagcagatgaaggctgaatttaagatgagtgatcttggtcctttgagtttttatcttgggatcgaggtacatcaagaagctggaatcatcactttaaagcaagcagcgtatgtgtcgcgtattgtggagaaggctgggctcaccggctgcaacccctgtgcaacaccgatggaaccacgtctaaagctgagcaaggaaagtgcaggatcgctagttgatgcgacagaatacagaagtctagtgggaagcttgcgctatctggtgaacacccgaccagaccttgcatattcggttggttatgtcagtcgtttcatggagaaacccacggacgaacacttggcggcagtgaagcgcatcataaggtatgttgctggtaccattcatcttgggtgccgctatgtgaaggaaggtgaaggaggactgcagggttacagtgacagtgatatggctggagacattgacactcgcaagagcaccacaggagtaattttctttctcggcaaaaatcctgttagctggcagtctcaaaaacagagagttgtagcactctcctcctgtgaatctgagtatattgcagctgcaacagctgcatgccagggcatttggcttgcccggctcctcggtgacctcaggaatgcagcaactgaagtcgtcgatctcagggtggacaaccaatccgctctggccctgatgaagaaccctgtttttcacgatcgaagtaagcacattcaaacaaaatttcatttcattcgtgaagccgtggagaatggggaaatcacaccgagttacatcggcacagaagggcaacttgcagatatcctgacgaagccgctttctcgaatcaagtttcaggagctgcgggaacaaattggtttagccacagtacgccgatcgctggggaaattcctaacattggagcggtcgaggtatctcgtggacgactgcttcacggtcaggtgcgacatcgtcatcctcgccggcgccgccgccgctcctcctccgtcatcgtcgttgttcggcgcggtggagagcttcgggcgcctcctcggcagggaggagggcgccgacgtgacgttcgaggtcggcggcgagacgttcaccgcgcaccggtgcgtgctcgcggcgcggtccaaggtgttcgaggcggagctcttcggccccatgagagaaggcgcggcggcgagcgtcgtgcggatcgaggacatggacgccgaggtgttccgtggacttcttagcttcatctacaccgacgtgctgcccgaccaaggagacctcggcgacgaagcgcacgagtggcacgacgacgacgacgacgacgagggaggaggagattgcgacatggctgcagaaactgaccgtagccgcggacagatacgatctccagaggctgaagctgctgtgcgaggaggagatgtacgactacattag

SEQ ID NO: 11474 - DNA, 918 bp, Oryza sativa
  Clone ID: TFbOSC400049j.C1.o18.fg
atgccctcctccgccaacggccatggcaactcgtcgacgcggtccacctccgccatcgtggtcgacagggtgaccgggcaccacctcttcaagatcgacggctactcgttcaccaaggagacccccaccggcacgcccatcgcatccggcgagttcaccgtcggcggctaccgctggagaatcgagtactaccccaacgggagaggcaagaaatccgccgattacataccgctttacctctcgctagacaagaacaccagcggggaggtgaaggtgaagtaccagattgagctggccgatagggtgaagaagaagaagaagcaaccttcgctgatatccaagccatttatgaggaggagaaaattcgaaaagtctaaatatctcagggacgactgtttcaccattcggtgtgacatagtcgtcatgcgtgagattcgcactgaggaagcaacatttgtgtccgttcccccatccgacctgaagcagcagctcggagacctcctcgagaccgggaagggcgccgacgtggtgtttgaggtcggcggcggcgagacgttcgccgcgcaccgtttcttcggctcgatgaaggagagcgacgccgccgccggaggagtcgtgcgcatcgaagagatggaggctcaggtgttcaagctgttgctccgcttcgtgtacaccgactcgttgccgaagatgaaggaggaagacgtcatgtgccagcatctgctcgtcgctgcggatcgttacaacctgaagaggctcaagctgatctgcgagaagaagttgtgcaagtacattggcgtgggtaccgtggcgagcatcctggcactggctgatcagcactactgcgatgggctgaagaaggcgtgcttcaattttctcggctcatcggagaatccgccggtggcttcgataatctga

SEQ ID NO: 11475 - DNA, 2475 bp, Oryza sativa
  Clone ID: TFbOSC401547j.C1.o15.gm
atggcgacgcggctgcggtggtggcggcgacgggcgacgcggctgcggtggtgcgtcaagttcggctgctccaccacgacggccggctcgttcccggccgacgggctggtcgggctcagcggcgacgcggtctcccacgtgacgcagctcggcggcgaggcgtcgctcgaccggagattctcctactgcctcgtcccgcactccgtcaacacatcgtcggcgctcaacttcggcaccctcgccaacgtcaccgagctcggcgcagcgagcacgccgctcgtcgccggggacgtggacacgtactacaccgtggtcctcgacttcgtcaaggtcggcaacaagacggtggctttggcggcgagctcccgcatcaccgtggactccggcaatgcaaaaataagctttgttactcctgcaaattgcaagaagcaaaccgaacaagcgattccggacttgacgctggagttcggcggcggcggcggccgtgcggcggtggcgctgaagccggagaacgcgtccgtgacggtgcaggaggggacgttgtgcctggcaatggtggcgacgacgaagcagcagtcggtgtccatcctcgggaacctggcgcagcagaacatccacgtcggctacgacctcgacgccggcatggtcaccttcgccaccgccgactgcgcggggaacggccggccgacggagcagacgagcggcgggcaggcgcgctgcgggagaggaagatggcgccgacggggagggggacggggggagcgaggatgtcgacgccgtcgtcgtccatggccgcagttctcacgcccgcgccgtcagcggcgtcgccggcgggagtgtgtgagcgcggggcagcggcgggcaaagcaggcggtggagggcagagcgggcacgacgccgaagacagcttcttcccgcgccggcgccaccggccgcctctcccttctcaagcgtcgccgccgccgccgcctcccttatctcgtgtcgtcgtcgtcgtcgccgccgccgcagccgcctcccgggcctctccgagggtccgaccccgaggtcgcacgcgccgccaccggctgccggacctcctccccacccgccagccgccctgcagagaggagagaagtgagagggagagacgaggaagggagagaagaagaggaagagatgacctggcattctgacatgtggggcccacatgggtctcacgctgactcggccaccacctcagacaaaaccggggtcaaaacaccggaggatctaaacaccgtcgccttccacggcaatccctctaagcctggcgatcctccttcttatacttccccctaccttccctctgcctcacaccctatccaaacccgggatgccgggaccctaaaccctagttccaatgccttcggcggggtctccagagttggagaagaaggcgtcgccggagctgaaggagaagagctgagcaagatggggccggaggcggcgcgggagacgaaggggagcttggcggcggcgtttggcttcctgggcactagcggcggcgagccgagagcggcgcctccccgtcggcggctaccactgggagctccgctacaccgccagcctcatcgccgactccaaccactgggtcgccctcaagctcgtcctcctcgccgcgccgacgtcaaggccgcgctccgatgccgcctcatcagcaatagtgccaccacctctgccgccgtcgacggccacgtgtcgcacgcgttcaagcgcgccggcgagagctccgcgtgggtcctgatccttcgccggagcgccctggaggcgtcgggggccatcgtcgacgacgccttcaccgtcgagtgcaccatcacggtgatcacggagatacctgacaatgtcgctgcggcggcgccggcagcgccggcgaatgttctgcccccgttctccggccgtggtctgtccttgagccatcacctcggcgagctcctgcgccgcgggacgggggcggacgtcacgctggtggtgtccggcaagtgcttcccggcgcacagggcaatactcgcgtcgaggtcgccggtgttcatggcctccttgttcggcgacatgaaggagaagagctcccggagcgtcgagatcagggacatcgagccacaggtgttcggagcaatgctcggcttcatctacaccgactcggtgccggagctcgatcaacaagacggcgtcgtcgtcgcgcagcacctgctggcggcggcggacatgtgcgggctcgacgggctgaagatcatgtgcgaggagaagctcatcgctggcgccaccgtggagacggcggcgacgacgctggcgctggcggagcagcatgggtgcccgcggctcaaggcgaggtgcgtcgaggtcgtcgccgcgaacctcgacgccgtcatggcgaccgagggttacaagcatctcatggcgagctcgccgctggtgatgaatgatctcctcagggctgtgcgtggaaggaagagctga

SEQ ID NO: 11476 - DNA, 1377 bp, Oryza sativa
  Clone ID: TFbOSC412646j.C1.o22.fg
atggcggaagccaagatgtcacgcataaccatacacgacgtcgagccggtgacgttcagagccatgcttcggttcatctacaccgacgaactcgaggagaaggactccatggcaaccgatttgctccagaatttggtcgcggtcgcggataggtatgatctaagcaggttgaagctgatgtgtgcgcagaagctgtgggagaaagtatcggtggaaaatgtcgcgacaatgctgatctacgccgagatgcacggctgcccggagctgaagacgagttgcctcgacttctttgtgcaggaggagaacttcaaggtggccgtgctgaatgagggttatgctcagttggttcagcattttccatccgttattgatgaaattaaaggcaggcctgtaggtggaccaggcggcctcgtagatgagagcaaggctaataatatagtcgacgtgttggctataagcgccagatttaatgcagcggctgaaccgaagagacgaggctcaggtgatcgaagagctcagcgcaaacccagagagatcacagctgcagtaacaataacgcgggaaatcaaactgctactcattttgatgacaaacaaggagaattactgctactcgaaactcgaggagttcgatcacactgtactgatcactttgatcagtgtatataatcaggattatgggagttggatactgttcgaatcgatagatagatacatctccgactcaatccctctcgcgattgcgttctggtttgcagctccatatgctggcatgccggactctggttctctcgagctcatactagattacgaggcgaccaaccactgtgccatcctcgtcgacggcgagacgttccccgctcaccgtgccgtgctcgctgcccgctcgccggtgttccgggcggagctccttggctccatggcggaggcgaagatgtcgtgtatcactctgcacgacatcgagcctgtgacgttcagagctctacttcggttcgtctacaccgacgagttgcctgcagacgacggcggcgagctcaatacgacagcaatggcgaccgagaggaagaagggaggaggctgcctactgatggggagaagggcggggagcggcaaccatcaggctgggaagctagcgagcgtgcgcggagagggaggaggcggggaggccgatgagcaggacggagagccgacgagcgggacggggcgaggaggccgacgagcgggatggggaggccggcgagcacgcgaggagagggagaaggtggggaaaggggcggagggcgatagccatcgggcggggaggccaatgagcttgcgtggagagggaggaggcggggaggccctcagcccgtcgatctccctatcctggtggccttga

SEQ ID NO: 11477 - DNA, 1215 bp, Oryza sativa
  Clone ID: TFbOSC400049j.C1.o6.fg
atgtcctcttccgccgccggcaactcgtcgcggtcggcctccacctccaccatcgtggctgacacggagaccgggtaccacctcctcaagatcgacggctactcgcgcaccaagggcacccccaatggcacggccatcgcatccagccagttcatcgtcggcggccaccgctggcgcatctactactatcccaacggggaccacaccgacaatgcagattacatgtcgttttacctcttgctcgacgaaaagaaaaacaccaagaccaagagcgtgaaggtgtggacgctgtttcagatttgtttcgcagaccaggcaaaggcgctgcctacactaacatccaaaacagtgagaacttttggtgatggttcttcttggtcttggggctattcgaagttcatcaaaagggaagatttcgagaagtccaaggatctccgagacgactctttcacaatccggtgcgacattgccatcgtccgcgagttccttgttgagacgaccgaggtgctcccgcccaaatcgttcgtatccgtgcccccacccgacatgaacctgcagctcggcgagctgctggagaccgagaagggcgccgacgtggtgttcgaggtcgccggcgagaggttcgccgcgcaccggtgcgtgctcgcggcgcggtcgccggtcttcggcgcggagctctacggcctgatgaaggagggcaacgccgccgtggtcgtgcgcgtcgaggacatggaagcgcgggtgttcaagctgctgctccgcttcgtgtacaccgactcgttgccggagatgaagaagaaggacgaaggcatcatgtgccagcatctgctcgtcgcggcggatcggtacaacctggagaggctgaagctgatctgcgaggagaagctgtgcaagcacattagcacgggcacggtgtcgaacatgctgttgctggctgatcagcaccactgctccgggctgcagaaagcgtgctgcaattttctcggctcatcggcgaacctgagtcctgtcagcaggggctggctctttgttatgaaacagcttgtgttaggatgctgcaatgcatggagacttgctgttgtacaccctgtctcggtgtcttggcttgtactatcactatcaggcagagctgcagaggtatatgaccttagtaattccatgaaatttacgagtcatgaacatcatcctaaggaggcacgtggagcaatcgcctga

SEQ ID NO: 11478 - DNA, 546 bp, Oryza sativa
  Clone ID: TFbOSC31360j.C1.o1.fg
cagctcgtcgacctgctggagaccgagaagggcgccgacgtggtgtttgaggtcagcggtgagacgttcgcggcgcacagatgcttgctagcagcccggtcgccggtattcagcgcggagctctacggcttgatgaaggagggcgacaccgccggagtcgtgcgtatcgaagacatggaggcgcaggtgttcaagctgttgctccgcttcatgtacaccgactcgttaccaaagatggaggaggaagacgtcatgtggcaacatctgcttgtcgcggcagatcggcatgatctacagaggctcaagctgatctgcgaggacaggttgtgcaactacattggcgtcagcacggtgttgaacatcctggtgcttgctgatcagcatcactgcgacgggctgaagaaggcgtgttttagttttcttggctcactggagaacctgagtgctgttgtcaccggcgatggcttggagcatctgagcaggagctacccctctcttatgaaagaactatttgttgtgatggcacttccaccgaatcatggttaa

SEQ ID NO: 11479 - DNA, 1047 bp, Oryza sativa
  Clone ID: TFbOSC423270j.C1.o1.fg
atggggacggtggagggccaccaccggttcgcgatccgcgggtacagccgcctgagggcgctcctcgccgccggcgagtacgtccggtcggccgccttcaccgtcggcggctacgactgggccgtcgtcttctacccgcgcggcgccacgcacgccgaccgcgaccacgccgccgtctacgtccagctcctgaccgaccgcgccgccgccgccgccaccttcgacctccgcttcgtccgcgccgactccggccggccgctgtccgtgcacccgccgctcgccgcgccgaggacgttcagcaccgtactccgctcctcctccgccgccatgtacggcgtcaaggtggaggcgatacaggcgctccaggccaactacgtccgccgcgaccgcctcaccatcgactgcgccgtgcgcgtcgtcgggaagccgcgggtgtccgccgccgcgccgctgacggcggccgacgtcccgccgccggacctcgcggcgcacctcggccggctcctcgacctcaagtcccacgccgacgtcacgttcgacgtgcggggagtgcagttcgccgcgcaccgggtggtgctcgccatgcgctccgccgtcttcgccgccgagctgttcggcccgatgcgcaacaacgccggcggcgccatcaaggtcggcgacatgcagcccgccgtgttcaaggtccttctcggcttcatctacaccgacacgctcgccgccatggacgacctcgacgccgacgaggacgacaggcgagagctcgcccgccacctgctcgtcgccgccgaccggtacgacatgggcaggctgaagctcatctgcgcggacatgctcgcgaggagcctgacggcgcagacggtggcgagcacattggcattggccgaccgccatggctgccgcgggctcagggaagcctgcgtcgagttcgtcatcgccatgggtatgaacgatgaggtggtgataagccggcatcctgaccagctcagctgtatctcgctcttcaaatacttcttctaccagatcggcagcttactcaaaatccactaa

SEQ ID NO: 11480 - DNA, 1155 bp, Oryza sativa
  Clone ID: TFbOSC401916j.C1.o2.fg
atggtggcgtcggcgtcacggctgagaccgtcgagcacgacgaggacggcatcgagttgcaagccagagacagcacggggaactcacgttttcaccatacacggatacagcctgcaagcagtcgatggtgccggcagcaacaaagccagcttcatccgctccgcggctttcgacgtcggtggattcgactggtgtctccgctactaccacaacggcaacatcgagtccgacgacgactacatctccgtcttcctcgagcttatgaccaaggacgccgaggtgagaaccatctttgacatcaggatgttggatcaatataccgacgactcgtcttgcgttctggtctcgactacgaacaacacacggagagtgttcggcacgactaatttcaaaagcaaatgtctcgtgtggggtagtaagaatttcatcaggaggagtgagctggagggatcggtttatctgcgcgacgaccgacttatgattgagtgcaatctcaccgtcatcaagacaccactggtgaagacggaggagagagccgccatgccaggtgatatcatccacttccaagtgcctccgacaaacttgtccagggacctgggcaagttgctggaggacaatgtcggagccgacttgagcttcgaggttggaggagatgttttccccgctcatagcgtggtgctagcggcgcgatcaccggtgttcatggcggagctttacgggccgatgagggccaagagaggagagcggatagccatccaggatatgcaacctgttgtgttcaaggctctacttcattttatgtacacggactccttctctcctgctattaatgatgatctcagtagagatgaaaggcaggagttggctaagcatctgcttgtagctgcagatcgttatgctgtggaaggattgaaaaccatttgtgaaaaggcactctgcatgagtcttagtgttgataatgtggcaacaattgttgccctagctgatcagcacaattgcggaagattaaaagaagcgtgtgttaaatttatcgcctcatcaaatagattggatgatgttgtggagactgaagggtatggtcgcctcaaaacatcttgcccttctatcctactggatgtaatcgagatggcaactaagtctcgcaaaattaattag

SEQ ID NO: 11481 - DNA, 1059 bp, Oryza sativa
  Clone ID: TFbOSC418633j.C1.o5.fg
atggagaccccgacaaatctcaccaacacaatatctgcagttcacctgttaaaaatcaatggatattcagtaaccagagcacttggttgttcagagtatatctcgtcgaggagattggctgcaggtggatatgattgggaagttctttactatccacgctattatgagcatggtgtgtactggatagcacttcgacttatgtttatgagcaaggaatgtaagcatgaggtgaaggcagctcttaaatgtcagttagtacatgaggcacaaatttatctgccatccggaagtaaaagtgtatcctctaaatatacagggcaacgagattgcgggccagcgctcctgcttgtaaaacaagatgatttgccaggatccaattatttcatcggggattcctttgttgtggagtgcaccatcactgtgttaagagagccacaggaagctgtgactaatgtttctccaaatgtttccaatccatgctgtgacttgcaaatgcaccttggtgaactcttgctgagtgaaaagggggcagatgtcacgtttgttgttgcaggtgaatctttcttggcacacaagatcatcctcgctgctagatcccctgtcttcatggctgagttctttggacccatgaaggagagtagctcacagtgtgtggagatcaaggacatagaggcatcagtcttcaaggccatgcttcatttcatttacactggtacatcaccggagcttgatcagcagcatgtcgtcagtgactcggagcaggacatcacaacaatgacacagcatttgcttgttgctgcagacaggtatggattggacaggctcaaactgatctgccaagataggctccacgatgacatcaatgtggagactgttgcgacaactttggctttcgcagagcagcatagctgtacacagctgaaggacaggtgcatcgagttcatcatctcttctcgtgcaaatcttgatgctgttatggcaacagagggttataagcttgtgatagcaagctgcccgtcggttctaagtacccttctgagggcagcggttgggagatag

SEQ ID NO: 11482 - DNA, 1845 bp, Oryza sativa
  Clone ID: TFbOSC400049j.C1.o53.fg
atggcgacaacgacgacgatgacacttgcggccagcgccggcgacggttccccttcgtcgcggtccaccgtcacgaccatcgcggcgcaggcttatcacgtactcaagatcaacgggtactccaacaccttggaagccggccgccaccacgccctcagctcctgtccgttcagcgcaggaggccacacctggcatgtcagctactacccaaacggaggccgcgacagcaacaagaactgcatctccatcttcctcgtgcttaaggacatcgtcaccgaggaggacgtgatggcaaaagttacattcagcctgctcgatcgatacgggaatccggtgccgtcgtacacctatcacacccaattacgtaacttttcaacatctcctagtagggcaaagggtttcgaaaactttattaggagggacgaattagagcgatcggaatatctcaatgacgactgctttgccgtcgctgtccatgtgatcgtcccaaaggaaaagccatctattgtggtaccaccgtcgaacatgcatctgcatttcgttgatctcctcgtaagcaaagaaggcactgatgtcaagttcctggtcggcggcgagatgtttgcggcgcaccggttggtgctggctgcacggtcaccggtcttcaaggcggagcttttcgggccgacgaagaaaggcaccatagatgtgatacagattgacaacatggaagcacgagtgttcaaggctctgcttgacttcatctacacagacatttggccggagataggtcatggagaagacaatgtagctatggctcaacggttgcttgctgctgcagacatgtatggcttacagaggttaaagtttgtctacgaagataagttgtgcaaccacattgatacaggctcagcgtcaaccatgttggtgctagcggagaagcaccattgttgcaaacttaaggaggcatgctttacgttccttagttccatgagccctcctattgtggaagatctaaattccagcatatttggcagtgaatcggagaagacgaagtacagatatttgagaaatgagaagcgggctcacacgtatctagaacgtaacagtggagctggtgacaaggtgtttctcgacaagtgcatcttggtctcagtttataaaggagtgaaacttatgtttggtaagcgaggtgggactacgtgtgcactagcgcagtggctgcaccgtatgggcctcgaaattcagcaagagaaaggacccgcaggccgcagctcatatgtgcgccgtgctccggcctcatcgtcctatgctggctgctgctgctacgatgccaccggccagcggaacgcgttggcgttctggaaggtgcggttcgatcgggcgcgaggacacgtcgtacgtgtgatcgatgctgatcacggcagtgggcgcgacggttggttctcgatcgaggtggcacggcatacggtcaaggatgagatcgtcggcttgagacgccatgtatgctgccgctcacccctcgtcggctccgctggctggccgcgtacctcgagggcgcgtacgacgtattacgacgtacgcgccgacaaatttacgtacgcgcgcgcgagcgacacaagccccacggcgaggcagctgcacgcactgcctcccgccaatcggcgcacagggcctcgcaccgacgacgaagaacgtcgacggccagggcaccatgcaccgacgcgtactgcgtcaccatatgtacgcgggcagaagtctcgtcgactcgttgctgtccgcggtggaaatgagcagtacacctgggagctggaattggaacagttggtctggcacgacaacggtctggccgcaaattcatattga

SEQ ID NO: 11483 - DNA, 951 bp, Oryza sativa
  Clone ID: TFbOSC900229j.C1.o24.fg
atggcgtcgcgatccgcctccatcgtccaagccaacgtcacgagcgggtacaacctcctcacgatcgacggctacatggccaccacgccgatacccaccggagtgtacatgacgtcgagcgcgttcgccatcggaggccatcaatggcgcatcagttactaccccaacggcaagaactccggctgcgccgactacatctccttcgacctcatcctcgacgagaatgtcgccgcgccgcttcacgagcgggagcgcggcgaggggccgagccggttcgtcaagaggagaatcttggagaggtcgaggaggaggcatctgaagaacgattccttcatcgtccgatgcgacgtcgtcgtcaccgagttccgcccggcggaagtggcgcccggcagcgtcgatgtcgacgggccgccgtccgacctgcaccgtcacctcggcgacctcctccgcggagaaactggcgccgacgtggtgttcgaggtcggcggcgagaggttcgccgcgcaccggtgcgtgctcgacgcccggtcgtccgtcttcgacctagagctcttcggcgcaacgactgcgaaggaggtcgtcgtcggccaaagcaccggcatcgtccgcgtcgacggcatggaggcgcgggtgttcaaggcgttgctcttcttcgcgtacaccgactcgttgccggagatgatgacgacgacgaagaagaagatggaggaacaagcagccggcgacggcgacgacaggtacgacattgatgcgttcacagtggggaaggtcatcgcgctcgcggagcagcatgattgccgtgttctaaggaaacttgcctcgatttcttcatgcgtcgtcctggattttagaaggatgtactgttgggcaccggcgacggcggctccatcagctgctccttttcttttagacaagagttgtttgaaggcctcatcaaaaagtggtagctga

SEQ ID NO: 11484 - DNA, 414 bp, Oryza sativa
  Clone ID: TFbOSC31363j.C1.o1.fg
atgaaggagggcgacactgatggagtcgtgcacattgaagacatggaggcgcgggtgttcaagctgttgctccgcttcatgtacaccgactcgctcccggagatggaggaggaagacgtcatgtgccagcatctgctcgtcgcggcggaccggtacaacctcgagaggctcaagctgatctgcgaggagaagttgtgcaggcacattagcgtcggcacggtatggaacatcctgccgctggctgatcagcaccactgtgacgggctgaagaaagcgtgcttcgatttcctcggctcactggcaaacctgagtgctgtcgtcgccagtgatggcttcaagcatctttgcaggagttgcccctctcttatggaagagctggttgtcacgctggcacttccagggagtcatgcttag

SEQ ID NO: 11485 - DNA, 1173 bp, Oryza sativa
  Clone ID: TFbOSC595j.C1.o1.fg
atgtctcacacgcgctctaccaccgccggcgccgccggcggtaagccgccgatcgcgccgccgccgacgtcctccgcctccgccattgtcgccgacacggccagcgggtaccacctcttcaagatcaacgactactcgcgtaccagggacatcttccccaccggcagtgccctcaagtcccgcgcgttcaccattggcggccaccaatggcgcatccattactaccccaacggcaacacggaggagtgcggcgagtacatctccctgtttcttcatctcgacgagattgtcaccgacaagaacgtgtacgcgcagcacgggttccgtttattcgacgagtttgccggtgataatgatgacgatgatgaactgcagccttcctccatcgctgacctcgggcaggtcagtacctttggtggcaacaacattgggttgggacgactgaggtttatcaaaagggaagagttggagaaatcgaagtatctgaagaacgactccttcaccgtcagatgcgatgtcgtcgtcaccaagcggatccgctcggaggagacgccattggtggtgaggacctctccaaagccaaaggtggcgaggctcgtcaccgtgccgccgtccgatctgcaccggcatcttcaggacctcctctgcgccgagaagggcgccgacgtggtgttcgaggccggtggcgagacttttaccgctcaccggtgcgtgctcgcggcccggtcaccggtcttcagcgcggagctgtttggatcaatgaaggagagcgacaccacggtggtcatccgcatcgacgacatggaggcacaagtgtttagggccttgctcttcttcgtgtacaccgactcgttgccggagacgaagaaggaggacgagtatgccatgtgccagcatctactcgtcgcggcggacaggtacaacatggagaggctcaagctaatgtgcgaggagaggctatgcagctacatcggtgtgggcacggtgacgactatactggagttggccgagcaacacaattgtgatggcctaaagaaagcatgctttgattttctcagctctcaggagaatctgaaagctgtcacggccggtgagggattggagcatttgagcaggaactgcccttcccttgtgaatgagttgattggcacgctcggcaacttaattcagtga

SEQ ID NO: 11486 - DNA, 711 bp, Oryza sativa
  Clone ID: TFbOSC1353j.C1.o1.fg
atggccaaacacgagcatgtctcttccaagcgtctcaccgtggccgggtatgcgtgggagatccactacaccccaggccacgatgcgcactggcactactgggtcgccttcaagctcgtcttcctcggcatcggcgagcaggcgcagcgcgccggcggcgacgacgacgacaacgacgctggcgccatcaaggcggagctggaggcgtcgggtttcatcaccggcgactccttcgccgtgcgctgcaccatcacggtgctcagcaagaacaccatcaactcggccgagccgtcccccgaccttcacctgcagctcggtgagctgctgcggagcgggagattcgccgacgtcgagttcatcgtttccggcgtgtccatcgcggcgcacaggtgcgtgctcgccgcgaggtcgccgtccctcgccgccgccgtcctgaaaggtggcacgaggaagaaggatgggtcggtgcgcgttgaggtcaaggacgacatgagagccggcgtcttcagggcgctgctccatttcatctacaccgacacgttgatggagctcgactggagagaggatggttctgatcccctgctgccgaggacgatggtgatgagcttgaatgaagccgcgggtcggtatgggctggagaggctcaagcagatttgcgagaatatgcttggatttgacgatgcttgtagtgcagattgtgctgtcatgtaa

SEQ ID NO: 11487 - DNA, 339 bp, Oryza sativa
  Clone ID: TFbOSC400049j.C1.o20.fg
atgaaccagcagctcggcgacctgctggagaccgggaagggcgcggatgtggtgtttgaggttgccggccagacattcgcggcgcggtcgccggtcttcagcgtggagctctacggtccgatgaaggagagcgaacccaccggggtcgtgtgcgtccaagacatggaggcgcaggtgttcaaagcgttgctccgcttcatgtacaccgactcgttgccgaagatggaggaggaggaaggcgtcatgtgccagcatctgctcgttgcggcggatcggtacaacctggagaggctcaagctgatctgcgaggagaagctgtgcaaggggaaactattttaa

SEQ ID NO: 11488 - DNA, 1050 bp, Oryza sativa
  Clone ID: TFbOSC567j.C1.o1.fg
atggcgaccaccgcacccaacgtcgtcgacagcgactgcggcggcaccccgccgtcacgcgccggaggacacacctggtgcatccactactgcccaatcgggtccaccgaggaaagcaaggacttcatctccatctaccttgttctcgaggacaccaccgccgacgtagtgtcggcacatgttacgttcagtttgctcgaccaacaggggaatccggtgccatctcacaccctcacaaccccactgcttaaattctctcttcaaggcactctacctaagggcctggggtataacagcttcatcagaagagacgacttagagcgatcgggacatctcaaggacgattgctttgccatcggggtccatgtggtcgtcaccaaggaagcaataccgtcgtccatcaccgtgccaccatcggacatgcacctgtattatggcgatcttctctcaagcgaagaacggtacgccaccgatgttgagttcctagttggcggcgagaccttcgccgcgcatcgattggtgctcgcagcacgatcccctgtcttcatggtggagctttttgggccgatgaaggagagtactactgtaaacaagatacaaatatttgatatggaggcgcaagtgtttagggttttacttaagtttatctacatagacatgttgccggagatggatcaagaagatgaggccgcaatggctcaacatctacttgttgcagcggataagtatggcctgcataggctgaagatgatctgcgtagaaatattgagtaaccacattgatgccaactccgtggcaaccatcttggtgctagctgataagcaccattgctatggtctcagggaggcatgctttgacttccttaactcctcagcaatattgtctgcgattgtaaatacaagtgactttcagtatttgatccaaagctgccctgatattttggaggacataagtttcaacattgttgctcgtcaattggagagagcaattttcctatcagaaaaccaagcaggccaaatcaacagcgtagaaatcggaattcggtcatga

SEQ ID NO: 11489 - DNA, 1377 bp, Oryza sativa
  Clone ID: TFbOSC26652j.C1.o3.gm
atgggtcaaaccacttccaagtctgccggcgacggtaagcccaaacccaaaaccacctcggcggcggcagcggcggcggccgtcgtgagcgagacagcaaccgggtcgatgaccatgaggatcgccggctactctcaaaccaaggggatcggcgtcggcaacagcatcaactccagcaagttccacgccggaggccacacctggtacatagcctactaccccgacggcgaccgcgaggagtactccgactgggtctccgtctacctctgcctcgcccggccagctgccggcgccgcggccgacgacgtcgtcgaagcgaaattcacgctcagtctactcagcgggacgtacggtgcggtggtcgaagagaagatctgcacggccaagaaattctccttcgccaatggctactggccaagttgggggcatacaagattcatcaagaggaagaagatggacagtcgattgtggtcgtgtctacatctagacggtcaaagtttctatatcagatgtaatatcaccatggatattatccgctgtgaggcggccaccacggcggtggcggtgccaccgccggacctgcaccggcacctcgccgccctcctcggcagcggggtgggggccgacgtgcgcatcagggtcggcggcaagctgttcgcggcgcacaagaacgtgctcgcggcacggtcgccggtgttcatggcggagctcttcggcaataatggcgggaaagatcagaaggaggcgaaggctgctgctgcggcaactggcaatggcgttattcggattgatgatatggatttgagggtgtttcgggccatgcttcagttcatctacaccgataccctgcctaagatcgacaagggagacacggcgttcatggctcagaatctgctcgtcgcggctcataggtatgggattgagaggctcaagtcgatcagcgtcgacatgatacgcaaagcggctagaacgatgaacctgatagccatgatcattagaaataatgatgaaggaatcgccacccagctgcgcacgcgcgggcggctgggcctccatctccccgatgctccagaaaagcctcatcgatgccggcgtctgttcgagctgacgctgtgctacttgtccctggactcgacgctgctaattcaagctgctggtgatgcatctacccgaagctgcgacctcgccgagatgccggacgtccttgatttgcaagcttcaccgcactggagcgggctaaccatggaggaggtcatcgggaagccgccctgccggagcgcgccgaggatcgccggagctgccaccgactgccaagatttctatccattcccatgccggaggtcaagtatcacgcatggcgtcgaaaccagcggatga

SEQ ID NO: 11490 - DNA, 1029 bp, Oryza sativa
  Clone ID: TFbOSC401965j.C1.o35.fg
atggcgacgaccctcgcctccggtgccggcgatgctcctggtttggaatggtacattcctggtttggagatagaactgtgcagccggggtggttgttcagaatggttgggcctatacaacagggggctgtcaggccctcctgtgatctttagttccggttgtgatacctggcacatcaactaccgtcgcttgggaagcagcgacagcagcagggattacatctccttctacctcgttctcgaagatcaggtcgtcgaggacgacaccgtgacagcacagatcacgttcatcctgcttgaccaagacaggaagaagccgttcatcctaagaaaggacctagcggaatcggaacatctcaaggacgactgcttcgccattggtgtggatgttgttattgttaccaaggatgaggtgtcgtctgtcaaagtgccaccgccgtcggacatgcaccggcattacggcgatctcctctcgagcaaactaggcaccgacgtcgagttcgtagttggtggcgagacgttcaccgcgcaccgtttggtgctcgcggcacggtcaccggtcttcaagatagagctctttaggacaacggaagagcgcaccaccccaaatgcgataccgatcaacgacacggatgcacaagtattcagggctatgctttctttcatctacacggacacttggccaaagatagatcaagagaacgaggcggcaatggctcaacatctgctcattgcggcggaaaggtatggcctagataggctgaagctgatgtgtgaagatagattgtgcaatggcattatcgatatgggttccgtgacaaccaatttggtgctagccgagaatcactattgccatagtctcaagaaggcatgtttggagttgctaggtccctggacaactctagctgagttcatggcaacggacgactttcggtatttaaccaaaagctgtcctggtattttgaatgacctaatttgcatcgttgctgctcgtgaaagggaaaggacaattttttttcttggggaataa

SEQ ID NO: 11491 - DNA, 844 bp, Oryza sativa
  Clone ID: TFbOSC401315j.C1.o1.np
caaatttaaattttaattcaaatttatatggtgtagcagtaagagaagaaggggaggtaaagtagtaaaggggaggtgcgggtgatcgcttggaaggggagggagcgatcacccgtccgttaggagtaccctgcagactacaaactggggctactccaggttcatcaagaaaagggatttggaacaatcggagcatctaatagacgattcatttactatcaggtgtgatcttactgtcatgaagggcttctctagcaaaggaagccactgtaagccgtctgtggaagttcctgcaggccgtctggacctgcatttgggcaacctcctgagtaataagaagatgaatggaaaagacgtcacgatctacgttggtaaggagagattcagagcacacaaatgcatactcgccgctcgttcgtctgtcttcagggcgttgttcttcggtgccatgattgcggaaacccctaggaccattgaaatcgaagatatggaagctggtgtgttcagattattgctacatttcatgtacaatgactcgctgccagagacgtggtctcaagatgcaatgatggctcagcacctgcttgtcgctgcggattggtacaatgttgggaggctgaagctgatatgcgaggagaagctagcaaagcacattgactgcaacatggtggcgaccactttggctctagctgagcagcatagctgccaaggactcaaggaagcttgcctcgaattccttgcttcaaccaaccaatcttgagaggatgatgagaactgatggttataagcatctgaaaatcagttgcccaattgttctcaatgaactcattgcgagattgctgcc

SEQ ID NO: 11492 - DNA, 657 bp, Oryza sativa
  Clone ID: TFbOSC411533j.C1.o1.fg
atggatcgtgtggacacagccttgccatgtttctcaagtcagtgtatgaatatatccttgcgcacactgtttccccctatttttacttttcttaaatatatattatatgccggtgatgacgacggcactatacccatcccgcggtcgaacctcaacggccagctcgacgacatcgcggaccgtgccgacggctcggacgtgttgttctccgtcggcagcgagacgtttcatgcacaccgcgccgtgctcgccgcgcgctcgccggtgttcaagatggagctcctcgggtccatggcggagtccaccatgccgtgcgtcaccctgcacaacatcgacccggccacgttcaaagctctactacacttcgtgtacatggacgccttgccgtcgccgaccgaggcggtacgcattggagaggttgaagctgatgtgtgcacagaagctgtgggagagtgtgtcggtggagacggtggcgatgactctaggctacgcgcctacgccgagaggtaccattgcccggagctaaagagcaagtggctcagcttcttgatggcggagatcaacttcaagaaggtggccgtcactgatggctactttcatcttaggcgggatttcccgttaattatcgaagagataaaaaagcggattgagagttaa

SEQ ID NO: 11493 - DNA, 774 bp, Oryza sativa
  Clone ID: TFbOSC416369j.C1.o3.fg
aaattcgatgataagctgtcaaacatgagaattggtcgacggcccgggcggccgcaaggggttcgcgttggccgattcattaatgcagctggcacgacaggtttcccgactggaaagcgggcacgtgtggacacagccttgccatgtttctcaagtcagtgtatgaatatatccttgcgcacactgtttccccctatttttacttttcttaaatatatattatatgccggtgatgacgacggcactatacccatcccgcggtcgaacctcaacggccagctcgacgacatcgcggaccgtgccgacggctcggacgtgttgttctccgtcggcagcgagacgtttcatgcacaccgcgccgtgctcgccgcgcgctcgccggtgttcaagatggagctcctcgggtccatggcggagtccaccatgccgtgcgtcaccctgcacaacatcgacccggccacgttcaaagctctactacacttcgtgtacatggacgccttgccgtcgccgaccgaggcggtacgcattggagaggttgaagctgatgtgtgcacagaagctgtgggagagtgtgtcggtggagacggtggcgatgactctaggctacgcgcctacgccgagaggtaccattgcccggagctaaagagcaagtggctcagcttcttgatggcggagatcaacttcaagaaggtggccgtcactgatggctactttcatcttaggcgggatttcccgttaattatcgaagagataaaaaagcggattgagagttaa

SEQ ID NO: 11494 - DNA, 810 bp, Oryza sativa
  Clone ID: TFbOSC31365j.C1.o1.fg
atggctactgccgtcagccgcggcaccgcctcctccattgtggccgacgcggtgaccgggtaccacctcctcaagatcgacggctactcgcgaaccaagggcactcccaacggtgcagccctcacgtccgaccagttcgtcgtcggcggccaccgttggcgcatcagatactaccccaacggggacatcgccatgttcgccgattacatatcatttcacctcatgctagatgaaaatgccaccagcacgaagggtgtgaaggttaaagcccagtttcagatttgtttcgccgatcagaagctcggcaaacttctggacaccgagaagggtgcggatgtggttttcggggtcggaggcgagacgttcgccgcgcaccggtgcgtgctcgctgcgcagtcgccggtgttcagcgcggagctctttggtccgatgaaggatagcgacagggcaggcgttgtccgcatcgacgacatggaggcgcaggtgttcaaggcgttgctccgcttcatgtacaccgactcattgccggagatggaggaggaggaagacaccatgtgccagcatctgctcgtcgcggcggatcggtacaacctggagaggctcaagctgatctgcgaggacagattgtgcaagcacgtcggcgttggcacggtggtgaacatcctcacgctggctggtcagcaccactgcgacgggctgaagaaggcgtgcttacattttctcggctcaccagcgaacctgagtgctgtcctcgccggcgacggcttcgagcagctgagcaggagctgcccctctcttgtgaatgagctg

SEQ ID NO: 11495 - DNA, 855 bp, Oryza sativa
  Clone ID: TFbOSC594j.C1.o3.fg
atggctactgccgtcagccgcggcaccgcctcctccattgtggccgacgcggtgaccgggtaccacctcctcaagatcgacggctactcgcgaaccaagggcactcccaacggtgcagccctcacgtccgaccagttcgtcgtcggcggccaccgttggcgcatcagatactaccccaacggggacatcgccatgttcgccgattacatatcatttcacctcatgctagatgaaaatgccaccagcacgaagggtgtgaaggttaaagcccagtttcagatttgtttcgccgatcagaagctcggcaaacttctggacaccgagaagggtgcggatgtggttttcggggtcggaggcgagacgttcgccgcgcaccggtgcgtgctcgctgcgcagtcgccggtgttcagcgcggagctctttggtccgatgaaggatagcgacagggcaggcgttgtccgcatcgacgacatggaggcgcaggtgttcaaggcgttgctccgcttcatgtacaccgactcattgccggagatggaggaggaggaagacaccatgtgccagcatctgctcgtcgcggcggatcggtacaacctggagaggctcaagctgatctgcgaggacagattgtgcaagcacgtcggcgttggcacggtggtgaacatcctcacgctggctggtcagcaccactgcgacgggctgaagaaggcgtgcttacattttctcggctcaccagcgaacctgagtgctgtcctcgccggcgacggcttcgagcagctgagcaggagctgcccctctcttgtgaatgagctggttgccatgctggcgcctccaatccctccatcgagtcatgcttaa

SEQ ID NO: 11496 - DNA, 1122 bp, Oryza sativa
  Clone ID: TFbOSC400049j.C1.o22.fg
atgtctttcgccggcgtgtctctcgtccgcgacgggaggctgcagtcgccttcgtcgtcagccatcacctccggcgccaccagcgggtactacctcctcgtggtcgaaggctactcgcgaaccaaggacaccgtccccaatggcgacttcatcaggtctcgtcctttcagggttggaggctatcgctgggttatcgactactaccccaatggcgaaagttcggatgatgccgattccatctcagtttctcttcagcttgatcaggatagtgaacggcctttcatggcgcattacgagtttagtttcatcgacgaaactgagagacaaaagtcgacacatatttgttcggaagcattattcgacttctctgatgacaatcgttggggctacaccaatttcattagaagggaggagctagaaaaatccaagcatctcaaggatgattgtttcaccatcaggtgtgacatcatcctgaagaaggacggcagcaacaccaccggcgacgacgtggcggcgccgctcgtcgcggtgccaccgtccgacatgcaccggcagttcaccgatctgctcctgaccaaggtcggcgccgatgtgacgttccaggtcggcggcgagacgttcgccgcgcaccggtgcgtgctcgcggcgcggtccaccgtcttcatggtggagctctttggccccatgaaggagggcgcaacgacagcaagcgtacatatcagcgaaatggtgcccgaagcattcaaggccatgcttgcattcatctacaacgacaccccgccgccggagacggaggaagacgaagacggcaaggtcgccatgtggcagcacctgctcgtcgcggcggacaggtacgatctcccgaggctgaagctgatatgcgaggagaagctgtgcggccacatcggcgtcggcacggcgaccaccatcctcttgctggccgacaagcaccattgccgcgggctgaaggaggcgtgcctggagttcctcagctctcctgcgaacctggaagaagtaatggagcatggcggattggaggacgtcgtgggaacatgcccgtcagttctcgtggagctcattgcgaagcttgctctgctcaggactcagagagattataagtag

SEQ ID NO: 11497 - DNA, 2085 bp, Oryza sativa
  Clone ID: TFbOSC400992j.C1.o38.fg
atggccgcgccgcccgtctcgggggatggggcggcggcggcggcccccgtggtggccctgggcgccgcgggggcggtgggggggccgaggccgtacgaggtggccgtcgcggcggcggagctccggcccgtggactgcaacctcgcggcgctgtgcgaccacgtgcaggcggaggggttcgggtccggggcgttctccgacgtcgtcgtcgaggccatgggcgccacctaccgcctccatcgcctcatcatctcccgcagcgcctacttcaggaatatgctacatggtccttggagggaggctggagctcccacagtggtgttgcatatagatgatccaaacattgactcagaagcaattgcaatcgcgttagcatatctttacgggcaacccccaaagcttaatgataacaatgcgttccgagtacttgcagctgcatcatttttggatcttcaggatttatgtacaatatgtaccgactttattatttctgagctttggacatcaaactttttgcaatatcagctgtttgcggagagtcaagactatggtagtcatggggaacgtgtcagaaatgcctgctggggttatctttgccaaagtgccacattggaactacgagaggtgctcccaaaactttcttcacaaactttgcatgcgctccttacatctgacgaattatgggtacctaatgaggagaaacggtttgaactagcattatatgcgttgcttgcaaaggtcactctgtctgatgtagaagttagtggaaatgaaaatttgaaccttacgtcaagctctgcgaattctgatcattccatgaggaagggaaagagtccaatgaatgaagctggtgaggagcagcttatggggtctgaattgcagaacttaaaattacatgacaacacagagactataagtgcccataacactagtgatattccagatatggtaatcccgcaggatagcacagcatactccattgagcaaaatgctgaggcttccaggaggaagatgcttctgtgtcacagagtacaagcaatagttgctgatacttgcacaaattgttgccttactggtaattcatgtgcttgtaaacaagcacatgtgagttcacatcatcactacaggcaagagcatgatcggagcagtgcttccggtactgtaggtaatatctacctcacagatgcccatggtgaaggaaatgctgtttttgggcctgtccgtgtcaatgtcagaggagcagttgatggacttgctggtattgggagaggaaattctaatgttcctggtgcagcttgggctcccacacgttacgtcttctctcgtgttccttatggacttggttcaagaaatggtcaacaaccattcgcaaatgatgaatcagaacctagagtcgactacaatggtgatatttcaggagatggtctgactgcattggttaatcttagccaagaaagcagtgcttctcatcatcagacagaaagtatatttgagacaggcattcaagttagatattctggtgctgcttctgtttcaaccccaggtggttcctctctccagatgcaagagtcaaaagagcatgaacttggatccaacttggaaactacagagaacacaactatctcgttggacatgaaaacaccacttagtcacttcccacctttccgctttggagttgagtttgaagatgtgcacaggctcgcagatagtcaggtgaagcattcgactgaagtattttatgcaggctctctttggaaggtaagtgtccaggcattcaacgacgaggatcctcatggacgtcgcacccttggactctttctgcaccgacgcaaggctgagcctttagacccattgaggaaggccaacatgtatgtagaccaccgggaaaaggtcactgctcggtatcagcttatctgtccatcgaagagagaggtcatgattttcggaagcctaaagcaggctggcacactcctacccaaagctccaaaagggtggggttggcgcactgccatattgttcgacgaacttggcgatcttctccagggtggatccctgagaattgctgcagtagtccagcttgtctaa

SEQ ID NO: 11498 - DNA, 1092 bp, Oryza sativa
  Clone ID: TFbOSC400049j.C1.o13.fg
atgtcccccgccgccgcatgccgcggcaacccgccgtcgcggtccgccatcgtggccgacacggccaccgggtaccacctcctcagcatccacggctactcgcgcaccaagggcacccccaccggctcgcccctcaaatccacccgcttcaccgtcgccggccaccgctggcgcatccactactaccccaacgctgaccgcgccgactcagccgattacatatcgatgtacctctttctagacgagaagagcaacgccaccaggagcgtgaaggcgctgtttcagattcgcttcgccgatcaggtgaaggcgcagccttcactggcgctccatgccgtaagaacttttggtgatggttcttggtcctggggctatgcgaagttcgtcaggagggaggttctcgagaagtccaaggatctccgagacgactctttcaccatccggtgcgacattgtcgtcgtccgcgagttcgtcgcggaggaggcgaccgagatactccccgctggatcctttgtatccgtgcccccgtccgagatgaaccggcatttcggtgacctgctggagaccgagaagggcgccgacgtggtgttcgaggtcgccggcgagagcttcgccgcgcaccggtgcgtgctcgcggcgcggtcgccggtgttcggagccgagctctacggcctgatgaaggagggcgacactgctggagtcgtacgcatcgaagacatggaggcgcaggtgttcaagatgctgctccgcttcgtgtacactgactctttgccggagatggaggcggaggaagacgtcatgtgccagcatctgatcgtcgcggcggatcggtacgacctacaaaggctcaagctgatctgcgaggagaagctgtgcaagtacattggcgtatgcacggtgtcaaacatcctggcactagctgatcagcaccattgcgacgggctgaagaaggcgtgcttcagttttcttggctcaccggcaaacctcagtgctttcgtcgccgacgatggcttggaccatctgagcaggagctgcccctctcttatgaaagaactggttgttgagctggcacttccgccgagtcatgcttag

SEQ ID NO: 11499 - DNA, 951 bp, Oryza sativa
  Clone ID: TFbOSC400305j.C1.o11.fg
atggtgtccaagaagaagaagacggtgtcgaggcacaccacggagtcggaggaaggcaggcactcgttcgagatcgtcgggtacagcctcaagaagggcatcggcgtggacgagttcgtcgaatccgccaccttcgccgtcggcggctacgactggtgcatccgcttctaccccgacggcaaaggcgatggtgccaaggactacatctcggtctacctcgagctcctgaccaaggactgcgccgtccgggcggcctacgacctgagattggttaatcttgccaccgggttgccaaagagtgtctactctgaaacaactcacaggatgttcaattctgaggacagtagcaaatttgctccgcattacgcgactttcatgcacagaagtcaactggagatggaagcgtcaggctacatcaaggacgatcgcctcacaatcgaatgctttgttaccgtcgtcgtccaggaatcgatggcgtctaataccgtgaaggcccatgaattaatcaaggtgccgccgtcagatatattggaaaattttggcgaattgttggagaagggggaaggggcggatgtgactttcgttgttgggggagagaaaatcgccgcgcacaagatcgtccttgcagcacggggcctcctgcatttcatctacaccgattcgttgccggacatggatgatctcagtgatgacgactactatgagatgatcaggcttttgcttgtggctgctgataggtatgccatggacaggatgaagttgcagtgcgaaagcatcctcggcgagcatcttgatgtgcagaccgtcgcaactacattggctttagctgatcagcacaactgcaacggccttaaagatgtttgcattgagtttatcgccactcaaaacaagatggatgatgtggtggcaactgaaggctatgctgaggacttgcccttctgtcttagttga

SEQ ID NO: 11500 - DNA, 561 bp, Oryza sativa
  Clone ID: TFbOSC2852j.C1.o1.fg
atggcgaacatgctgagggccgccgacggcgcggacgtggtggtgctggtgcgcgaccagccgttccgcgcccaccgctgcgtgctcgccgcgcggtcgccggtgttcagggcggagctcttcggcggcggccacatgagggagaggcggacgagctgcgtcgtcgtcgacgacatggagccctccatcttctcggcattcctccacttcatctacacggattccttgccagaaaacccggacacacctggcgatgatcaagattgcatggcgatgcagcatttgatggtggcagccgatcggtatggcctggacaggctcgtgctgatctgcgaggagaagctgtgccgcggcattgacgtgcagacggtggcgacgacgctggctttggcagagcagcatcagcgtgtagcgctcaaggatgcttgccttggtttcatagtctctcggggtgttcttggcgctgtcgctaggactgatgggtttaagcatctgctcacgacctgcccgtcgattatggtggacattttagacaaggttgccagcgtcatgagcaagtaa

SEQ ID NO: 11501 - DNA, 1224 bp, Oryza sativa
  Clone ID: TFbOSC401762j.C1.o64.gm
atggcggtggcggaggtggagacggctgcactcggtgacggcggcagcggcggcggcggcgggagaagaagagggagaggcggcggcggcaggagtggaggcggcggcgcgagggggcggaggcggcgctcggcgacgtggacagggcgagggggtggacagggcgagggggagggggaggcggaggcggcgcgcgagggggcggaggcggcgctcggcgacgtggacggggcgagggggaggggggcggaggcggcggcgcgaggccgcaaaccggtgcggtctgcctccaccatcatagccggcacggagagcggccagcaccttctcaagatcgacggctactcccacaccaaggacaagctcccgacccccggcagcaacgtcaagtcccgatctttccgcgtcggaggccatagttggcacatcagctactatcccagcggcaacgactcggacaaagctaactgcatctccatcttcctcaacctcgacgacgatgtagacgtgaaagctcagttcaacgggtgggggtttgtgagtttcatccggagggacgtgctggagaaatcggagtatctccgggacgactgcctcacgatcgtgtgcgacctcaccgtcttcatggagctgcagacggaggacatcgacgtagacaccgcaacgccgccgccgccgccgccgcctacggtggtggtcccaccgtcggacctgcaccggcacctcggaggcctcctcgccaccggggagggcgccgacgtgacgttcgaggtcagcgggaagacgttcgcggcacacaggctggtgctcgcggcccggtctccggtgttccgtgcagagctttttgggccaagcaaggagctgggtgccacgaccggcggcgcggtggatcacaccgccatacgcatcgacgacatggaggcgcgggacttcgaggctctgctccgctacatgtacaccgactcgctgccggagccagagacgacgaaaggaggaggggacgcggcggcgatgctcccggacctggtcgcggcggcgagcaggtacaagatggagaggctgaggctggtgtgcgagcacaaactgtgcgagtacgtgaacgggagaacggttgtttccatgcttgcattcgcccgggagcaccattgcgatggcctcaaggagaagtgcttgcgtttcctcgacgatccagtgaaagtgagagagatcgtgaaggctcgataa

SEQ ID NO: 11502 - DNA, 816 bp, Oryza sativa
  Clone ID: TFbOSC400049j.C1.o4.fg
atgtcctgttccgccattgtggccgacggggtgaccgggtaccacctcctcaagatcgacggctactcgttaaccaagggcacccccactggcacggccatcaaatccaacccgttcactgtcggcggctaccgctgttcatcaaaaccgaggatttcgagaagtccgactacctcaggcacgactcgttcaccgtccggtgtgacatggtcgttgtccgcaagatccgtgccgagaaggggaagactgacccacctcgccgagaccttcgtgtccgtgcccccgtccgacatgaaccggcagctcggcgacctgctggagaccgagaagggcgccgacgtggtgttcgaggtcgccggcgagaggttcgccgcgcaccggtgcgtgctcgcggcgcggtcgccggtcttcggcgcggagctgtacggcctgatgaaggagggcgacgccgccgtggtcgtgtgcatcgaggacatggaggcgcgggtgttcaagctgctgctccgcttcatgtacaccgactcgttgccggagatgaagaataaggacgcaggcgtcatgtgccagcatctgctcgtcgcggcggatcggtacaacctggagaggctgaagctgatatgcgaggagaagctgtgcaagcacattagcatgggcacggtgtcgaacatgttggtgctcgctgatcagcaccactgcgccgggctgaagaaaacgtgctgcaattttctcggctcatcggcgaacctgagtcctatcagcaggggctgcctctctgttatgaaagagcttgtgttaggatgctggtgcatccactga

SEQ ID NO: 11503 - DNA, 786 bp, Oryza sativa
  Clone ID: TFbOSC401315j.C1.o8.fg
atggcaaatgattgcaacactatctcctctgccattgtcgccgaagctgtgagcgggtcacacgtaatgaagattgatggatactcaaaaaccaaggcgctgatcaagaatgaagagtgtctgtcatctaccccattcagcgttgctggctacacctggaccatcagatactatcccaatggtcaatctacggagtgtagagaatacctgtcgttgtacctgtttctggactcttttgccagggacgtcaaggcaatttacagcttcaaactgctggacaagaatggaagaccattgctactgaacagcatcgccagccctgtcaaaaccttcaaacttagaggtaccggttggggctacccaatgtttatcaagagcaaggatttgaaagcatcagaatctctgagagacgactcattttccatccggtgcgatgtcacggtcatgaagcccatttgtagcaaggaaaccccggccatgcccaagccgtctgtggaggttcctccaggtgatctgcaccagcatctgggcgacttgctgaagaacatggatggagcagacgtgacgttcgacgttggccaggagagattctcggcacataagtgcgtgctcgctgctcgatcatccgtcttcgaggcaatgttctttggtgctacgagagcgaagccccgtaggagcaatatcaaaattgaagatatggaagctggcgttttcagatcattcctacatttcgtatacactgacttgctgcctgatacgtcgcaagacgtggtgatggctcagtaa

SEQ ID NO: 11504 - DNA, 1026 bp, Oryza sativa
  Clone ID: TFbOSC401180j.C1.o17.fg
atgatgatatcatccagcttcgccgagttgaagctcgagtacccagggacgacgacgacgacgaacagcttcgccgtcggcgacggggagcagtcgtgggtcatcagatgctacccgcgcggctaccgcgaggaggacaatggcgagtacgtctccctgcgcatcggcgtgccggcgagatcgaacaccgtcagggccatcttccacaccttcctgatgcgccgcgacggcggcgtcggcgcgccgtcgatcatctgctcggacagggccttcccgatgagtgtccccggccacccccgcggctacggcggcgcgttccggcacctcgtgaggcggagcgacctcgagccgctctacgccgtcgacggcgtggtcacgatcgtctgcggtgtcgtggtcttcgccgacgccggcggcggcggcggcgacgacgacgacggcggccctatacccgtcccgcggtcgaacctcggcggccagctcggcggcatcgtggaccgcgccgactgctccgacgtgtcgttctccgtcggcggcgagacgttccacgcgcaccgcgccgtgctcgccgcgcgctcgccggtgttcaaggcggagctcctcgggtccatggcggaggccgccatgccgtgcgtcaccctgcacgacatcgatccggccacgttcaaagctctactacacttcgtgtacacggacgccttgccgtcgccatcgacgtcgtcgtcgtcgtcgtcgacgacgaccggttttttcgagagcttgctcgtggcggcggacaggtacgcattggagaggttgaagctgatgtgtgcacagaagctgtgggagagcgtgtcggtggagacggtggcgacgacgctaggctacgccgagacgtaccattgcccggagctaaagagcaagtgcctcaacttcttgatggcggagagcaacttcaagaaggtggccgtcaccaatggctactttcatcttaggcaggacttcccgttaattattgaagagattaaaaaacggattgagagttaa

SEQ ID NO: 11505 - DNA, 1095 bp, Oryza sativa
  Clone ID: TFbOSC407812j.C1.o18.fg
atgggaaagctcaccgacgtgacacgctccaacgacatccagctcaagatcgtgggccactccttgacaatggccatggacgacggcgagttcttcagttccaggcggtattgcgtcggcggacacgactgggagatccgcctgcggccgaaggatccctgggttggcaggcgcgaccggccgctcacgctcaagctcgtcctgcgcggcgcgccccgcacaggcagcggcagtgtgaaggcccagctaagctgctgcttggtagatccgacgcagaagctgaggccgtcggagatgaagaccgtgtcgcataagttccacaagcccggtgactactcgccccgtgccgtgttcatggcaagggacgagctggaggcgtcgggctatctcacagacgattcctacgtcgttcagtgcgccatcaccgtgctccgagaacagccggagatagccgcggcggcggcagcggcgggcgacagcgcgaatgcagccgtggcgccgtcgtccgagttgcacgcgtaccttggcgccctcctggagagcaagaccggcgccgacgtcacgttcgtcgtgtccggcgagtcgttcgccgcgcacaaggctatactggcctcgaggtcgccggttttcatggccgagctgttcggggcgatgaaggtgaaggcctcggagcgcgtcgaggtcaaggacatggaggcgccggtcttcaaagccattcttcacttcgtctacactgacaccgttccagagctcgaccaccgtgatggcgaggagacggaggcagcgtcgacggcgacggcgatggcgcagcatctgctcgccggcgccgacaggtacgggctggagaggctcaagctcatctgcgagagcaagctcgccgagcgcatcgacgtcgacacggtgtcgaccacgttggcgttggcggagcagcacgactgctcgcatctgaaggccaagtgcgtcgagttcattgctgccggcacggctgaaaaccttgatgctgtgttggccactgatgggttcaaacatctggaggcgagctgtccctcggtgttgactgaccttgtcaaggttgcccgtggaagaaagaattaa

SEQ ID NO: 11506 - DNA, 972 bp, Oryza sativa
  Clone ID: TFbOSC900305j.C1.o3.fg
atggcaaacgatacgaacaacacctcctcctctgtcattgctactgaaaccacgagcgcgtcacatgtaatcaagattgatggatacacagtaactaaggatctgatggagaatggcgaatttgtgtcatctatcccgttcagtgttggggacttcctctggaacgtcagatactaccccaatggcaactgctcaaagaacgcagactacctgtcgttttctgtgtttcttgagtctcactgggccgaggacgtgaaggcaaagttcagcttcaaactgctggacacgaataataaaccggtgcgatcgcgcaacttcatctccaatacgcacaatttcagcagaagaggttcaaactggggctactccaggttcatcaagaaaagggatttggaacaatcggagcatctaatagacgattcatttactatcaggtgtgatcttactgtcatgaagggcttctctagcaaaggaagccactgtaagccgtctgtggaagttcctgcaggccgtctggacctgcatttgggcaacctcctgagtaataagaagatgaatggaaaagacgtcacgatctacgttggtaaggagagattcagagcacacaaatgcatactcgccgctcgttcgtctgtcttcagggcgttgttcttcggtgccatgattgcggaaacccctaggaccattgaaatcgaagatatggaagctggtgtgttcagattattgctacatttcatgtacaatgactcgctgccagagacgtggtctcaagatgcaatgatggctcagcacctgcttgtcgctgcggattggtacaatgttgggaggctgaagctgatatgcgaggagaagctagcaaagcacattgactgcaacatggtggcgaccactttggctctagctgagcagcatagctgccaaggactcaaggaagcttgcctcgaattccttgcttcaaccaaccaatcttga

SEQ ID NO: 11507 - DNA, 1248 bp, Oryza sativa
  Clone ID: TFbOSC101916j.C1.o11.np
tggcagcagcagctgcagccacatgatcagcaggcggcttcttgctcagtcacggccgggatgatgatgcaagcttctggatacgacatggcagaattggatcacatcttcctctacctcaacagccaggatcaagcatcagcagcaattcaagaacaacctcgtaagccacatatatatatgcacttattactgtcaccaaatcttcaaaccctcaacatcttcccttcacagccaatgcacgccggcgagccttctcccaagggatcatcatcccatcacggcggcgcatcgtcggcggcggcgtcggagcacgagggccccaagacgccggacgccaagacgctgcggaggcttgcacagaacagggaggcagccaggaaaagcaggctaaggaagaaggcttacattcaaaatctggagacaagcaggatcagactgtcccagctggaacaggagttggtgcaaagatcaagaactcagcacgtatcaacatagggtgcaattttgggtggtggagctttttctgccggcattggaggacaaagcccaggtatatataatcaggcggcgtggttcgacggcgagtacgcgcggtgggtggagagccacgagaggatgatggctcacatgcgggcggcggtggaggagcagccgcagcacggcggcctacggcagctggtggacgcggcggtggcgcaccacggcgtgctggtggagctcaaggccgccgtggccagcgccgacgtcttccacctcgtctccgggacgtggctgcccgccgccgagcgctgcttcctctggattggtggcttccgcccatccgagctcatcaagatgatggcgcggcacgcggagccattgacggagcaacaggcggcgggtgtgtacggtgtgcagcagtcggcgagggagagggaggaggcacttgaccgcgacctccacgccacccaccacgccctctccgatgccgtctcctcggactcactcctgctcttccctcccggcaccggtgccaccgcatactccgacgtcgccatggctcacctctcccttgccatctccaatctctcctccctcgaagccttcgtcaggcaggcggacgcgctgaggctgcagacgctgtacaagctgccgcagatactgacggcgaggcagtcggcgcggtgcttcctcgccatcgccgaccactcccaccgcctccgcgccctcacctccctctggctctcgcgcccgcgccaccccgac

SEQ ID NO: 11508 - DNA, 900 bp, Oryza sativa
  Clone ID: TFbOSC401607j.C1.o25.fg
atggcagatgctagttcgaggactgacacatcaacagtcctggataccgacgataagaatcagatggcacatcattttgatatcaattttgtgaagaatttgattgttaaggtagacgggcaaagtggagctattgtgccttctaattcatctgatcggtctgacagatctgacaagcccatggaccaaaaggtgttacgccggcttgctcaaaatcgtgaggctgcaagaaaaagtcggctgagaaaaaaggcatatgtacaacaattagagagcagtaagctgaaacttgcaagcttggagcaagagatcaataaagctcgccaacaaggaatttacatttcgagctcaggagaccaaactcatgctatgagtggaaatggagctatgacttttgatttagaatatgcccgttggttggaggaacaaaacaagcagataaatgagctgaggactgcagtaaatgctcatgcaagtgacagcgacctccgtctcattgtagatgggataatggcgcattacgatgagatattcaggctgaagggtgttgccgcaaaggctgatgtgtttcatatactttcaggcatgtggaaaacacctgctgaaaggtgcttcttgtggcttgggggttttcgttcctctgagcttctaaagcttcttgtgaatcagctcgagccattaactgagcagcagttgttgggactatcgaacctccaacagtcctctcagcaggctgaagatgctctatcacagggaatggaagcgttgcaacaatccttggcagatacgttggccgggtcccttggtccatcaggatcttcagggaacgtggcaaactacatgggtcaaatggctatggccatgggcaaacttgggacccttgagaatttcctccgtcag

SEQ ID NO: 11509 - DNA, 1560 bp, Oryza sativa
  Clone ID: TFbOSC401001j.C1.o21.fg
atggagggtggtaggctaggaggagcggcggcttcagcatcggcggcggcggcggcggacgcgcgcggcgggatgtcgggcttcgcggctcctcagcacgccatagtgaagcatggaccagggagtgtgacacattgtggtggaaaatggacttttgctgaactatgccagtctgaacaaatttgggttcttgactgctactgcatgcaatgggcatgcaagtttgcgaccaatgcaactgaatgccatacaaatttgaacaacgtgcaacctactcaagttactgattttggggcacttgcgcagtctgctggattccgaatagaagatctcgctaatctcagtacaaatggtttgttcaatctgaagtcaaatgctcataccattatcaatgaccccctccaatttgagaattatgtaaagtctatttctccgtctaatattactacaacagcaacagtaacagtagttgaccctcagacactggtcccacaaaagggagcacaactgaatttggtaactataaggactggtaacgttgagaattggggggagtcgactattgctgatacaagtccaaggactgatacatcaacagatccagacactgatgagaggaatcagatgtttgaacaaggacagttagctgctcccactgcttctgattctagtgacaggtcaaaggacaaactagatcataagacacttcgccgccttgcccaaaatcgtgaagctgctaggaaaagccgtttaagaaagaaggcatatatccaaaaccttgagagtagcagattgaaacttactcagatagagcaagagcttcagcgggctcgtcaacagggcatttttatatcaacatcgagtgatcagtcccactcagcgagtggaaatggagctttggcatttgacatggagtatgcacggtggttggaggagcataacaaacatataaatgagttgagggctgcagttaatgcacacgctggtgataatgatctcaaaagtacagttgatagtattatggcacactacaatgaaattttcaagctcaagggtgtggcagccaaagcagacgtttttcatgtgctgtcgggaatgtggaaaacccctgctgagaggtgcttcatgtggctaggtggcttccgatcatctgagcttcttaagttactggcagggcaattagagcctcttacagagcagcagcttgctggcatagccaacctgcaacaatcctcccaacaggctgaagatgctctttctcaagggatggaagcactacaacagtcgcttgcagagaccctggcatcaggatctctcggccctgcaggatcttctggtaatgttgcaaactacatgggacaaatggcaatggctatggggaaacttggtaccctagaaaacttcctacggcaggctgataatctgcggcttcagactcttcagcaaatgcagcgcatattaaccactcgccagtcagcacgagctctacttgcaataagtgactacttctcccggcttcgtgccctgagttctctttggctcgcccgtccaagggaataa

SEQ ID NO: 11510 - DNA, 1428 bp, Oryza sativa
  Clone ID: TFbOSC404032j.C1.o1.fg
atggggggctccagagaggaagatcgtcagcaccacaatcacctcccttctgagctccccctcggcttccggagctcctcaccgacgacgatgatcgcctcttcctccatgagcaaggaatcgagcaactacgacatggccgatttcgatcaagcttcgctttttctctacctagacagtcatgatcaacaatccatccaagaacaacgacaaactctgaacatcttcccttcccagccgatgcatgtagccgacccagctcatgaagcaaagagtgctggggtagccatggccatgcttcccaatggcaaccagctgcaggttcttccttctcatcccagcaagaagcctgatcagcaaggtggtcaaaagattaattccagtgtccctactaatccacctggccctaatcttcccttgcctaactctgccaaggataacaagaatagtagcctcattaaggggccaaaaaaatgtggcttgcagaaggaaggaagcagcagtgggaagggtgcaacaacatccaatgatccagaaagagaaggaaggaggacactagaccctaagacactgaggaggcttgcacagaatagagaggcagcaaggaaaagtaggcttaggaagaaggcttacattcagcagttggagtcaagtaggattaggctaagccagcttgaacaacaagttcacgtggcaagagtacagggtgctatgctgggtgctggagatcagcaccagggccttccttctggcccttcagctgcatcgttgtttgacctggagtatgggagatgggtggaggagcacagcaagctgatattccagctgagggcagccctgaacgagcagatggcggacagccagctgcaggtgttcgtcaacggcgcgatggcgcagcacgacgagctgctgagcctcaagggcgccattgccagggctgacatcttccatctcctctgtggcgtctgggctacccccgccgaacgctgcttcctttggctcggtggatttagaccctctgaggccatcaaggtgatgcttaagcaggtggagccgttgtcggaggggcagctgatgagcatctacgagctccagcaagcggcgaaggggacggaggacgccctcagccacgccatggacggcctccagcagtcgctctccgacaccgtcgccgcccctgacgtcgccgccgccggcggcttcatggggcacatgtccctcgccatgaacaagatctccgctatggaggacatcgtcaggcaggcagatggcctgaggcagcagaccctgcacaagctgcagcatatgctgaccatccggcaagccgcccggtgcttcgtggcaatctccgactacttccaccgcctacgcgcactcagcacactatgggttgcgaggccaaggccggaggaggggccggcaatgtag

SEQ ID NO: 11511 - DNA, 1089 bp, Oryza sativa
  Clone ID: TFbOSC400216j.C1.o4.fg
atggcgaacgcgaagctgcccaagcaggcgctgctgccgccgcgcagcccgttcccgacggcggcggcggcggcggggccgtacgccggcgaccacggcccgatcgcgcggccgcagggtgcgccgcaccacaggcacgggcacggccacgggcaccaccagcgcacgtcgtcggagagcttcatcgaggagcagccgtcgtggctcgacgacctgctcaacgagcccgagacgccggtgcggcagcacggccgggccggccaccgccggtcgtcgagtgactcgtttgcgatgttcgacggaggcgccgccgccggcgcttacgccaatggctttgaagggatgggaggaggaggaggaggagggcaggccgcgccgtggggtggtgtgcaggagtactatgcgaagccaagctcgtttggtaggcaccagggccggccatgggagcagggcatgaacaatttggtgaattacaggcaaagcggcggtccaccgatgccggcgaaggagaaggttggtgggcaccatgggtcgccgagcgtgttgagggatcatgatcatggtatggacaggagatcctcggacgaatcggggcatgatcagaaggttgggcctgagaggaaggagggcgtgccgccgaagcatgcacaatccgaggcggacaccaagcgcgctaaacagcaatatgctcaaaggtcccgcgttcggaagcttcaatatattgcagagcttgagagaaaagttcaggcattacagtcagaagggatagatgtgtctgctgaaatggagtttcttagccaacagaatattatgcttgacttggaaaacaaagccttaaagcaaaggctggaaagtctagctcaagagcaactaattaaacgctttcaacaggagatgtttgagcgggaaattggtcgtctcagatcattgtaccagcagcagcagcagcaacagaagcagccgcaacctactactaccctcagtcgaagtaacagcagagacctggattcacagtttgctaatctgtctctgaaacacaaagaccccaactctgggcctcttcgtactcagtcctcgtcaatcttgtga

SEQ ID NO: 11512 - DNA, 1041 bp, Oryza sativa
  Clone ID: TFbOSC401539j.C1.o89.fg
atggcgcagctcccgcccaagatcccggtggcggcgccggggcaccaccagcactgggcctcggccgggggcgccggcgacgcggcgtgggcggatgagttcgccgagttcgcggcgtcgcggcggggcgcgcaccgccggtcgctgagcgactccgtggcgttcgtcgaggtggcgccggcggggtgcggggcgggcggcgagttcgacaggctcgacgacgaccagctcatgtctatgttccccgacgagggcgggtcgtcggccccggggtccgacaacggcggcagcgacagcgacggcggcggcgacaagcacgccgcggcgcagagcgacgacgggcagcacgccgccggggagccgacgcaggagcaggcggcggccacctcgccgacggagctgatccgggaccccaagagggtcaagaggatactggctaatcggcagtcggcccagaggtcgcgagtgaggaagcttcagtacatctccgagctcgagcgcagcgtcacaaccctgcagaagtggcgccagtttgagaccgaccgatggacacagccacactggttggctggcaatagcacacaatgtggcgaggagatgagcgagagcaacgaggtatccgtgctgtcccctcgggtggcgtttctggatcagcagcggacgatcctgaccgtcggcaacagccacctcaagcagcggatcgcggctctagcacaggacaagattttcaaggatgctcatcaggaggcgttgaggaaggagatcgagaggctgaggcaggctgtcctagcctgttacaggctgacggcacctgacctcttgtgcatgatttggttcccgcttctcggtgaaagaaaccaccggaggcgaaaaacctgcgcagcatatcgttatcgtggaacaccgttactgctccagtttcaaggacaagtcgcacagcgtgcaatacaacatctgcattattcagaatttgcagtatatggatctggatcagcgatgattaaccatgctacatgtggtgttcttgtctcaagatactga

SEQ ID NO: 11513 - DNA, 516 bp, Oryza sativa
  Clone ID: TFbOSC402026j.C1.o13.gm
atggcggagcagctgggcggcgtgggcagcccgcagctaagcctgagcagctgcagctccttcctttccatctccagcgccggtaccagcgccgccgatggtgctccccatctatccctcggcgtgggcggcgccgaggagctggatctgctgctgcaggtgggcataggcggtggcggtggcggcggcggcgacgaggaagaggaggagcgcaagaccatccggatgatgaagaacagggagtcggcgctgcgctccagggcaaggaagagggagctggagaaggaagttcgccggctggtgaatgagaatctcaagctcaagaggcactgcaaacaaggacaacacaagagtggagcgggctacgatgctatcaagacctaccaacaacgccccttcagcgagtccccttcctcctcccttcggccagggcgaccgtacctggccggcctcctccccctccccttcacctcgctttgcctccgccaccatgatcagcccactgcccgctactga

SEQ ID NO: 11514 - DNA, 1046 bp, Oryza sativa
  Clone ID: TFbOSC403288j.C1.o1.fg
ccttctccaccactgctactgctgcggctacagctaggcctcctcctacactggacatcttcccatcctggcctatgaggtctctccacacacccaaggagggttcaaatgtgacagcagacacaacagactcggagagcagcagcaagaacaacagcaaccaaaatgcctcatcagaccagcatgtgctagtaggagacatggcaggccagttcgaccaaattccacagcaggaacaacacaagaagatggcaactaacagtcccactcatagcagcaagactggcaaggcgcttgatccaaagacgatgagaaggctcgcccagaaccgagaagcagcacggaaaagccgactgcgaaagaaggcttacatccagcagcttgaaagcagcaagctgaagcttgctcagatggaacaggatatccacagagctcgttcccagggcttactgcttggagctccaggtggaaacaccagctcaggtgccgcaatgttcgacgtcgactacgcccggtggctggaggaagacagccagcgcatggctgaactgcacggagggctgcacgcacatctgccggacagcgacctcagagccatcgtcgacgacacgctaacccactacgaccacctcttcaacctcaagggcatggcggccaaggccgacgtgttccacctcatcaccgggatgtgggcgaccccagctgagcggtgcttcctctggatgggcggattccggccctccgagctgctcaagacattgacaccccagctggatcccctgactgagcagcaagtggttggtatctgcaatcttcaacagtcatcgcaacaggcagaggaagctctctcccagggcttggatcagctgcatcagtcattagcagaaaccgtggctggagggtccccgttggatgaccccaacgtcgggagtttcatgggtcacatggctattgccctcggccagctatcaaatcttgaaggttttgtcatacagatcaagataggagttgcactctctctttgtgtgactcaacttcataaatga

SEQ ID NO: 11515 - DNA, 1443 bp, Oryza sativa
  Clone ID: TFbOSC8883j.C1.o9.fg
atggcttccatggcaccaccttgcccaactccatggcttctgcaaacctcttatcattctggtcaacaaatttattcccaacaagttgttgatctcatgttacatgttttaatttcccttcttaatttgcattggcctgacactgacagcgagcaaggaggaggaggaggaggtggcgctgcctattttggagagctagaagaagctcttgttcatcaggttgccacactcaggaggagggctcaacaaactgcaaccaccaccacctctcaccatggacacaccactcccttctccactgctgctgctgcagctacagcaacagcaacagctaggcctcctgctacactggacatcttcccatcctggcctatgaggaggagctctcttccaacaccgaaggatggatgttcaaatgtaacggcagacacaacggactccgagagcagcagcaagaacaacggcgatcagggtgcagcagcagccgacatggcgagccagtttgatcagatcccacagcagcagcagaagcagcacaagaagatggcagcaagttccactcacagtgaccacaggatgacaaagacacttgatccaaagataatgagaaggttagcccagaaccgagaggcagcacgcaagagccggctgcgaaagaaggcttacatccagcagcttgagagcagcaagttgaggctggctcagatggagcaggatctcgagagagctcgttcccagggcctcttgctgggaggatcaccaggtggaaacaccagcgcaggagcggcgatgttcgacgccgagtacgggcggtggctggaggacggcgggcggcggatggcggagctgcacggcgggctacacgcgcacctgccggacggcgacctgagggcgatcgtcgacgacgccctggcccactacgacgagctcttccgcctgagggcagccgccgccaaggccgacgtgttccacctcatcactggcacgtgggccacccccgccgagcgctgcttcctctggatgggcggtttccaaccgtccgatctgctcaagacagtggcaccccagctagaccctctgactgaacagcaagtggttggcatctgcagccttcagcaatcatcgcagcaggcagaggaagctctctcccagggcctggagcagctgcatcagtcactagctgagaccgtcgccaatggcggctccgtggtcaacgaagccagccttgggagcttcatgggttacatggcccttgccctgggcaagctgtccaaccttgaaggctttgtcatacaggctgataacttgaggcaacagactcttcatcagatgcacagaattctgacaattaggcaggcagctcgatgtttcttggcaattggcgagtaccataatcgcctccgtgccctcagctccctctgggcttctcgtccccgagagtaa

SEQ ID NO: 11516 - DNA, 1098 bp, Oryza sativa
  Clone ID: TFbOSC400765j.C1.o13.fg
atggcgtcctcgtcggacgagcagccgaagccgccggagccgcccgcggcggcggcggtggcggggacggccgtggccaccgccgccgcggcggtgccgacgcacgccgagtgggcggcttcgctgcaggcgtactacgccgccgcggggcacccctacgcgtggcccgcgcagcatctgatggcggcggcggctgcgggggcgccgtacggcgcgccggtgccgttcccgatgtaccacccgggcgccgccgcggcgtactacgcgcacgcgtccatggccgcgggtgttccttacccgacagctgaagccatggcggcggcggcggcggcggcggcgggggcggtgccggaagggaaggggaaggggaagggcgccgccgcgtcgcctgagaagggaagctccgcggcgccctctggggatgatgcatcccggagtggtgacagtggcagcgaggagtcgtctgatactagagatgatgacactgaccacaaggattcgtctgcacctaagaaaaggaaatctggtaatacatcggcagaaggtgagccgtctcaagctacgcttgtgccctatgctgctgtcgagtcaccgtatccgttgaaggggaggtctgcgtcgaagcttccagtttctgcaccagggcgggcggcacttcctaatgccacacctaatttgaacatagggatagatctttggagtactcccccagccttagctgtgcccgcagggcagggggaagcaagtcctgggttggcacttgctcgacgtgatggtgttgctcacctggatgagcgtgaattgaagagggagaggcgcaaacaatctaacagagagtctgccaggagatcaaggttgcgcaagcaggttggatacctctatgggtctggcagtagatggcagacctggaaagaaacacttattctgcttggtgctgccatatttctggcaggaggaatagagtgcatgctagatgccgggagaggcatttggtatgatgtcagcacttcaccagatgttggcttgtctgcacacgggcaatatgcacaacaagccatgctccaagaaactgacaaacagcatgctcccaggccttaa

SEQ ID NO: 11517 - DNA, 453 bp, Oryza sativa
  Clone ID: TFbOSC420547j.C1.o6.fg
atgtcatatgcatttaacaaattgctcccaactacccatttcaggcagtatgctcagaggtctcgtgttagaaagctccagtacattgcagagctcgagagaagagttcaagctttacagacagagggtgtagaagtttctgctgagatggattttcttggtcaacaaaatatcatgttagatttggagaataaagccttgaaacaacggcttgagagtctatctcaggaacacctaattaaacgctttcaacaggagatgtttgaacgggaaattggccgtctcagatcattgtttcagcaacagcaacagcagcagcacataccacagcagcagggtcctacccacagtcgtagtaacagcagagacctcgattcgcaatttgcaaacatgtctctaaaacacggcgatcccaactcagggcgtgatgctgttccaggccttcgcatttag

SEQ ID NO: 11518 - DNA, 2574 bp, Oryza sativa
  Clone ID: TFbOSC400302j.C1.o17.fg
atggctgcggcagtggcaatgcgagggagtagcagtgatggaggtggctatgataaggtttccgggatggactccggtaaatatgtgcgctacacgcctgagcaggtggaggcgcttgagcgggtgtacgccgattgccccaagccaacctcctcccgcaggcagcaactgctgcgtgagtgccccatacttgctaacattgagcccaagcagatcaaggtctggttccagaacagaaggtgccgggataagcagcggaaggagtcttcacggcttcaggctgtcaacaggaaattgacggcaatgaacaagctacttatggaagagaatgagcgactccagaagcaggtctcccaattggttcatgagaatgcccacatgcgacagcagctgcagaatactccgctggcaaatgatacaagctgtgaatcaaatgtgactacccctcaaaaccctttaagggatgcaagtaacccctctgggctcctttcaattgcagaggagaccttgacagagttcctctcaaaggctactggtacagctattgattgggtccagatgcctgggatgaagcctggtccggattcggttggtattgtggccatttcacatggttgccgtggtgttgctgcccgtgcctgtggtttggtgaacctagaaccaacaaaagtggtagagatattgaaagatcgtccatcttggttccgtgattgtcgaaacctggaagtctttacaatgattccagcaggaaatggaggaacggttgaacttgtctacacacagttgtatgctccaacaactttagttcctgcacgagatttttggacgttacggtacacaaccacaatggaagatggcagtcttgtggtctgtgagagatctttaagtggttcagggggcggtccaagtgctgcctctgctcagcaatatgtgagagcggaaatgcttccaagtggatacctggttcgcccatgtgaaggtgggggatcaattgtgcacatagtggaccatctggatcttgaggcatggagtgttcctgaggtgcttcggccactctatgaatcttcaagggtagtcgctcagaaaatgactactgcggcactccggcacatcagacaaattgctcaagaaacaagtggggaagtggtgtatgccttggggaggcaaccagcagtgctacggacttttagtcaaaggctgagcagaggctttaacgatgccattagtggtttcaatgatgatgggtggtctataatgggcggagacggtgttgaagatgtagttattgcttgcaactcaactaagaaaattaggagtaacagcaatgctggcatcgcctttggagcccccggaggtattatatgtgctaaggcatcaatgttactgcagagtgttcctccagcagtactggttcgatttctgagggagcatagatctgaatgggccgattacaatattgatgcatatttggcttcaactctgaaaacaagtgcatgttcacttactgggttgcgacccatgagattttctgggagccaaatcatcattccacttgctcacacagttgagaatgaggagattcttgaagttgttcgccttgagggtcaacctcttactcatgatgaagctcttctttcaagggatatccacctgcttcagctctgcactggaatagacgagaagtctgtgggatcctcctttcagcttgtgtttgcaccgattgatgatttcccagatgaaactccattgatttcttctggcttccgtgttataccacttgatatgaaaacattagaactaatagaggcatttggtttcaaatattcccttggaaaaataaagcaagatggtgcatcctctggtaggacattagatttggcatctagtcttgaagtaggttcagcaacagctcaagcctccggagatgcatctgcagatgattgtaacttgcgatctgttctgacgatcgcttttcaattcccttacgagttgcatctccaagacagtgttgcagctatggctcgccaatatgtccgtagcattgtttctgctgtgcaaagagtgtcaatggctatctctccctctcaaactggtctaaatgccggacagaggataatctctggtttccctgaagcagcaacccttgctcgatgggtttgccagagctaccattaccatctaggggtagagttacttagtcaatcagatggagatgcagaacaattgttgaagatgctatggcattaccaagatgctattttgtgctgctcattcaaggaaaaaccggtgtttacatttgccaacaaagcaggactggacatgctagaaacttcccttgtcgccttacaggacctcacattggacaggatctttgatgagcctggaaaagaagcattgttctcaaacattcccaaattgatggagcagggccatgtctacctgccatcaggcgtgtgcatgtcaggaatgggtcggcatgtttctttcgatcaggccgtggcttggaaagtgcttgccgaggatagcaatgttcactgcctggccttctgtttcgtcaactggtcctttgtgtga

SEQ ID NO: 11519 - DNA, 216 bp, Oryza sativa
  Clone ID: TFbOSC401928j.C1.o5.fg
atgtcggcggcgcgggggggggggagggcgtcctcatcggcggtggaggaggagctgagggcgctgatggagaagcggcgggcgaagatgatgctgtcaaatagggagtcggcgcggatgcggaagcagcgccacctcgacgacctcaccgcgcaggtggcacacctccaccgcgagaatgtgcacgtcgccactgcgctcggcctcaccacctag

SEQ ID NO: 11520 - DNA, 2568 bp, Oryza sativa
  Clone ID: TFbOSC400500j.C1.o14.fg
atggcggcggcggtggcgatgcggagcggcagcggcagcgacggcggcggcggcgggtacgacaaggccgggatggactccggcaagtacgtgcggtacacgccggagcaggtggaggcgctggagagggtgtacgccgagtgccccaagcccagctcctcccgccgccagcagctgctccgcgactgtcccatcctcgccaacatcgagcccaagcagatcaaggtctggttccagaacagaaggtgccgagataagcagcggaaggaggcatcaaggcttcaggccgtgaaccgaaaattgacggcgatgaataagcttctcatggaggagaatgagcgtcttcagaagcaggtctcccagctggtccatgagaacgcgtacatgaagcagcaacttcagaatccgtcattgggcaatgatacaagctgtgaatcaaatgtgaccactcctcagaaccctctgagagatgcaagtaacccgtctggactccttacaattgcggaggagaccctgacagagttcctctccaaggctacagggactgctgttgattgggtgccaatgcctgggatgaaggttgattgccaacttctcagattcactctgcctgcatcaaatgaccctggtccggattcgtttggtattgtggccgtttcacatggttgccgtggtgttgctgcccgtgcctgtggtttggtgaatctagaaccaacaaagatcgtggagatcttaaaagaccgcccatcttggttccgtgattgtcgaagtcttgaagtcttcacaatgtttccagctggaaatggtggcacgatcgaacttgtttacatgcagatgtatgctcctactactttggttcctgcacgagatttttggacacttagatacacaactacaatggaggatggcagccttgtggtctgtgagagatcattgagtggttctggaggtggtccaagtacagcctccgcacagcaatttgtaagagctgagatgcttcctagcggctatctagtgcgcccatgcgagggtggtggctccatcgtgcatattgtggaccatctggatcttgaggcttggagtgttccagaagtgcttcggccactctacgagtcatctagggtagttgctcagaaaatgactactgcagcactacggcacatcagacaaattgctcaagagacaagcggggaggttgtatacgctttggggaggcaacctgctgttttgcggacatttagtcagaggttgagtagaggcttcaatgatgctataagtggtttcaatgatgatggttggtctgtcatgggtggggatggcattgaagatgtgatcattgcttgcaatgcaaagaaggttaggaatactagcacttcggccaatgcttttgtaactccaggaggtgttatatgtgctaaggcatccatgctactgcagagtgtcccacctgcagttttggttcgatttttgagggaacatcgttctgaatgggcggattataacttcgatgcatattcagcttcatctctgaagacaagctcatgttcacttcctgggttgcggcctatgagattttctgggagccagatcattatgccacttgctcacacggtggagaatgaggagattttagaagttgtccgtcttgaaggacaagcacttacacatgatgatggtcttatgtctagagatattcacctgcttcagctttgcactggaatagatgagaaatcaatgggatcctgcttccagcttgtctctgcaccaatcgatgagcttttccctgatgatgctccgttaatatcttcaggctttcgtgttataccgctggacatgaaaacagatggtacacctgctggtagaacattagatttggcatctagccttgaagttggttcaactgcacagcccacaggggatgcatctatggatgactgtaatctacgatcagtgctgacaattgcctttcagttcccttatgaaatgcatctccaagacagcgttgcaactatggcccggcaatatgtccgcagtattgtttcctctgttcagagagtatcaatggctatttctccttctcggtctggcttgaatgctgggcagaagataatttcaggcttccctgaagccccaacgctagctcgttggatttgccaaagctaccagttccatttgggggtggagttacttaggcaggcagatgatgctggggaagcactattgaaaatgctatgggattacgaagacgctattttgtgctgttctttcaaggaaaagcctgtgtttacttttgccaacgagatgggactaaacatgctagaaacatctctcgtcgctctccaagatctctcactggacaagatatttgatgaagccggtaggaaggccctatacaacgagatcccgaaattgatggaacagggttacgtgtacctgcctggtggagtgtgcttgtccgggatggggcgccatgtttctttcgagcaagctgtagcatggaaggtgctcggagaagacaacaatgtgcactgcctcgccttctgcttcgtcaactggtccttcgtgtga

SEQ ID NO: 11521 - DNA, 1173 bp, Oryza sativa
  Clone ID: TFbOSC900303j.C1.o8.fg
atgtctcggtcgccgcacctccctccccgctgcccgccgctgggtcctcagatcacaaggagggacgacagcttgttcacgcagagctgcaggtttccgtcggaggatccattcgtcggtgagccgccgtgctggctcgatgatctcctcgcggactccgggaagagccacacccttcctcctctcaggagagcctgcagcgattctgatgctatcttggatgtgctgacgtcgttccagagcccaatctaccctatcgatgaaggggatccgcagccggttggcgaagctggggagtcgttcaatgctgcggctgaagggggtggaagtggtgctggcatcgaaggtagctgtgtttatggaccaaattcgccgagacagaagactaggctgaccagttcagagagttccatggttaacgctgtcttggagaatgtccctagcaacccattgcagtacctgatgattgatgccacaagtggtgtgaactgtaatgttggtgcagccaatggaactggagacacaggtgatgctgtatgccacgctgatcaagagaagtcacttaaaaggaagaaagtggcacgaagggaatctcatggagttaggttgggtggggctaagaggcagtgggaggatggtgagggtggtgctgtactgcaggaggtgaagcaaagaaatggggatgagagcttgacacctatacctgaagtcgtgagtgaggctggatggtgggctgttactggaaggagcatggggtggaggcgctcaggccaaagatcaagggtcagaaaacttcaatacattgctgatcttgagagaactgttgactcacttcagaacataggggctgatttggctgtgagggtggcatctcttttccagcttcgtaatgctctatcaatggaaaacaagcaactgaggaggcagatcactagtcttcagcaggcaaaactaattaaggatggccaaacgcagatgctgaagaaggaaaccgagaggctgaagcagctctcagtgcgccaccgcaggagcaggagcgtcacctcttgctttgaggccaactcatttggaggaggagacccatctgcgatcaactggcagatgctcgacatgtcaaagctcagcttgaacggcggcgctgttgttcctcctagaggcggctacggcatgtga

SEQ ID NO: 11522 - DNA, 2049 bp, Oryza sativa
  Clone ID: TFbOSC400397j.C1.o26.gm
atgagccagttgaagatgctcatggatgtgacattacatgggatgatgtggatgaagctgttggtacgacacactatcttcgaggtcacaatgttccaaggagagctcacaatcgtgttgggcatcaacaagcttgaaccaggtcagcttgctcttgctgctgcttctgactctgacagatccaaggacaaacatgaagatcaaaagacattgcgtcggctcgcccaaaatcgcgaggctgcaaggaagagtcgtttgaggaaaaagtctcgcacagtgccctccaattctgggcagttgcagggcatttttatatccagctcagtggaccagactcattccatgagtggaaatggggcattggcttttgatatggagtatgcacgttggttggaagaacacaataggcaaattaatgagctaaggtctgcagtcaatgctcatgcaggtgataatgagctccgtggtgttgttgacaagatcatgtcacactatgaggagattttcaagcagaaaggaaatgcggccaaagcagatgtctttcatgtgttatcaggcatgtggaagacaccagctgagaggtgtttcttgtggctaggaggattccgaccatccgagcttttaaagcttctttcgacacagcttgaacctctcactgagcagcagctgtcagggatagccaaccttcagcagtcttcacaacaagctgaagatgctctttcacaaggaatggaggcccttcagcagtccttggcagaaacattggctgggtctcttggttcttctggatcaacgggaaacgtggcaaactacatgggccaaatggcaatggccatggggaagcttgggacccttgagaatttccttcgccaggtaactttgatctggctcagcacgccgcagtggcagtacatcggcttcttcactgtgatgccggcgtatgggttaacctgcacaggagatcccatcacttccattggcttatggtgtgattggttgggatacggagagtgcgcaggggacgactggcacgttattgactgcggggcagattgccacacaagcgagttggtgatcgaaaacttgaagccccggtgcatcagcaatgcaaggaggcgagcggtgttgcgagcatcatcgagcccacagtgggcacggccctcccatgagaaggagcagcagaggacggactgcattgtaacccaaaaattgcaagaatatggtaccaagctggccgatggggatgagctggggaggaagatgccgcaacatcaaggcagggagaaaatgctggctttgaggcgggagccgacgccgcccggctatcttcccgacggtgtttatcccgtcatggcctcggaaaagaatatcaaagtgttccagatgggaacacatgtggaggcttctattccgttccaaactagagcggccgctgagcatgcttggaaactcaatggccgtgccatctatgacggctgttgttggctgaacatacagtgggcgcaaccttctagtagcacccccgcagcggcaacacctcttgtcgggatcactaaggaattgatagcaaatgtgcttgaattgaaggccatgttgaaggagagtaatgcatcaaaagaggtggaagatgggcgcacaaagcagaaggtggcagcggtagacctagcagtcatggcgccagttgctatgccattaactcagatgtccccgccggcggactccttggtggagcaagagatggcaacacagcagaagaccgtggagggcacgacgaggacattgccagcagtggtgccatcgtctcagtttcctccatcagaggctggtttctcgaactcaaaggagcaagaggcagcgccagcgtggtcctcggaggcgggcggaatggcatggcacgaaggtgggtcggcgttttgcgtgaaggtggagcacagtgatggcgcgtgttgcgcgcagccaggctttgcttcctcccatgtgttggctgttgggctggccgggtcgactattgctgaagacaacggggacctccaaatggtcctggtttaa

SEQ ID NO: 11523 - DNA, 348 bp, Oryza sativa
  Clone ID: TFbOSC401427j.C1.o4.fg
atggaggccaacgccgacgccgacgagcggcgcctccgccggaagatcttcaaccgggagtccgcgcgccggtcccacgcacgcaagcagtggcacatcgacaagctccgcgcgcgcgccgggcgggggcgggggcggaggcggctgggggcggcgggcgccgaggccgtggtctggcgggcgccggaggagaggccagaggcaggcgccgaggcctcggatggcgggcgcgaaggcaaggccagttgcaagccacccggtccggctcctccgccactagtcgcccggtggcgcgggcaagctccgcatccacagtcgggcgctcggttcagcgtttggatgttatga

SEQ ID NO: 11524 - DNA, 1572 bp, Oryza sativa
  Clone ID: TFbOSC20620j.C1.o14.gm
atggctacgaatctgagatttgcttctataagttttcgaacttgtccgaaaatgcttttcggaaactccgaaaattacagtcttggcctccaatggctagtttttgaggggctcgggaacgcctattcatccctccctctagacgacattaaggtcctttcaattggtatcagagcaaggtctctcattccgggcttcaccgtcttgagagaagatgtcgacaagagggccatgggtcctaatatagagcgagttgtagatgtgagtatttctcctcctaatgatatggagctatcatttgaagaggaagagaaatgcacacatctcaatgctcaagctactaatgttttgtttagtgctttgagtgaagatgtgttcaaaaccatcatgccacttgaagatgcttatctaatttggacaacattaaaggaaagatatgacaagtccaaatgtgatggagaggatgctcttagggaaacatcatttggtgattgctctactttatcgtctcatcatgacaagtcccaagtgattatctcctccgaccaagaagatcatgtctttatgggtgatgatgatgatgacgactccgtggttgatcacttgaacaaggacacaacaatggtcatcaagctcatgagggttattgagaagcaacaagcatgcctcattaagaagaatgaagaaatcaaggatctagccgatgaacacaagaaactcaagggatataattcttcattgattatgaggtatgaacaattggaaaatgaatttgcttgtgccactaattctattgcttgtgtagcatctttgaagaaggaaaatcaagagcttaaatctcaacttgaggagatcactagcaaggagaagcacatggatcatggacttatgggcaatgctcaaccttctcaagataaccatgagagcatggtgaagaagcttgagaagggatcaaccgtagcttgcactaagttctatcaagaaaacaagtccaataacaagaggacgccggtcgccgctgcctcccctcccactggatccggcggaggggaggacgccgccgccgctgggccgccaggccgccaccgcctctccttctctcccactagatctggtggagggcaggaatcgcccctgcacgccacctcccgccgccggtcgttgctgatgggcagggggagtccagcgccgccgccgcgcggaagacgaggtcacgaaggggagacgacggggaggggtgccggggcaaggccactcgacggcggcgcactcacccacgggcgacgtcacgcggccgtggagctggagctctcgctgggcggcgtgatctcccccaatgtcacatcgttcgacctaaaggcggcggtgtgcagccacgggttattcatgattgcgcccaaccattgggaccggacgtcacgcgcgctagtgcgccccctccgcgtcaccttcgaccgtaccaccttcatcgccgtctgcatctcccgccacccccacgtgcctcttcgatgtgttcctcgtttctgtcgtcagtgcgctcgatgccccctccccgctcgaccagactgttga

SEQ ID NO: 11525 - DNA, 1416 bp, Oryza sativa
  Clone ID: TFbOSC418822j.C1.o4.gm
gaggacgaggcggagatggcgagcacgaggctgagcctcgagctggggaaggtcggaatccagtcgtcgccgccatgctccagcagctcaagcgccggccaccccgcgatgcagcccgccgccgcggccacggcggcgccgggctacggccccaggccacgccacatgctcaccgaggccgagaaggaggcgaagcgtctccggcgagtgctcgccaaccgggaatccgcccggcaaaccatcctccgccgccaggcgatccgagatgaattggcaagaaaagttgcagatttgtcgtcgcagaacgagaccatgaaaaaggagaaggacgtggtggcgatcaggacgatcaagaaggcggccgtggcggagccgatggacacggcgccgccggcgcagcagcaagcggagacggcggcggccgtggcgccgccgacgacggccaccccgccgtcgacggcgccgcagccgagcttcctgtacaccgcggcgccggcgggcgtggcgccggtgccgtacgtgtggggctcgtggccgccgtgcgggccgacggggtacgagccgccgccgccgctctgcctcccgccctgcgcgtggtactaccccgtcgtcgccgatccgcgcgtgtcctcgccgccgacgtcgacgtacccgcagtcgtaccaagaacagccgacgagcagccctggcggcgggacggccgaggaggacaccgacgacgacccgtgctcgctgacactcgccatcgacgtcgacaagaggagcgcgcctggcgccggcggcagcgcggccggagctggacagcacgcctccataagcgacagggagaaggcgacggcggcggcggaggcgaggaagcggaggaaggagctgaccaagctgaagcagatgcacggcggcggcggcggctcccgtcccggcggcggaggcgagcactgcgcctgcccaagcctacgcgggatgccaccgccgccgccgccgcagccgcagccgacgacgacagcgacgacgtcggcgaacggggggaaggtgaccccgaacctgacgatggacgccgagggcacgcggctgctcaacctcaccgtgctgcagcgcctcgaccccgccgtcgaggacatcctcatcaccgccgcccacgtcaccctctacgacttcaacatcgacctcaaccagtggagtcggaaagatgtggaggggtcgctgttcgttgtgaagaggaatactcagccgaggttccagttcatcgttatgaacaggcgtaacacggataatctggtggaggatctattgagtgattttgaatatgaacttcaacctccgtatttgttgtaccgcaatgctgcccaagaagtaaatggtatctggttctacaatcaacatgactgcgaagctgttgcaagtctttttggaaggtaa

SEQ ID NO: 11526 - DNA, 549 bp, Oryza sativa
  Clone ID: TFbOSC401058j.C1.o53.fg
atggcgtctcccggcgttgtgtgtactactgtaacgccgacgtcgtcggccgggtcggaccaggtcgtggccggcggcggcgaggcggcgcggcggccggtggcgccggcggtgatggaggagcggaagcggaagcggaaggagtcgaacaggctgtccgcgcagcggtcgcgggcgcggaagcagcagcagctggacgagctggccgggcaggtggcggcgctgcgcgcccggaacggcgccctgggcctcgccgcgcgcgaggcggcgcgccggtgcgccgccgtgcgcgccgagaacgagctgctccgcgcgcgctccgtcgagctcgccgcgcgcctcgactccctcaccgacctggcgcagtgcctgcacgacgccgccgcggcctcctccttcgccgccgcgcccccgatgatgatggcgggcgccgccaccgccttccccaccggcgccgtcggcgccgccgccggcttcatgatgccccagctgccgccgccgctcctcgacgccaccaccatgggcatgcattgcaactactactactag

SEQ ID NO: 11527 - DNA, 1101 bp, Oryza sativa
  Clone ID: TFbOSC401001j.C1.o60.fg
atggcgtcgaaggccggaggcgggggcgtcgcgcggcgcggaggagggcggatgcggagtctggggaggcagggatccatgtacagcctcaccctcgacgaggtgcagagccagctgggcgagccgctgcacagcatgaacctcgacgagctgctccggagcgtgttccctgacggcctggccatcgccgacggtgccggtgccaccaccagtagccagcagcatcagccgggctcgggcctcctgcggcaggggagcatcacgatgccgcctgagctcagcaagaagacggtggacgaggtgtggaaggggatccaggctgctccgaagaggaatgccgaaacgggcggcggcggcggcggaggtcgacggcggcgagagaggcagccgacgcttggggaggtgacgctcgaggatttcctggtcaaagctggggttgtcacccaaggatctctcaaggagcttagtgatgtaggcaatgtggatccggttggaagaggtgttacagcaaccgggactgtggatctggcacctggatcacactggatagagcagtataagcagcagattgcatctactgatgctcatcaccatgggcagcaaggtgtgcagggtgcttattttccgaatcgattggtccctcagccacttaatgttggccccggtgctattctggagccatcctactctgatggccagacttcttcaggaatgatcggcggaatgtccgattcgcagacgcctggaaggaagcgaggcatgtcaggggatgtggcagataagttgatggagagaaggcagaagaggatgatcaagaacagggagtcagctgcccgttcaagagccaggaagcaggcctacactaatgaacttgaaaacaaggtttctcgtttagaagaggagaatgtgaggctaaagaggcaaaaggagtcagactatttgcattatactaggagtaatcttgtgatggaaaacatagaaatacatcgcagtctaatcaacagcaatattatcatctggtatgatgagctgtactacttcataggtagtgtatcaagttacaatcaagaggtcttcgtcatggtcattgtttgtgtgtag

SEQ ID NO: 11528 - DNA, 462 bp, Oryza sativa
  Clone ID: TFbOSC12168j.C1.o2.fg
atgtcgagtgggacctcgtccgggtcgagccagggaacccggagctccaggtcggaagatgacctgaacctccaggcccagatggagaagaagaggaagaggaggaaggagtcgaaccgagagtcggctcggaggtctaggatgaggaagcaacagcacctcgacgaactcacctcgcaggtgaaccagctgaagaatcagaaccagcagctgagcatggcactgagcctgaccacacagaaccttgtggcagtgcaggcacagaactcagtgctgcaaacccaggagttggagctgcagagcaggctgtgtgccctaactgacatcctgatgtgcatgaacaacaccagtgctactcctactcctacaattccagccaccactacaagtgcttgtgatatttttggtgccagctcatggaaccagccacccatagacttgtaccagtaccagtgcttctga

SEQ ID NO: 11529 - DNA, 471 bp, Oryza sativa
  Clone ID: TFbOSC401981j.C1.o10.fg
atgcccctcatgcacctcctggccccaccagcgcaagccttcgtcgtcgcgccgccgcgcgtcgcgcccgcgttcgacggcgccgccgcgccaccgcgtgaggacgacccagccgccgaccagccgccggagagggaggccgacgccgacgagcggcgcctccgccggaagatctccaaccgggagtccgcgcgccggtcccgcgcgcgcaagcagcggcacctcgacgagctccgcgcgcgcgccgagcggctccggcgctgcaaccgcgagctcgcggcgcgcggccacgccgcccgcggccgcgcgggcctcgtccgcctcgccaacgcgtggctccgcgccgaggccgccgccctcacccgccggctcgcggcggcgcgccgcgcgatcgcgctcggccagctgtaccgccctgccgcggcggcggcggcggcgtcgggacgttcgagcagacgatcgcctcgctaa

SEQ ID NO: 11530 - DNA, 1647 bp, Oryza sativa
  Clone ID: TFbOSC411383j.C1.o7.fg
atgggtttcttccgccggatcgccggcatgtttggaatctccagggacgacgccgaccaccacccccaccaccaccaccacgacggcgccgcgggggactccgccgccgccgccgaagtcccgcaggataaggtcgtcgccgccgcggccgccgcggcggctgccgggaacgtgcagaggcgcgggttcagcgtccaggtccccgtccccgtcgagcggcccgggcccgggccggtgctcgtgccctgtccccagggcgacggcggcgttcagggctttaggtggtatacaaggaagctaaggattgatgaggatggtgatgtcgcagatgagttcttggatgaagttgttccagaaatctcgatcaacaacgactcaactccagctggaagatatcaagtgaaatataatacaaaatcagctgctctagcaatgagaaagcaaatatccgtcattgatggtgacatctgtcattccttggagtaccaagggcgcctgcgttggaactgccaatcactcttggccaaaggattgcaagaatttgatatgcgcgtctgccttggagcctcccaggagtgtggatctgtggagttcttggttgatgcgtcattcttaaatttgagtgttttgggatgcctgatgggtactaatgatcctggcacgccgtccaaggcaacaaaggcatcagaaccggagcagtctccagccactacatctggcactacagctccagtttaccctgaatggcctggttttcaggcctactcggcaattccaccgcatgggttctttccacctcctgttgctgcaagtccccaggctcatccctacatgtggggagctcagggtgtgcatccatttaatcactaccctatgctggcaaatggaaatgttgaaactgctggaactgcaccaggtgcttcagaaattaacgggaaaaatgagcttggcagaacatctggtccatctgccaacgggattacctcccacagtgagagtggaagtgagagtgaaagtgaaggaagtgatgccaactctcaaaatgattcacattcaaaggaaaatgatgtaaaggaagatggtagttctcagaatggcatatcacatacagcattaaatcagaacatgtcgatggctccaactcaaacgggtgtagtaatcgggggagttgctcccacaacaaacttgaacataggaatggactactggggtgctgctggttcttcgcctgttcctgcaatgcatggcaaagcatcgtctggttcagttcgaggagagcaatgggatgaaagagagctcaagaagcagaaaaggaagcagtctaatcgggaatcagcacgtagatcccggctgcgcaagcagaacatcatggatagtcttattgaagcaccaaaatatttgttccaggctgagtgtgaagagctttctgtacgcgctgacaatttaagggcagaaaactcctctcttagggctgagcttgaacggatcaaaaaggagtacgaggcacttctttcacacaatgcttcactcaaggaaaaactagaggggaacagtgattcaataccttatatgaatgaacagaacgacaccaatggcacccaccagaagcaacaggattctgatgctcagcctaatgatgcgccttga

SEQ ID NO: 11531 - DNA, 969 bp, Oryza sativa
  Clone ID: TFbOSC401520j.C1.o23.fg
atgacgccgctgccgttggcgaggcaggggtcggtgtactcgctcacgttcgacgagttccagagcacgctgggcggggtcgggaaggacttcgggtcgatgaacatggacgagctcctccgcagcatctggacggccgaggagtcgcacgccgtcggcgccgccacgacgacgacggcgacgacggcgtccgtggcggcggcggagcacgcggcggtgggggcgccgcccgttcagaggcaggggtcgctgaccctcccccgcacgctcagccagaagaccgtcgacgaggtctggcgcgacatgatgtgcttcggtggcggcggcgcctccaccgcgccggccgccgcggagcccccgccgccggcgcaccggcagcagacgctcggggagatcacgctgaaggagttcctcgtgcgggccggcgtggtgagggaggacatgtcggtcccgcccgtcccgccggcgccgactcctacggcggctgctgtacctcccccgccgccgccgcagcagcagacgccgatgttgttcggtcagagcaatgtgttccctccgatggtgcctccgctctcgctgggaaatgggctggtctcgggagctgtcggacacggcggtggtggtgccgcgtcgttggtttcgccggtgaggccggtctcgtccaatggcttcggcaagatggaaggcggggacctgtcgtcgctgtcgccatcgccggtgccgtacgttttcaaaggtgggctgaggggaaggaaggcaccgggcatcgagaaggttgtcgagagaagacagcggcggatgatcaagaacagggagtctgccgcgaggtcgcgccagaggaaacaggcatatatgatggaattggaagctgaggtagcaaaacttaaggagctgaacgatgaactccagaaaaagcaggatgaaatgttggagcagcaaaagaatgaggggttaggtggcagcatttaa

SEQ ID NO: 11532 - DNA, 969 bp, Oryza sativa
  Clone ID: TFbOSC420174j.C1.o9.fg
atgacgccgctgccgttggcgaggcaggggtcggtgtactcgctcacgttcgacgagttccagagcacgctgggcggggtcgggaaggacttcgggtcgatgaacatggacgagctcctccgcagcatctggacggccgaggagtcgcacgccgtcggcgccgccacgacgacgacggcgacgacggcgtccgtggcggcggcggagcacgcggcggtgggggcgccgcccgttcagaggcaggggtcgctgaccctcccccgcacgctcagccagaagaccgtcgacgaggtctggcgcgacatgatgtgcttcggtggcggcggcgcctccaccgcgccggccgccgcggagcccccgccgccggcgcaccggcagcagacgctcggggagatcacgctggaggagttcctcgtgcgggccggcgtggtgagggaggacatgtcggtcccgcccgtcccgccggcgccgactcctacggcggctgctgtacctcccccgccgccgccgcagcagcagacgccgatgttgttcggtcagagcaatgtgttccctccgatggtgcctccgctctcgctgggaaatgggctggtctcgggagctgtcggacacggcggtggtggtgccgcgtcgttggtttcgccggtgaggccggtctcgtccaatggcttcggcaagatggaaggcggggacctgtcgtcgctgtcgccatcgccggtgccgtacgttttcaaaggtgggctgaggggaaggaaggcaccgggcatcgagaaggttgtcgagagaagacagcggcggatgatcaagaacagggagtctgccgcgaggtcgcgccagaggaaacaggcatatatgatggaattggaagctgaggtagcaaaacttaaggagctgaacgatgaactccagaaaaagcaggatgaaatgttggagcagcaaaagaatgaggggttaggtggcagcatttaa

SEQ ID NO: 11533 - DNA, 30 bp, Oryza sativa
  Clone ID: TFbOSC8882j.C1.o13.gm
atggtgggcggcaagctgacgtggcagacg

SEQ ID NO: 11534 - DNA, 729 bp, Oryza sativa
  Clone ID: TFbOSC401982j.C1.o6.fg
atgatgaagaagtgcccgtcggagctgcagctggaggcgttcatccgggaggaggccggcgccggcgaccgcaagcccggcgtgttatctcccggcgacggcgcgcatgaccccaaaccaaccacctcagcgaaccacgcgcctgaaagcgactcggactccgattgcgattcgctgttagaagcagagaggagtccacgcctgcgtggcacgaaatccacagaaacaaagcgaataagaaggatggtgtccaacagggagtccgctcgacgatccaggaggagaaagcaggcacagttatctgaactcgaatcacagcaatccatctatgatcaggtcgagcaactcaaaggcgaaaactcatccctcttcaagcagctcacagagtccagccagcagttcaatacagcggtcacggacaacaggatcctcaaatcggatgtagaggccttaagagtcaaggtcaagatggctgaagacatggtcgcgagggccgcgatgtcgtgtggcctgggccagctcgggctggcgccattgctcagctccaggaagatgtgccaagctttggatatgctcagtttaccacggaacgatgcctgtggtttcaaaggcttgaacctgggtcgacaggttcagaactcaccggttcaaagcgctgcaagcctagagagcctggacaaccggatatccagcgaggtgaccagctgctcggctgatgtgtggccttaa

SEQ ID NO: 11535 - DNA, 837 bp, Oryza sativa
  Clone ID: TFbOSC900405j.C1.o4.fg
atggacatcgaggcgttcatccacggcggaagcgggggcggcgacgccgacgccgaccacccgctcggcatcttctccgccgccgacctctccggcttcggcttcgcggactcgagcaccatcacagggggcattcccaatcacatatggccccagtcccagaacctgaacgcacggcatcctgcggtctccacgacaattgagtcgcagtcatcaatctgtgcagcagcaagtcccacatcagctaccaatctgaacatgaaggagagccaaactctgggaggcacaagtggttcggattctgaaagtgaatcgctgttggatatagagggtggtccatgcgaacaaagcacgaacccgttggacgtgaagagagtgagaaggatggtgtccaatcgggagtctgctcggcgatcgaggaagagaaagcaagctcacttagctgatctcgagtcacaggttgaccagctccggggcgaaaacgcatcgcttttcaagcagttgacggatgccaaccagcaattcacaacttctgtcacggacaacagaatcctcaaatcagacgttgaggccctccgggtcaaggtgaagatggcggaggacatggtggcgcggggggcgctgtcgtgcgggctcggccacctgggcgggctgtcgccggcgctgaacccccggcaggcgtgccgcgtccccgacgtgctcgccggcctggactacgccggcgacgaccccttcacggccgggctgtcccagccggagcagttgcagatgcccggcggcgaggtggttgacgcctggggctgggacaaccaccccaacggcggcatgtccaagtga

SEQ ID NO: 11536 - DNA, 1152 bp, Oryza sativa
  Clone ID: TFbOSC401400j.C1.o16.fg
atgggaaaaggagaggtagccactaggtccaaatctcaaaaatcatcggcgacacagaatgaacagagtacacccactaatcctcctactgcatatccggactggtctcaatttcaggcatactataatcctgctgggacagctccaatgaccccaccgggctttttccatccaaatgtggctccaagtcctcaggggcacccatatatgtggggtccacagatgatgcctccctatggaacaccgccgccatatgcggcgatgtatgcgcaagggacaccatatcagcaggcacctatgctaccgggttcacacccatacaatccttatcccgggcaatcaccaaatgggacagttcaaactcctacatctgctggcggaacagagacagataagtcaggcaaaagtaagcggaagactcccctgaagagatcgaaaggaagcttaggtaatcttgatgtagttgcaacaaaaaataaaaaggcgcccgcaaaaccttcagcatcctcatccaatgaaggttcttcacacagtgagagcggaagtggaagttcttctgaaggaagcagtacaaattcaaaaagtggttcaaggacaaaggatggttctgagcatggccagggtaatgatgctagcaacaaaggagctactgctcagagttctgcggttgagcccgtacaagcatctactgggccagttgtgcttaaccctatgatgccatactggcctgtccctcctcccatggctggcccagcaactggtgtaaacatgggaatggattactggggtactcctacttcagtacccatgcataataaagttattgcagcaccagcatcagctccttcatcaaactctcgtgatgttgttctcagtgatccagccatacaggatgagcgagaactgaagagacaaaagcggaagcaatcaaatagggaatcagctcgacgttcaagattacgcaagcaggctgaatgggaggaagtagccaatcgagctgatttgctaaagcaggaaaacagctcacttaaggaagaattgaaacaacttcaggagaagtgcaatagcttgacctcagaaaatacaactttacatgaaaagcttaaagagcttgaaggcgagaaatcaaatggaaactggtataaagagtga

SEQ ID NO: 11537 - DNA, 522 bp, Oryza sativa
  Clone ID: TFbOSC420956j.C1.o1.fg
ccgccgcaccaccggcgcgccagatctgaggtggccttccgcttcccggacgacctgggcctcgggggcggcgcggacggcgggggcttcgacgagatcggctccgaggacgacctcttctccaccttcatggacatggagaagatcgccggcgccgaccgcgaccgcgccgccgagacctcctcccctccccgccccaccaagcaccgccacagcgcctccttcgacggcttcgccttcggggccggtgcgggtggccccggccctggccttgggaagcagcaagacggagcaggaggcgtgttctccgaggttatggaggctaagaaggccatgtcctccgagcagctggccgagctcgccgccatcgaccccaagcgcgccaaaagaattctagcaaacagacagtctgcagcccgatcaaaggaaaggaaggctcgatatataacagagttagagcggaaagttcaaactcttcaaactgaggctaccacactgtcagcacaactgacactatttcag

SEQ ID NO: 11538 - DNA, 465 bp, Oryza sativa
  Clone ID: TFbOSC401748j.C1.o3.fg
atggcgaactaccaccaccaggagtactaccagatggcggcggcggcagcggtggcgtggccgagggagccggacagcccgcagctgagcatcatgagcggctgcagctccctcttctccatctccaccctgagggacgacgacgacggcggcggcgtccgcctcgccggcgccgcgctgcccgccacgccggtgtcgctcgccgggatcgccggcggcgccagtacccccggcggcgacgaggtggacatggaggtgcggcagcagagcggcggcagcggcgacgaccggaggaccatccggatgatgaggaaccgggagtccgcgcttcgctccagggcgcgcaagagggcgtacgttgaagagctagagaaagaggttcgccggctggtggatgacaacttgaatctcaagaagcagtgcaaagaggggtcaggcatgagagaggatattgtgtgtaggtga

SEQ ID NO: 11539 - DNA, 1143 bp, Oryza sativa
  Clone ID: TFbOSC413557j.C1.o9.fg
atggctcatgatgaagctgttgctacacaaaagattgggaaaacaacctcccctcctaaggatcaaccaactccatgtccatttcctgattggtccgctgttcaggcatattatggccctggtgtcttaccaccgacatattttgccccagcaatagcttcaggccatgctcctccaccatatatgtggggtcctcagcctataatgccacccccttttgggaccccgtatgctgcaatgtacccacacggtggagcttatccacaccctcttatgcccatgatggcaaatccattgagcatggaaccagccaagtctgcaagcagtaaggaaaaaggctccaacaagaaacttaaggaagttgatggggctgcagtatccactgggagtggtgacagtaaaaaaacaatgacgtctagtggggattacagtgcagaaggctctagtgatgtaaatgatctaaaggtgggcaagactggcaggaaacggagattggatgatggagctggtgctgaaacatcagcagctgcaaagatggaaaatgctttacctcccagccatatattgggaagtactgcgattttgccaaatcacagctttccagctcaagtaattaggcccagtgctactaatgttgctaattcgagggcattgggcacaccaatatctccaccgcctggtgtgattgttccaagtcatacaggagtatcaacagaattactgatcaaggatgaaagggaattaaagcgtgaaaagaggaaacaatcaaatagggaatccgccagacgatcaaggctgagaaagcaggctgaaacggaggatctggctacacaagtagaatcacttacagcagagaacacgtcacttagatctgaaatcagtaggctatcagaaagctccgagaagctcaggctggagaattcggctctaatggggaagcttaaggatcctgcagcatcgacccaggcagaaacatctctgcagaaaaccaccacagcctcctctcctcgcgtcgtggagaactttttgtcaatgatcgacaacacgaacaagacgagtgtcagacacacagagcatgctgaacccaagcttcgacaactcctcggctccggcccggccactgatgttgttgctgcaagctaa

SEQ ID NO: 11540 - DNA, 579 bp, Oryza sativa
  Clone ID: TFbOSC400718j.C1.o72.gm
atggaaattcagctcaataccataagtgccaaagacctggcaaggctggttgctccagcgcaggtgcctgctaagcattttcagatgcctgcgcgtgacgtggaggctgcggcggcaggggatgaggagctcggcgcggcttcccccctccctctcggcggtggcgatggccggggacacagagcggcggcggcgctgccgcctgacgcagaggcggcggcggcgggggatgaggagctcggcgtggctttcacccccccctccctctcggtggcgtgcacgcggggaggacgagggcaccagccgccggagagggaggccgaggccgacgccgacgccgacgagcggcgcttccgccggaagatctccaaccgggaatccgcgtgccggtcccgcgcgcgcaagcagtggcacctcgatgagctccgcgcgcgtgccgggtggctccggcactgcaactgcgagctcgcagcacgcgggcacgccgcccgcggccgcgcgggcctcgtccacctcaccaacgtgcagctccgcgccaaggccgccacccccgcgtcaccgtcccccgcctgccgctga

SEQ ID NO: 11541 - DNA, 570 bp, Oryza sativa
  Clone ID: TFbOSC400608j.C1.o15.fg
atggcgctgccgcctcaggcctacttcgtccccgccgcgccgccgccgccgttccaagaagccactgctgcgctcgccgccggcgacgacgccaccgccgcgttggcggtgtttgagctggagcgcatcctggaagaagcggccgccgcgggcggcggcggcggcaatggctcaccgagctcgggctccgacgggtgctgctacggcctgcagggcgtggctccggcggcggaggaggagcggcggcggcggcggatggtgtcgaaccgggagtcggcgcggcggtcgcggatgcgcaagcagcggcagctcagcgagctgtgggcgcaggtcgagcacctccgcggcgccaaccgccgcctcctcgacgagctcaaccgcgcattgaggggctgcgccgacgtccgccgcgagaactcccgcctccgggacgagaaggccgagctcgccggcaagctccagctgctgctcccgcggcagccggcgccggagaagaacgccgccgacgaccagagtagctgctcctcggagccatgcaagaacagcactacgactaccgctgctgaatga

SEQ ID NO: 11542 - DNA, 1203 bp, Oryza sativa
  Clone ID: TFbOSC400445j.C1.o27.fg
atgacatggcacattcaagccctcccattggccatgccacggcaccaccccgcgtgggccccaccacctcccttcgccgaaactttcccctcctccttcctcccgaagcaaaatccgagcatctccgacgagtccgccatatttaaacacacccacgagcggcaacccaccgcgagagacaaaaatatctccatcgcgatctccatggatgtagagttcttcgccgacctcgacctcgacgcgctcctcgcctccttctcctcctccgccgccgccgccggctccggcgtctcgggcctcttcgccccgtcaccgccgcacgatgcggaggcggggtcgccggagtcggtgagctcccggcggcccagcccttcccgggaggcggcgctgtcggagatcgagaggttcctgatggaggagggccccgcggcggaggagggggtcggcgcggaggatttcttcgacgcgctgctcgtcgacggcggggaggaggaggaggaagaagaggggaaggggagtgaggcggggggaagcacggatggggattccgggaaggagaatgaggtggctaccccggacgcggagaaggaggatgtggaggcggaggtggatggcgatgatcccatgagcaagaagaagaggaggcagatgagaaatagggattctgccatgaaatcgagggagaggaagaagatgtatgttaaggacctagagactaagagcaagtatctagaggccgagtgtcgtcgcctcagctacgcgcttcagtgctgcgcagctgagaacatggcgctgcgccagagcttgttgaaggataggcctgtcggtgccgccacagccatgcaggagtctgccgtactcacggtatgcttgagtcataatcctgatgctcctacagtatatttgtgtcataaacctgatgctaaaggtaaccttttcctgtttgcagaaaccctgccgctggtttccctgctttggctcgtgagcatcgtgtgcctactcccggtgcccggtctacccaaccgaaacccggtggctcgaagcagcgccggaagagatctcgcgacggtaaccggaaagaagacaagcagtgaacaacagctagaagaaacattactactccatgggaggcgttgcaagggctcgagggcgaggatcaagctagataccggaccgttccgtttagcagcagctgcttgctag

SEQ ID NO: 11543 - DNA, 576 bp, Oryza sativa
  Clone ID: TFbOSC401980j.C1.o7.fg
atgccgctcgacttcggcctcccggacatggacgtcggcttcggcttgttcggcgtcgacgcggcggcgttcggatacgatggtgttgcctcggatgcggccgccggcttgtcgccggtggtaggtgccggcgatgggagtggtggtggtggtgatgtgttgttgtactgtgacggcggaggcggcggcggcggcggcggcgaggacggcgaggaggagaggcggcggcggctgaggaggaagatctcgaaccgggagtcggcgcggcggtcgcgggcgcggaggcggcagcgggtggaggagctggagcgcgccgcggacgagctccgcgccgagcggcgcgcgctggcgtcgaggctggacgccacggcgcggcgggcgctcgccgtgcgcggcgcgaacgcgcggcaccacgccgaggcgggcgtgctccggcgccgcctcggcgaggcgcagcgcaacgccgccgtgctgatagggctgtcccgcctcctacgctcgacggcgaacggcgcccacggcggcgccgccccggcccagttgtcgaacggcggcgtggcgtcgttgatgacgtag

SEQ ID NO: 11544 - DNA, 813 bp, Oryza sativa
  Clone ID: TFbOSC422806j.C1.o2.gm
atgggcaggtccgaactccgttgcacgcagtcacctcgctattcctcccccggcctcgccgccttgtccgccccctccgtcgccatccgtattccccgcctttgccgccttgtctgcttcctcagtcgcatcgtccgtctgggagcagacgagtgtggtggcgtccgagcgagcgacgatcttgagcaggagttctggcggtccctgatcgccgcaatgctgtccctccacgacgccatgccgctcgacttcggcctcccggacatggacgtcggcttcggcttgttcggcgtcgacgcggcggcgttcggatacgatggtgttgcctcggatgcggccgccggcttgtcgccggtggtaggtgccggcgatgggagtggtggtggtggtgatgtgttgttgtactgtgacggcggaggcggcggcggcggcggcggcgaggacggcgaggaggagaggcggcggcggctgaggaggaagatctcgaaccgggagtcggcgcggcggtcgcgggcgcggaggcggcagcgggtggaggagctggagcgcgccgcggacgagctccgcgccgagcggcgcgcgctggcgtcgaggctggacgccacggcgcggcgggcgctcgccgtgcgcggcgcgaacgcgcggcaccacgccgaggcgggcgtgctccggcgccgcctcggcgaggcgcagcgcaacgccgccgtgctgatagggctgtcccgcctcctacgctcgacggcgaacggcgcccacggcggcgccgccccggcccagttgtcgaacggcggcgtggcgtcgttgatgacgtag

SEQ ID NO: 11545 - DNA, 492 bp, Oryza sativa
  Clone ID: TFbOSC400354j.C1.o25.fg
atggcatcgtcaagcgggagcggggggagcgcggtgtcggcggcgacggcggcggcgggggggtcgtcgtcggcggcggaggaggagctgagggcgcttatggagcagcggcgggcgaagaggatgctgtcgaacagggagtcggcgcggcggtcgcggatgcggaagcagcgccacctcgacgacctcaccgcgcaggtggcgcacctccgccgcgagaacgcgcacgtcgccaccgcgctcggcctcaccacccagggcctcctcgccgtcgacgccgagaacgccgtcctccgcacccaggccgccgagctcgccgcgcgcctcgcctccctcaacgacatcctctcctgcatcaacaccaacggcgccgccgccgccgccgccgccgccctcaccgtcgccgccgccaccgacccgctcctcgccttcgactccgccgccttcgacgacctcttcagatcctcccccgagctgttccagctttgctag

SEQ ID NO: 11546 - DNA, 1631 bp, Oryza sativa
  Clone ID: TFbOSC400354j.C1.o26.gp
gagagagtaatagtagtagtaattatatattgcacttccttgatttgttttgacagagaaacagaaagcttactgcctcattaatccttacatagttggagtacatgatgatgatgatgcatgcagaaggcttaacttaaccatcacttgatttaccaattacacaagataattaggccattaattagccctagcagctagcttagcttcgttaggtgcagtgcttagttgcttacccccagtggcaagtactgtaattttcttcatcttcttcttggtctctgccatggcagcttcagcttcagtgtttgagctagcaaagctggaacagctcgggggaggatctgaagaggtcgtcgaaggcggcggagtcgaaggcgaggagcgggtcggtggcggcggcgacggtgagggcggcggcggcggcggcggcggcgccgttggtgttgatgcaggagaggatgtcgttgagggaggcgaggcgcgcggcgagctcggcggcctgggtgcggaggacggcgttctcggcgtcgacggcgaggaggccctgggtggtgaggccgagcgcggtggcgacgtgcgcgttctcgcggcggaggtgcgccacctgcgcggtgaggtcgtcgaggtggcgctgcttccgcatccgcgaccgccgcgccgactccctgttcgacagcatcctcttcgcccgccgctgctccataagcgccctcagctcctcctccgccgccgacgacgacccccccgccgccgccgtcgccgccgacaccgcgctccccccgctcccgcttgacgatgccatcaatcaatcgatcgcaaagatttcgggagaagaagaacaacaagcaccactagattgctacaagcttagcagcagcagcagcagtgaagaacaagaagtgcatatactaaactgaaaccaaaatccaaaacgaacacgacgacgacgaagaacacacacagagatcgacaagaacgacgacgacgaacacgagatcgattattgtagaaggaagctagagagagaggaggagagggaaatggatggcgagtagcttatgagaagacatagaaccagtagaggaagacgacggagaaagactggacgagatgggtgcggcgccggagtgtggagttgatcataaaccccgagaggaggatctcactgatcacaggcgacatcgatcaggaactccagcacgaacggtataagcatgtgcctccctcctttcttccttccccctctctcactcgatcaacaagaacagcatgcaagaacaagaacaaagctctagctccctccctccctctccaatggcggctggggttataaagagcgaggaggctggctagcctagcaccggattcgatcggagcggtcggtggcaaaaggctagagctgagctagctactgccactgatcgatgcagcagcactgggcaagctgagccactggtgctagctacaactcgaggcgtctggatgtgtctcttgatgccaagtgccaagaagaggatggtggtggttgttggtagggaggaggagatgatcgaggagggggggtgtgggagcagcaacacgaggtggatttatagagaggacgcacccatctctctctctctttccag

SEQ ID NO: 11547 - DNA, 1281 bp, Oryza sativa
  Clone ID: TFbOSC401664j.C1.o14.fg
atggagggtgaaccctcacgccgcctctctttgctggaccggtgcgacgatgggagcgaggatccggtggtgccaccgcgagttcccaccatcctcaacctcacctcccaccaccgtcttgaccgatcgaaattcctaccattgatccaccctactcctgcccgcttcatctcttcaacaggatcttccttccccccctactcggaaccaccaccttcggcccctatgctagaacttggtagtggctttgggcctgaagacttatactcgttctttcctaatcattttttcttgatggaatccatcagtctaccaccatatgatgttgtagatgtgccgccggtgatccctgtcgcactacggtcggggagatctaaccaggggcttcctagcaagctaccgcttattgaggggcataggcggtcgcatagcgacatccccttcgggtattcacaagaacacccacaaatgccacctgtagcatcagttaagccggaggtcacaacgatcaaggggcaccaattggaggatgtggcggctgctgccctcaaggacatgggcatacaggcatggagcccttctggtagcatagacaaagaagttaagagctccggtgctggcagcacaacccaccattgccgcagcttgtcggttgacagcttcatgatggggaacctcaacttcggagttgttggacagcagatgtccagcccccctttgctaactacagaggtgaatgttggtggaggtgagcccattggtagtactgcttctccctttgctgcagagcttgcgaatgtgaaattcactgaggatgagaagaagaagattgtgatggataaatccctctcagagattgtcttgactgatcctaggagggtcaaaaggattctcaacaatcgggcatctgccacgaagtcaaaggagaaaaagatgaagcacgtaggggagcttcaacgcaaattgcaggtgctgcagtcggaaactactacattaggtgcacaagtgacagtgatgcagaggaacaacaatgagcttgtatcacagaacaatgaactgaaaactaggttgcaagcaatggatcagctagcacagttgggagacgctctgacttcaagattggctgctgaggcccagcacctaagagctgttgttagtgagatcagtgatccaaatctgccaagtggttcacaccaacaactgagctctgacatcgaccaactgcagcagctgcttacacagaggcagacatcacaaatccagcataatcagccacaataa

SEQ ID NO: 11548 - DNA, 5430 bp, Oryza sativa
  Clone ID: TFbOSC401949j.C1.o30.fg
atggacgggcggttcccgctgccgccggcgagcggaggggggcgggggcaccaccggcgggcgcactcggagacgttcctgcggctgcccgacgcggacctcctcctcgacccggagggggacttctccttctccgacctcgacttcccctccctctccgacgactccccggccatctccgacccgaccccgccgccgccgccgccgatggctgcgacccccgcgccggcgccgcggccaccgggtggggcgcacatgaggagcctctccctcgacaccgccttcttcgagggtttctcgttgcagggtgggggaggaggaggaggaggaggagggagtgggggaagtggtgggcataagaggagcgggtcgatggatggggtcaactcgccgttcgagggtgagtcggcgctctccggtgggctaccggactacgcgaagaaggccatgcccgcggagaggatcgccgagctcgcgctcatcgaccccaagcgcgcaaagagaattctggcgaacaggcagtcggctgcaaggtccaaggaaaggaagatcaagtacactagcgagctggagaggaaggtgcagacactgcagaccgaggccaccacgctgtctgcacagctcacgcttctccagagggatacatctggtttaactgccgagaatagagagctcaagctacggttgcagtccatggaagagcaagctaaactacgtgatgctctgaatgaagctctgcgagaagaagttcagcgacttaagatagcagcagggcaagctccaaacatgaacgggaatcccttcaatggtggactccaacagcagattccgccctattacacgcaacagcagcagcagcagcaacagatgccttatttaggcggccaccatgctcagcaacgccatccaagccatcagcagagctcatcaaatggcggccagtcgctgagtggtgactcgagatgccgggagagtatttgcggtgatggaccgagagtcagcttaaggataagacgacgtccgtggtggtcagagatcatgcgggatactaaggctagagttcaatacacgtgcggtctaaccggcggcacatcggcggtcagaccggtggcaccacggcggtgtaagggcggtcagaccggcgtcagcgacaagcgacaggagctgatctcggcggtcagaccggagatacaatctcggtcagaccgacggcaaccaggcgatcagaccggcgcaacaccttcggtcagactgcgatccgtcgaatttgagggaacaaataacataaaagagcttcgtcgagatcttttcaaaaaggagtacattaaatttgagatgaaacctggagaagctttggatgactatctttctaggtttaacaaaattttgagtgatcttagatctgttgattcttcttatgatgttaattatacacaatatgagatttctcaccactttttgaatggtcttgatatgtctatttggaagatgaaagttacatctattcaggagtccgttgatatgtctactttgactttggattcgctttacacaaaattgaaaacacatgagatgaatattctttctcgtaaagttgattctaactcgagtgttttggtttcttcctcaacttctttggatgttgattcttcttcatcgaagtcttccgcatttgctttgtttaatgccatgtccgatgatcaactcgaacagttcgtggaggaggacttggttttgttatctaacagactttctcgagctgtgactaatcttgggagagcgaggggggaagataatggtgatgagaagaccaatgacaacaagccgaagggtacattcaaagggaggaagatcaaggagaatctcaagaaggcttttgatcaagtctacaccgcgtttgagccactaagcgatgtagatggtgagagtggagatgaagataagggaaataacatctccggtgtttgcttcatggcgcgtggtgaattagattcagagtgtgaagacaatgaggtaagtgctcttgaggaagccattaatattttgagtgcaaaaaatatgaagtgtgagaagttgtatagaaaacaggagtttatcattgaatctcttaattctgaaattgctagattaaaatatcttattcctaatgatgatgattgcacaaattgtgaggttttaatgaatgaaatttctaaaattagagatgttaatgctgcacatgatttgaaaaatagatcttctctagctcttagttttgctttgcacacacgcactttggatgagttgtgtttaactaaaaagttattgcaaaaatatcaaattgcttttcatgctagtttgatgtttaacatgatttgtgctaaaaagttaaaacaacctcatgatgttttggattgctcaacatgtactttgaataagttgaaattaaaagatgctttaggtcgtgttgggtacatggaagatgttgtgaaaaccaatgaagtgctttcttgtcccaagtgtggtaaaagcaaaggtgtcatggtagattctgaaaattgtgctaatttggaaaaagaggtttcttatttgaaaaattctttgcaaagattttctgatggtgttggtgctagaagtggtgagattttggttaaacctgatactaataaaactgtgtttaaatctgctggttttgttaaggtaaatgagaaatttgaattgaagaatgtagctttggttgaggacttaaagtataatttgctttcggtttcacaaattgttgatgaagattttgaggttcactttaagaaaactggaagtaaagtttttgattcttgtggtgattctgtgttgaatatttctcgctatggaagagtgtttaaagctgattttgataatcctgtttcacctgtgataacatgtttggttgctaagtttgataaagatgtgatgttttggcatcgtagacttggacatgttggttttgattatcttactaggttaagtagtttggatcttgttcgtggtttgcctaaacttaagaaagatcttgatttggtttgtacaccgtgtcgtcatgctaagatggttgcttcttcacatgctcctattgtttctgtgatgacggatgcaccgggacatctattacacacggacactgttggtccagctagagtgcaatctgttggaggaaagtggtatgtgttggttattgttgacgatttttctcgatattcttgggttttctttatggcaactaaggacaaagcttttcaacactttcgtggtttgtttcttcgattgaatcttgaatttcctggttctttgaaaagaattcgaagtgataatggtggtgaatttaaaaattcttcatttgaacaattttgcaacgaaagaggtcttgaacatgaattttcttctcctcgtgttcctcaacaagacggtgttgttgaaaggaaaaatcgtgttttggttgagatgactagaacgatgttggatgagtatcacactcctagaaaattttgggctgaggcggttcaaggggaggatggtcatatttttgaatacgagagcgacaacgatgacgacgaagtcggctcggccggtcagaccgggcgccaggccgatcggaccgccggcacacctccggtcaggccagcgcatgacgtgcggtcagaccggccagggtcatcgggttcgggtactattgatgctgatcaagatggacctccagagattacaacttcgaccagtactgatacagaacgtgaatcaacttcagaagtcgctgctcctttgcacattcaacgacgacatctgccggaacaaatcattggtaatataggtgagcggactacaaggtctaaggtaatgactcatgatgtttgtgcaaattctgcatttgttgcttcttttgaacccaaagatgtgtcacttgcattaactgatgaatcgtggattaatgccatgcatgaagaacttgaaaattttgagataaacaaagtttggactttagttgaaccaccttctcgacataatattattggaaccaagtggattttcaaaaataaacaaaatgaggatggtttgattgtgagaaataaagctagacttgttgctcaaggttttaccaaggtggagggtatggattttgatgaaacttttgctcctgttgctagaattgaggcaattagacttttgttggcttttgctgcttcaaaaggttttaaattgcatcaaatggatgtgaaaagtgcttttctaaatggttttatacaggaggaagtttatgtcaaacaaccaccaggttttgaaaattctgattttcccaaccatgtttttaaattgtctaaagctttgtatggtttgaaacaagcacctagagcatggtatgatagacttaagaactttttgcttacgaaaggttttacaatgggaaaggttgacaaaatgctttttgttcttaagcatggtgataatcaactttttgttcagatttatgtgtatgatatcatctttggttgttcaactcacactttggttgtgaagtttgctgagactatgcgcagggaatttgagatgaccatgatgggtgagttatcgtacttcttgggattgcaaattaagcaaacacctcaaggtacttttgtgcatcaaacgaagtacatgaaggatcttttgagacggttcaagatggagaattgcaagccaatttcaacaccaattggttctacaactgtgttggatcctgatgaagatggtgaagctgttgatcaaaaggagtatagaagtatgattagatctttgttgtatctaactgcttctaggcctgacatacaatttgctgtgtgtttgtgtgcgcgctttcaagcttctcctcgtgcttcacatcgtcaagcggtcaagcgaataatgaggtatttgaatcatacacttgagtttgaaatttggtattctacttcatcttctatatgcttaagtggatattccgatgctgattttggcggttgtagaattgataggaaaagtactaatggaacatgtcattttcttggtatatcattgattgcatggtcttctaggaaacaatctagtgttgctcaatcaactgctgaatctgaatatgttgttgctgctagttgttgttcacagattctttggcttttatctactttgaaagattatggtcttacttttgggaaagtatctctcttttgtgataatattagtgctattaacattgctaagaatcctgttcaacactcacgcacaaagcacattgatattcgttttcatgttttgagggatcatgttgagaagggagatgtgatattgcagtttttggacacaaagttgcaacttgctgatatttttactaaacctttggattctaatcgttttgcttttcttcgtggtgaattgggaataattcatccttttggcatgatttga

SEQ ID NO: 11549 - DNA, 846 bp, Oryza sativa
  Clone ID: TFbOSC401563j.C1.o10.fg
atgcaggcgtactacgcggccgccgccgccgccgccggtggccacccttacgcctggcccccgccgcagagcgtgcctcccatggctggttgcgccgtgccatctgcggcggcggaagggaagagcaagaggaagacttccggtggcccctccggcgaggactcctccgggagtggcgacggtgggagcgaggattcatcggagaggagagatgatgctgacgagaagggtttgtcacctgcaaagtggagaaaattgggtcatccagacatagaaggtgaaacatctcaggctgctgccatgtctgagcagaatcctgtgaaggcggcaccgaatttgaatatcgggatggatatttggagcaattctacaatggccgccatgccctcaggacaggtggaggtgaatgctgggacgcatttgcggcgagacaaggctttgtctcagatggatgaacgagaactgaagagggagaggagaaaacaatctaacagagagtctgcgaggagatcgagactacggaagcaggaaagacccacatctttctgtcacccgccaaactatcctgttactttttatggcctgacaaaccaagaatgtgaggagttgtcccagaaggtaactgaactgacagccgtaaacagcacactcatgacagaactcgacaagcttaagaaggactgtgaagacatggaagcggaaaattcgcagctaatggatgagatggtgcagtccgagggctctagtgttatagccactttgagcgtcaagattgacacgtcaaaagaccgccatggtagcagtagccagctaaataagcacacaaatgatgacagcaaagggtag

SEQ ID NO: 11550 - DNA, 1125 bp, Oryza sativa
  Clone ID: TFbOSC401580j.C1.o21.fg
atgggaaatgacgaagctgtagttactcagaagatggggaaagcaccatcgccccctaaggatcatccagcccttagtccataccttgattggtcaaatatgcaggcatattacggcccagggatcttgccaccaacattttttagccctggaatagccgctggtcatacccctcctccatttatcttgggtcctcagcctctggtgccatccgcttttgggaagccatatgccgcaatttatcctcctggtggagctttttcacatccgttcatgcccctaatggtgagcccattgagcatggagccagcaaagtctgtcaacagcaaggatagctgttcaaataagaaaatgaaggaaattgatggtgcggctgtgtcaactggcagtggcaacagtgaaaaaacaagtggagattgcagcttagaaggatccagtgatggaaacaaccagaaggcaagtggaactcccaagaaaaggagcatagatgataggcctaaatcaggcgtggaaactggtggagctttaacacctaatgatagacctagcgaacaagcagctttgccaaatctatgcattccggttacagcaatcaaaccagacgtgagcactgctagtgacttcagagttattgccaccccagtaactgaagtgccaactaaggatgataaggaatcgaagcgcgagagaaggaagcaatcaaacagggagtctgctcggaggtcaaggttgaggaagcaggccgagactgaggaactggctagaaaagttgagctattgactgcggagaacacatcccttagacgtgaaataagcaggctaacggaaagctccaagaaacttagattagagaattctgctctaatggagaaactaacggaaaccgggcctgatgaagcacaagaagtgcctccagtcaaaacaaaagcacagcaagctcgaggcgtcgaaaatttcctgtcaatgatagacaagactggcacgccgagaagcagcgggcacatggatcatgccattgccacgcccaagcttcgtcaactcctgggctctggtctggcgactgatgctgtagccgcaagaaagccttctaactttgatcttttacctttacctgcttttggatga

SEQ ID NO: 11551 - DNA, 1410 bp, Oryza sativa
  Clone ID: TFbOSC401841j.C1.o34.fg
atggcagagtccagaatattcggaggtctcaagcccaccaagtccaggttactgggccctactatcagaggcccaccacccaacggcgcggccactcatgccccacgtcgcatcctcttctccttttctccggagagtcaatggctcggtcaaagctcaacgagagcatgtcttcctcctctccgttctccgtgtctccccgccccatccgccgctagccccgcctaccctcgcctcgcctcctccgccgcctccgcctccgcccccgcccgcctccgctcccgcattaccctccccggtggcagatctcccgtccccccaatggacccggccgcctccgccgcggagtcgtcgtcgctgtcgtcgcgcgacgtcgccgcgatgccggactcgccgccgcggcgggcggcgaggcaccggcgcgcgcagtcggagatcctcctcggggcggcgctcccggacgacatcgccttcgacgccgacctcggcgtggtcggggaggtcggcggcggcggcggggacgactacgaggaggaggaggaggatgacgaggaggaggagatggagggggcgggcggcagccggatgttcgagatgttcctcgaggccgggggcaagctcgagaccccggagcccgcggcgccgctgccgccgccgcccgctcggccgcgtcaccagcacagcatgtcgatggacgggtccacgtccctggcgtcgtccgccgcgggtgtggcggggaggatgggcgcggacgctaagaaggccatctctgacgccaagctcgcggagctcgccctcgttgaccccaagcgcgccaagaggatcttggcaaaccgccagtcagctgctaggtcaaaagaaagaaagatgcgctacattgcagagcttgagagaaaagtacagactctccagacagaagcaactacactatcagcacagttgtccatgttacagagagataccactggtttaacaagtgaaaatagtgatttgaaaatacgggtgcaaacaatggagcaacaagtcaggctgcaggatgcactaaatgacaggctaagagatgagattcagcagctaaaggttgcaacaggtcaggttaatgccaactgcggcaaagtgggaaactttggcctctcctcatttggaggcgccaatccacaaggttaccagcgcagtcacatacaatctcttctggcagcccagcagctgcagcagctacagatccactcccagcaccagcagcaacagatgcatctgcagcagcatcatcatcttagcacggtccaacagcagcttctgcaggaggggttgcccttgccaggggatctgaagatgaaaggaattgtggcggcatcccatgcacagaacgccggcgcatctgaaagccacgctctgaggagtgagccgtga

SEQ ID NO: 11552 - DNA, 2808 bp, Oryza sativa
  Clone ID: TFbOSC400123j.C1.o14.fg
atggcggagccggacctactcgcgcccttcgccgacctccccttcccccccggcgacgatttccccgacttcccgaccctcggggatgacgccttcgcgctggaggatttcgatctcgacgatctggacttcgacttcgatgtggatctcttcccgccggatgcgccgccgccggtgacgacgtcgtcgtcgtcctcggccgccggatcgccggaagcggggacgtcgtcggccggcgacgggggttccaagaacgaggagtccgcggattcgtcgtcgccgtcgaggagcgggagtgacggcggcggcggcaaggatgggaaggatgatgaggcgaagcggcgcgcgcggctggtgcgcaaccgggagagcgcgcaccagtcgcggcagaggaagaagcagtacgtggaggagctggaggggaaggtgaaggtgatgcaggccaccatcgccgacctcaccgccaggatctcctgcgtcacggccgagaacgccgccctcaagcagcaattgggtggcgccgccggtgctggtgccgccgcgccaccgccgccaatgcccatgtaccctgcggtttacccattgccgatgccatggatccacccagcctacgcaatgcgtggctcgcaggtgccgcttgtgccgataccccggctcaagacgcagcagcctgcgtccacaccggagccaccggccaagaaggcccggaagaccaagaaggttgcaggtgttagcctgcttggattgctgttcttgatgatggtctgcgggtgtttggttcctgcggtaaatcggatgtatggtgcagcgtacactggggaaggcgctgcgattgttccgtcacatcatgggagaattctggctgttgaagggccacaaaatagtgtctcaaatggtgttgatccgaaggtacctcagaatggaagcgaaacgctgccagctttgttatatttgccgaggaatgggaagcatgtgaagatcaatggaaatctggttattaagtccattgttgcgagtgagaaagcctcttcccgtttgtctaactatggcgagaagggttctggaaaccaaggaaaggaggagactagcttagcaatccctggctatgtagctccgttagaagctggagaagtcatggattctgctaaaggaatgaatgaactgatggctctggctcctggagatggaagcatatacagggaggatgatgggatgctgccgcagtggtttagtgaagcaatgtcaggtcccatgttgaactccgggatgtgcactgaagtattccaatttgatttatctccaacaacagctgatgcaaatggcattgtgcctgtctactctgggtcagtgactaacacgtcacaaaattatactgaaaatcttccttctggccctgttcagaaggtgaagaacagaaggatttcgtactcagaagccatccctttacgaggttcgacatccaatgacacggatcatttcaaagcaccccccaagaaccatagtcagagccatgctggtcgtaagccagtttcgtccgttgtagtctctgtcctggctgatccaagggaagcgagcgatagggatggtgaggggaggatctcctcaaattctctgtcccgcatcttcgttgtcgttcttatagatagtgtaaatgtttttgctggatggaacactctgttgtcggtcagattattggaagaaatagcagcgctcctggcccggatgcaaatcgtctgctggaccgcacctgcagtaggtgtcactgacatgtgggtcccacctacttcgggcccacttcatccatattcacttaaaagttccaagggagcaccgtttccaccgcgaccgattcttgtcttcctcattgcaatatttggattctatgtatgctacatctcctttaaccagataacactagagaatagatctgaggagaacagtggagaagtgcaggcagaaattcattgccgaaagcctcatcttcctcatgaggagctgcgttatgtgcactttccgaaacctgagagttatagcaggggagagtgttcctgcaatctggttcgatcctttgtgcttgtatctatgcaacggtcgggaagtggatggtttgagactttgctgaacagccaccctaacatcagctcaaatggtgaaatatttaacagggtggatagaagagagaatatctcatctatcttacagacccttgacaaattgtataatttggattggttcaccagtgcagcaaagaatgagtgcacggctgcatttggattgaagtggatgctaaatcaggggtttatggaccatcatgatgatatagctagttatttaaacaagaagggtgtttccgtgatatttctcttcaggagaaatacattgcgcaggcttatctctgttttggctaatgattacgacagagatgcgaagcagctgaatggaacccacaaatcccatgtacactcaaaagaagaggctgagatattagcgaaattcaagccggtgctggatgtgtcaaatctgattccaaacatcagaaatgccgagaaatacatcagagattgcttggaccacttcaacaccacacggcacatgatcctctactacgaggatattgtccgcaacagaaatgcattgttccaggtacaagaattcctcggagttccggtgagaaagctggtcagcaggcaggtgaaaattcacactagtcctcttccaggccttgtcaggaactgggatgatgtgagcaacaaactgaatgggacacagtatgctcattttcttgacggtgcagattatgtcaggtga

SEQ ID NO: 11553 - DNA, 573 bp, Oryza sativa
  Clone ID: TFbOSC1203j.C1.o11.gp
acccaaaacattatcaactccacattgtgcttggatcgggcaactacccaatgcaccattgatcctcgatcgcacatccaccagtaacgacctcaaccgtaccacctccacctcaagtgcagcctgcccttgcagcctcttcaccagctgctggttaatgacacggagcctcttcacttcctcttccaagtgtgctgtatgagccttcttcttctgccggtatttgcggacagcctcgcggttgcccaatggcttgcggctcttctttggcttggctttgtcacctccacaactatcatcatctgagctgaagacacgggtgtgagtgtggtagcatgtatgggtgtgctctgttgccgatggaccaggcgggttgcaagtatgagtgtgtgtgcatgttgtcctgatgcttggcaggaagtcatcaaggctggttggaatctctggatttggaaacatcatttggctggaaagctctatctccccgtcatccatattttttcacccaacttagaagatgcagatgactaaatgagtgggcggatatataaattcttacaccaaataggccct

SEQ ID NO: 11554 - DNA, 2247 bp, Oryza sativa
  Clone ID: TFbOSC1203j.C1.o5.fg
atgccaaggaggacagataatgctgcttctgccaattcagttgaaccagaaaaatcagaagaatgtttggagtttgatgatgatgaggaggaggaggtagaagaggaggaaattgaatatgaagaaattgaggaggagatagaagaggaggaggtagaggaggatgaagatgtcgtggaggaagttgaggaggtagatgaggaggaagatgaggaggaagaagaggaatctgatgaaactgaaggtgtaagtaaaactaaaggtgttcaccagaaggatgttactgaaaagggaaagcatgctgagcttcttgctcttcctccccatggttctgaagtatatgttggaggcatctccagtgatgtatcttctgaagatctgaagagactatgtgaaccagttggagaagttgtggaagtgagaatgatgagaggaaaggacgatagcaggggatatgcttttgttaattttagaacaaaaggtttggcattaaaggctgtcaaagaattgaacaatgcaaaactgaagggaaagcggataagggtttcttcctcgcaggctaagaacaagctttttattggaaatgtaccccatagttggacagatgatgatttcagaaaggttgtggaggaagttggtccaggagtattaaaagctgatctcatgaaggtctcaagtgcaaatcgcaatcggggttatggttttgttgaatactacaaccatgcatgtgcagagtatgcaaggcaggagatgtcttccccaacattcaaactagattcaaatgctcctacagtcagctgggcagatcctaagaataacgactcggcctctacttctcaggttaaatctgtatatgtgaaaaatctgcccaagaatgttactcaagcacagctgaaaaggctgtttgagcaccatggtgaaattgaaaaggttgttcttcctccttcaagaggaggtcatgataataggtatggttttgttcactttaaggacagatccatggccatgagggctctgcagaacacagagagatatgagcttgatggtcaggtcctggattgctcacttgcgaaacctcctgctgctgataagaaggatgatagagtaccactacctagttcaaatggagctccattgctcccgagttatcctccacttggatatggtatcatgtcagtaccaggtgcctatggtgctgctcctgctagtactgcacagcctatgctgtatgctccaagagctcctccaggtgcagcaatggttccaatgatgttaccggatggtcgtctcgtatatgttgtacaacagcctggtggacagttgccgctggcttcgccgccgccgcagcaagctggacatcgtagcggcagtggaggacgtcatggcggcagtggcggccgctatggcggtggtggtggcagctccggcagtagcaggccagaggaatgcgtttctgaaacaagactgtacatgcgtattttacctgtatcgcagagtgctgaatctgatggtgcactgtaccgtcaattcacccctgtaagccacatggactatgagatttctgggccagaatctgaggtagacagtgaggtgtggcttggctgggtggcgcagcgacagattccaaccagccttgatgacttcctgccaagcatcaggacaacatgcacacacactcatacttgcaacccgcctggtccatcggcaacagagcacacccatacatgctaccacactcacacccgtgtcttcagctcagatgatgatagttgtggaggtgacaaagccaagccaaagaagagccgcaagccattgggcaaccgcgaggctgtccgcaaataccggcagaagaagaaggctcatacagcacacttggaagaggaagtgaagaggctccgtgtcattaaccagcagctggtgaagaggctgcaagggcaggctgcacttgaggtggaggtggtacggttgaggtcgttactggtggatgtgcgatcgaggatcaatggtgcattgggtagttgcccgatccaagcacaatgtggagttgataatgttttgggttgtgatggaatggctcagtgctttgctggaaagccggagttgggtgtgagacagagttgtgcaccttctacagtgaattgccatatcagctcggattcagggcagaacctggtggtgccccatgctttaagccctagcgatgttattggaagcttcatggtctcatctacctcaaaggatgagtag

SEQ ID NO: 11555 - DNA, 1437 bp, Oryza sativa
  Clone ID: TFbOSC900200j.C1.o21.fg
atggagttcgggaacggcgggtcctcctcgtcggagcgcagggcggcggcggagggggcgacgctggcgagacagggttcggtgtattcgctgacgttcgacgagttccagagcgcgctcgctggtggcggcggcggcggcggtggtggaagcgggttcgggaaggacttcggctccatgaacatggacgagctgctccggagcatctggaccgcggaggagagccaggccatggcctccgcctctggctccgccgcgggggtgggcgtggccgtgggggcgccgccgacgtcgctgcagcgccagggctcgctcaccctgccccgcacgctcagcgccaagacggtggacgaggtatggcgcaaccttgtgcgcgacgagccaccgccggtgggggcggcggatggcggcgatatgccaccccagcggcagtcgaccctcggggagatgaccctggaggagttcttggtcagagccggcgtggtccgagaaaatccacccgctgcgccgccccccgttcccccgccaatgccgccgcggccagtcccggtggtccccaagaccactgccttcttgggaaacttccccggtgccaacgatgccggcgcggcggcgctgggctttgcgccgctcggcatgggggatccagccttgggcaatggcctgatgcccagggcagtgccagtgggcttgcctggcgccgccgtcgctatgcaaacagcggtgaaccagtttgattctggcgataaggggaacagcgacctgtcatcgccgacggagccaatgccttattccttcgaagggttggtgagggggagaaggaacggtggcggagtagagaaagtggtggagaggaggcagaggaggatgatcaagaacagggagtccgcggcgagatcccgcgcgcgcaagcaggcttacacattggaattggaagctgaagttcagaaactcaaggagatgaacaaggaattggagaggaaacaggcagatatcatggaaatgcagaaaaatgaggtagaagaaatgataaaggatccatttggaagaaggaagagactttgcttgcgaagaacactgactggtccctggcctttcacagtgctccaccctggactggtgctatgggacggcacattggatttttgctgccgtggcgctcgaacccgcgtctcaagtaggaacctcgtctccatgttgagcgacgcaggacttcgtcaaaacgatgtcgcgagcagaggagaagactggaggcacgcgcgctgtgggcgtcgtggcttcgcccacgcgtgccctcgcagcgaaatccaagggcgaaatccccgatacgccctccaaatccactcccaccacagcaaaatccagggcggcctcgccatctcatcggacggcaccgcagctgccaccagggtgcccgacgagcagggaggcgcctag

SEQ ID NO: 11556 - DNA, 1170 bp, Oryza sativa
  Clone ID: TFbOSC22910j.C1.o1.fg
atggagttgccggcggatgggagcgcgctggcgaggcaggggtcgatctactcgctgacgttcgacgagttccagagcgcgctgggaagcgccgagaaggatttcgggtcgatgaacatggatgagctgctgcgcaacatctggacggcggaggagtcgcaggccatagcgccggcggcggcggctgcttcggcggcggcggtggttggggacgcgcagcagcagcagcagccgatccagaggcaggggtcgctgacgctgccacgcacgctgagccagaagacggtggacgaggtgtggcgcgacatcatgggcttgggcggcagcgacgacgaagaccccgcggcggcggcggctgcggcggcgcccgcgcagcggcagccgacgctgggggagatgacgctggaggagttcctggtgcgggccggcgtcgtgcgggaggacatggggcagaccatcgtgctgccgccgcaggcgcaggcgttgttccccgggagcaatgtggtcgccccggccatgcagctcgccaacgggatgctgcctggtgtcgtcggcgtcgcccccggcgccgccgccgcgatgacggtggcggcgccggccacgccggtggtgctgaacgggctggggaaggtggagggcggggatctctcgtcgctctcgccggtgccttacccattcgacaccgcgctcagggtgaggaagggccctaccgtcgagaaggtggtggagaggcggcagaggcggatgatcaagaacagggagtccgctgctaggtctcgcgcgcggaagcaggcttatataatggagttggaagctgaggtggcaaaactgaaggaacagaaggctgaattgcagaaaaagcaggtggaaatgatacagaagcaaaatgatgaggtcatggagagaatcactcagcaacttggaccaaaggcaaagagattttgcctccgacgaacactgactggtccatgctgttgcatctgctctgtatgttgctgttgcgttgacatgtcatcccgtttacagttcagtgattctgttctgtacccaagtttaagaggattcagtttcagtgatctgcattttaaggacaaagaagaaagactgatatctcagatgggtgaaaagcgtggcaatggcctggctaagaacattttcggaagattgtaa

SEQ ID NO: 11557 - DNA, 675 bp, Oryza sativa
  Clone ID: TFbOSC416339j.C1.o7.fg
atggacgatgtcccaagtcaattgctcttctcccatccggaggtgcctgatagcttcgatgatttcttgaacaacatcacaacctgcacccacacccacacctgcaatcctcctggtccgtcggcaaccatgcacacccacacatgcttgcacacgcacacccaggtcttcgcctccggcagtggcgaagatgacatcaaggaggacctgacgaagacccggaggccgctggggaacagggaagccgtgcgcaagtatcgggagaagaagaaggcgcatgcggctttcttggaggaggaggtcaagaagctccgcgccgccaatcagcagctgctgaagcgattgcagggccatgctgcgctcgaggctgaggtgatcaggttaaggagcatcctactcgatgtccggggcaagattgatatggagatcggcacattcccttaccagaagccgtgcagtgttggctctgtggcatgcactgatccaggtatgtgcttcaatggcaattctgagattggaggggtctgggaggagtgctctagaccagtgggtgcagatcgcatgatcgacaaagatggtagcatgtcacaggaaattgatatcccaggaccggtgcattccatttccatggatgttgtcggaagcttggtgacttctgcttctctatctgagtga

SEQ ID NO: 11558 - DNA, 810 bp, Oryza sativa
  Clone ID: TFbOSC400505j.C1.o8.fg
atgtcgtgccacggcggcggcggcggtggcggcgaaggggcactgtcgcggcaggggtcggtgtacagcctgacgctgaacgaggtggagagccacctgggcgagccgctgcggagcatgaacctggacgacctcctgcgcacggtgctccccgccgcggcggcggcggcggagacggcggggaggaagacggtggacgaggtgtggcgcgacatccagggcgccagcaccggccggcaccacgcgacgcccatgggcgagatgacgctcgaggacttcctctcgcgcgccggcgtcgccgtcgacggtgccgcctccgccgccggcgcgcattggctgcgtgggcactacccgccgccgccgccgccgacgacgacgacgctgcagtacgtgggcggctccggggcggtggtggacggcgtgtataaccgcgtggacgggcacggcgtcgcggggttcctctcgcaggtgggcgtggcggggcggaagcgcggcggcggcgtggacggcgtggtggagaagacggtggagcggaggcagaagcgcatgatcaagaaccgcgagtcggcggcgcggtcccgagcacggaagcaggcatacacgaacgagctcgagaacaagatctcgcggttggaggaggagaaccagcgcctcagggagcacaaggctgttgctgatttctcaacattccctagctgcgtcgatttcctgaaagcattcttgacgcagaagctggaaccagtaatgcagattgtgccccagccggagccgaagcagcagctgcgacgaactacttcggcctctttctaa

SEQ ID NO: 11559 - DNA, 2169 bp, Oryza sativa
  Clone ID: TFbOSC403595j.C1.o10.fg
atgccaaggacagataatgctgcttctgccaattcagttgaaccagacaaatcagaagaatgtttggagtttgatgatgaagaggaggaggtagaagaggaggaaattgaatatgaagaaatcgaggaggagatagaagaggaggaggaggtagaggaggatgaagatgtcgtggaggaagttgaggaggtagatgaggaggaagatgaggaggaagatgaggaatctgatgaaactgaaggtgtaagtaaaactaaaggtgttcaccagaaggatgttactgaaaagggaaagcatgctgagcttcttgctcttcctccccatggttctgaagtatatgttggaggcatctccagtgatgtatcttctgaagatctgaagagactatgtgaaccagttggagaagttgtggaagtaagaatgatgagaggaaaggacgatagcaggggatatgcttttgttaattttagaactaaaggtttggcattaaaggttgtcaaagaattgaacaatgcaaaactgaagggaaagcggataagggtttcttcctcgcaggctaagaacaagctttttattggaaatgtaccccatagttggacagatgatgatttcagaaaggctgtggaggaagttggtccaggagtattaaaagctgatctcatgaaggtctcaagtgcaaatcgcaatcggggttatggttttgttgaatactacaaccatgcatgtgcagagtatgcaaggcaggagatgtcttccccaacattcaaactagattcaaatgctcctacagtcagctgggcagatcctaagaataacgactcggtctctacttctcaggttaaatctgtatatgtgaaaaatctgcccaagaatgttactcaagcacagctgaaaagactgtttgagcaccatggagaaattgaaaaggttgttcttcctccttcaagaggaggtcatgataataggtatggttttgttcactttaaggacaggtccatggccatgagggctctgcagaacacagagagatatgagcttgatggtcaggtcctggattgctcacttgcgaaacctcctgctgctgataagaaggatgatagagtaccactacctagttcaaatggagctccattgctcccgagttatcctccacttggatatggtatcatgtcagtaccaggtgcctatggtgctgctcctgctagtactgcacagcctatgctgtatgctccaagagctcctccaggggcagcaatggttccaatgatgttaccggatggtcgtctcgtatatgttgtacaacagcctggtggacagttgccgctggcttcgccgccgccgcagcaagctggacatcgtagcggcagtggaggacgtcatggcggcagtggcagccgctatggcggtggtggtggcagctccggcagtagcaggcccgaagaattcgtttctgaaacaagactgtacatgcgtatttaccagtattttccaatatcgcagattgctgaatctgaagaggcactgtaccgtcaattcacctctgtaagccacatggagtatgagatttctgggcaagaatctgaggtagacagtgaggtgtggcttggctgggtggcgcagcgacagactccaaccagccttgatgatttcctgccaagcatcaggacaacacgcacacacactcatacttgcaacccgcctggtccatcggcaacagcgcacacgcatacatgctaccacacccacacccatgtcttcagctcagatgatgatagttgtggaggtgacaaagccaagccaaagaagggccgcaagccattgggcaaccgtgaggctgtccgcaaataccggcagaagaagaaggctcatacagcacacttggaagaggaagtgaagaggcttcgtgccattaaccagcagctggtgaagaggctgcaagggcaggctgcacttgaggcggaggtggtatggttgaggtcgttactggtggatgtgcgatcaaggatcaatggtgcattgggtagttacccgttccaagcacaatgtggagttaataatgttttgggttgtgatggaatggctcagtgctttgctggaaagccggagttgggtgagagacggatttgtacaccttctgtaatgaattgccatatcagcccggattcctag

SEQ ID NO: 11560 - DNA, 1281 bp, Oryza sativa
  Clone ID: TFbOSC400780j.C1.o52.fg
atgaacggtggcattggcgacgcgctgatgcagccgcagcacgtgcaggtcatgtcgtcgtcgttgccgatggtggcgtcgacgttcgtggcggagccggcggcggcggccaacaagccgagggccgcggggctgccgcccacgccgccgcaggtgttcgccgcccagcgcgcggcggcggcggcgggcggcgacgtgtgcatggaggagtcggcgcaggggggtggtggcgggctgccgccgcgcaaggcgcaccgccgctccagcagcgacgtgccgttcgggtacctggccgggcagcaccagctcctgccgcccaaggtggaggccgggtggggccacctcggcgccggcgccggcggcgcggcggccgccgatgacctgttcaacgcgtacctgaacctggaggggctggacgggctcaactcctccgacgaccgccacgacgaaggggacagccgcgggagcagcatcaagaccaacggcgccgacagcagcgagaacgagtcggaggagtgcgccgacgacacccgcggcgggatccgcctctggtccgccgacggcggcgagaggagggagggcgtcaagaggaacgccgcgggggagccggccaccgcgccgctggcccgtcacgccaggagcctctccatggacagcctcatcgggaagttcaacttcacggcggggacggcggcggctgcggggaacggtgtcgcgttggggccgaacaggttcagcctggaattcggcagcggcgagttcaccccctccgagatgaagaagatcatggccgacgagaagctggccgagatggcgctcgccgacccaaagcgcgtcaagagggtgctggcgaacaggcagtcggcggcgaggtccaaggagaggaagatgaggtacattgcggagctggagcagaaggtgcagatcctgcagtcggaggcgaccaatctgtccgcgcagctcacgatgatgcagcgcgactcggcggggctcgcgacgcagaacaacgagctcaagttcaggctgcatgccatggagcagcaggcgcagctgcgcgacgcgctgaatgaggccctgacaaccgaagtccaacgcctaaaactcgccaccgctgagctcggcgattcttgctcgtccagcagtctagctcagcagatccaactcaatgctcagaatcagatgtttcaactgcagcagcagcaggctacgcagataccattctatcaactgcagcagtcacaacagaacggtgcagcgaagaacaatgaatcaaaagaatga

SEQ ID NO: 11561 - DNA, 1173 bp, Oryza sativa
  Clone ID: TFbOSC417322j.C1.o2.fg
atgggtagcagtggcgcagacgcaccgactaagacaagcaaggcatctgcacctcaggagcaacagccacctgctagttcaagcactgcaacaccggctgtttacccagattgggccaactttcagggatatcctccaattccaccacatggcttctttccatcacctgtggcgtcaagcccacagggtcatccttacatgtggggagctcagcctatgataccaccatatggaaccccaccaccaccatatgtcatgtatcctccaggagtatatgctcacccatctatgcctccgggcgcacacccatttactccatatgccatggcctctccaaatggcaatgctgatcctactggaactacaactactgctgctgctgctgctgctggtgagacggatggcaaatcctctgaaggaaaagaaaaaagtcccattaaaagatctaaaggaagtttaggtagcttgaatatgattacagggaagaactctactgaacatggtaaaacctctggggcatcagctaatggagccatttctcaaagtggggaaagtggaagtgaaagttctagtgaaggaagtgaagcaaattctcagaatgattcacatcacaaggaaagtggacaagagcaagatggagaggttcgaagttcccagaatggtgtatcacgttcaccatcccaggcaaagttgaatcaaactatggcaatcatgccaatgacatcaagtggtccagtacctgctccaactacaaacttgaacataggaatggactactgggccaacacagctagctccactccagcaatacatggtaaagcaaccccaactgcagctccagggtctatggttccaggagagcagtgggtgcaggatgaacgggaactcaaaaggcagagaagaaaacaatccaacagggagtctgctcgcagatctaggttgcgtaagcaggctgaatgtgaggagttggctcaacgtgctgaagttttaaagcaagaaaatacttcacttagagatgaagtgaaccggatcagaaaggagtatgatgagcttctatcaaagaatagctcattaaaggaaaaacttgaggacaaacaacacaaaactgatgaggcaggagttgacaataagctgcaacattctggtgatgacagccagaaaaaaggaaactaa

SEQ ID NO: 11562 - DNA, 825 bp, Oryza sativa
  Clone ID: TFbOSC400189j.C1.o8.fg
atggcgtcgtcgagggtgatggcggcggcggcggcgtcgtcgtcgtcgtcgcccccgcccccgcccccggcggcggccgcggccggcggggccgccgatctcgcgcggttcaggagcaccagcagcggcatcggatccatgaacatggacgacatcctccgcaacatatacggcgaggccgcgccgccgcctggggccgccggctcggccccggccccgcccccggcgggggaggcggcgggggcccccgtggcggaggtcgccgcgcggcggacggcggaggaggtgtggaaggagatctcgtcctcgggagggctatctgctcccgctccagctcccgcggccggcgctgcgggtaggggtggcgggcctgagatgacgctggaggatttcctggctagggaggatgaccctagggcaacggccgtggaggggaatatggttgtggggttccctaatgtaacggagggtgtgggtacagcaggaggaggaagaggcggcggcggcggcgggagggggaggaagcggacgctgatggatccagctgaccgcgcagcgatgcagcggcagaagcgaatgatcaagaaccgcgaatctgcggcgaggtccagggagaggaaacaggcgtatatcgcagagctggaggctcaggtcgcggagcttgaggaagaacatgcacagctgttaagagaacaggaggagaaaaatcaaaagaggcttaaggagaaatggcacgtgtttatgcagatcaaggaacaagccgttgcagttgtcataaggaaaaaaacacaagatctacgaagaaccaactcaatggaatggtag

SEQ ID NO: 11563 - DNA, 492 bp, Oryza sativa
  Clone ID: TFbOSC400993j.C1.o66.fg
atggcttctggtgaaaacaatgttgaagaggagctgagaaagacccgtaagcctctgggaaatagagaagcagtgcgcaagtaccgagagaagaagaaagcgcatgcagctttcttggaggaggaagtcaagaaacttcgcaccacaaatcagcagctcttgaggagattgcaggggcatatatcactcgaggctgaggtggtgaggttaagagcccttttgtttgatatccgaggcaagattgatgcagagattggtactttcccctttcagaagcagtgcagttttggttctgttacttgtacagaccattctccgtgctttaacactagcactgaggtagcagtccgggaagagagctctagaccaacaattgtggattgcgggattgatggaactggcattatttcgcacgagcttgatattcccaaaatggtgaattcagtggatgtcattccaagctttgtgaattctgcctcattgactgaatga

SEQ ID NO: 11564 - DNA, 1890 bp, Oryza sativa
  Clone ID: TFbOSC414158j.C1.o8.gm
atggaggatggaaccgaagatgctggcgctgccggctgccgctgcggaatcccagaaagaaaatggagagggggcctcctcagcctcaccgcccggcagaaaagcctcttcagcctccgccacgcaacaattaaatacgtgcactcctccgctcgaaaccgcgtcgatcgtgctcgtccgtgcgcgcagcaaaacgccaccaccaccaccaccgcatccccaacacctcacctcacctccttacaccataggcgtgcgtgcgtgatgaacaccacgtccgcgaacgagctgatgatgcaccgccacgtccaggccgcgccctacgcggcggcgccgcagcagcaaggaggcaagcagcgtgcgccggggctgccaccgacgcctccacctccacctgcggcggcgagctcccactcctctcacggcgacgtgtgcatggacgacacggcgcgcggcgggctgctgccgccgcgcaaggcgcaccggaggtcacgcagcgacgtgccgttcgggtacttccagccgctgccaccgccgtcgcccaagatggaggccggcggcggctgggcactccccgggtgcggcggcgccggcgacgtcgacctgctcaatgcgtacatgagcttggagggaatgggcggcgccgacgggctgaacaactccgacggggacagccgcgggagcagcatgcggacgaacggcgccgacagcagcgagaacgagtccgaggactacgtcggcgccgacagccaggccctcctctggggcggcgccggcggcggcgaggctgcgggcaagaagagacggaataacgctgccggcgagaaggcggcccggcacgcgaggagcctttccatggacagcctcatggggaagctcagcttcgccgccaatggtgagccggccaagttcagcctggagttcggcagcggcgagttcacccccgccgagatgaagcggatcatggccgacgagaagctcgccgagatggcactcgccgacccaaagcgctcggcggcgaggtccaaggagcggcggatgcggtacattgcagagctggagcagaaagtgcagatcctgcagacggaggccacaaccctctccgctcagctgactcttttgcagcgcgactcgtcgggaatggccacgcagaacaacgagctcaagttcaggctgcagtccatggagcagcaggcgcagctacgcgatgcattgaacgaggcactgacagctgaggtgcagcgcctgaaactcgcggcgaatgaggtctgcgacacgagctcgtccagcaacctagcacaccaaatccagctccgctgtcagaaccagatgcttgatctgcacaagcagcagcagcagcagagcccggcgccgccgtcgccgtcgccgtcgctgctactaaatctgctcgccgccacggtgccgccgcttgatgaccgggccgacaacgacgagaaggcggtgctggctcctacgctctcctgcgcggatctggtgcggggggatggatcccgagccgccgccggcggtgatgcgcgtggaggcggcggaggcggcagggtggccggatccagccccctcctgtccggatccggcgcgggaggccaagctccggccccaggcagcgaggcggcgggggcgcgcggtgctgggcggcggtggcggaaggcggcggggacggagctggccgagggcgcggcggcggcggcggcggcagtgccacccagatccgcgcctctcggccggatctggagggtggcggcagttggcaacggcggcggtggtgtggcgacgatggtggcgacagttggccggcggcaggtggcgatggcggtctcggccggatctggacgccggcagcagttggcgacgacaaccgtggtgtggtga

SEQ ID NO: 11565 - DNA, 441 bp, Oryza sativa
  Clone ID: TFbOSC412577j.C1.o14.fg
atggagcgagcggctggtactggtagcggcggcgacgatgacgagctcgtgctgccgccggcgtcgtttcaggacgggcttccgtcgtcccgctcctacccctcctgcatcggcggcggtagcgcagcggcggcgtcggcgtcgctggagcgggagctgctgtaccgcgcggagctgcaccagcaacagctgggcggcggcggcggcgtagagcggcggaagaggcgcgcgatgaagaaccgcgagtcggcggagcggtcgcgcgcgcggaagcaggcgtacctgcaggagctcgagcaggaggtccgcctcctccgcgccgagaacgccgccctgcgccaccagtgccaccagctgaaggccgccgcggcggaggcggaggcggaggcggcggcagcggcggcggcggcgaagaagccgacgtcgtcggcgacgttctga

SEQ ID NO: 11566 - DNA, 975 bp, Oryza sativa
  Clone ID: TFbOSC18922j.C1.o1.fg
atggcgcagctgccgcccaagatcccaaccatggcgacagcttggccggagttcgggggcgggcaccatcaccatgctgcccacggccaccatcaccagcgcagcccctccatgggggcgttcctcgcggcgccattgccgcccttcccgctcccgccgccggcgccggcgaacggcggggcgcagcagcagcagcagcagcagcagcatcagccgtcctgggtcgacgagttcctcgacttctcggcgaccaagcgcggcgcgcaccgtcgctctgtgagcgactccgtggccttcctcgaccccgtttccgacgacaatgccggcgtcggggcgcacgacttcgaccgcctcgacgacgaccagctcatgtccatgttctccgacgacctgcagccgcctccaccgcagcaacagcctgccgcgcccgcggcgagcgcgtcgtcgccgtcggaccacaacagcatgaatgacgagaagcaagacaagggcgagacagatgaggcgcagagcgagtgcgacggcgccacgcccgggcagccggcctcccccgccaccgtcgatcccaagcgcgtcaagaggatcttggcgaaccggcagtccgcgcagcggtcgcgcgtgcggaagctgcagtacatctcggagctggagcgcagcgtcacgtcgctccagacggaggtgtcggcgttgtcaccgcgcgtcgcgttcctcgaccaccagcgctcgctgctgacgctgggcaacagccacctcaagcagcgcatcgccgccctcgcgcaggacaagatcttcaaagatgctcatcaggaggcactgaagaaggagatagagaggctgcggcaaatctaccaccagcaaagcctcaagaacgcggaatcccaaccggcggacgcggccccggtccgcggccgcgacaatgccgacctgatcggcagcgagggggccgccgcggccgcgccatgcccgcactcgtga

SEQ ID NO: 11567 - DNA, 1839 bp, Oryza sativa
  Clone ID: TFbOSC400710j.C1.o6.fg
atggatctgaaggatggcggggggtcggagaggaggggggcggcggcgggtgcgggtgcgggtgcggcgccgctggcgaggcaggggtcgatctactcactgacgttcgacgagttccagagcacgctgggagggatggggggagggctcgggaaggatttcgggtcgatgaacatggacgagctgctgcggagcatctggacggcggaggagagccaagcgatggcgtcggcgtcggcggcggcggcggcggcggaggggggcctgcagaggcaggggtcgctcaccctgccgcgcactctcagcgtcaagacggtggacgaggtgtggcgggacttagagcgagaggcgtcgccgggggcggctgctgctgacggcggcggcggcggcggggagcagcagcagcccaggcggcagccgacgctcggggagatgacgctggaggagttcctggtcagggccggggtcgtcagagagaataccgctgcggcggctgctatggtagctgcggccgccgctccgccggtggctccgcggtcgattccggctgtcaacaacagctccatcttcttcgggaactacggaggcgtcaatgatgctgctgctgccgctgctggtgcgatgggtttctcaccggtggggattggggatccgaccatggggaataggctgatgtccggagtggcagggattgggggtggtgcgatcactgttgctccggtggatacatcagttggacaaatggattcagcgggcaagggggatggggacctgtcatcaccgatggcgccggtgccgtacccctttgagggggtgataagggggaggaggagcggtggtaacgtggagaaggtggtggagcggcggcagaggaggatgatcaagaacagggagtcagcagctagatctcgtgcccggaagcaggcttacacaatggagttggaagctgaagttcagaaactcaaggaacagaacatggaattgcagaagaaacaggaggaaattatggaaatgcagaaaaatttcttcccagaaatgcagaaaaatcagaaattattctctgttggtagggatggggtgcactatagtgcaactaaatgtactaaatacacaatatcaactgaaaaggtaatgattactctgattcatggcaagcaggtattagaggcggtcaacaatccttacggacaaaagaagcgttgcctaagaagaacattgacaggtccctgtttttggtttgactcagaaggatgtatcatgtcagaggagtttatgcccaaaatgatcaacatgggatcacacctgacaaggaaaaacaaaccagaccaatcagatactacagttgagttccatccacgccccgatgttcttctacaaggagctggagaaggtttggtgtttttgcttggaggccaggttaactgcattggtctacaggacagcaccgaatcaagaccagaaaatgacactgttctagtgcagatccaaggaccagccacagttagttcaggcagtgtcactgtccaagcggggccaaattgccgggccaaggaggagcccatccgggacacgaaccactggcgccaacaccccggtgttccctacgcaccgggacatggcgagcccacgccatctctgctcgggctgcgagacacccagcactgtccatttcatggacaatttcagaagcaattcttccctccccggtcatcttccgggaaccagagaagaccgatggctgatctgtcgcctgattggggcagatttggtctggattgggattgtggagtaaccagcgccagaacttttggcaatgatcgagatggaacagcattttga

SEQ ID NO: 11568 - DNA, 1272 bp, Oryza sativa
  Clone ID: TFbOSC401035j.C1.o16.fg
atgcagctgaaatgttcagaaaggttggtcagcctgaaagcttcagtgcttcacacggttgatgatacaatgtggctgaaactccacagaagaaggaaccctgaaggatatgacatgccatctgatttggatcaagctctcctcctctactttgatggccaggaacaagataagccatctactcaagaagaaccccacaaaccacttaattttgtaaaagagactctcaacatcttcccctcccagccaatggatggagagccaactccaacaccaaagaaagaaggtggcagtggcagcggcggcgccatggcagcgtcagcaagttcagagctcaaggggcccaagacgccggaccccaaaacgctgagaaggctggcgcagaatagagaggccgcaagaaagagcaggctaaggaagaaggcttacattcagcagctagagacaggcaggatcaggctggcgcatcttgaacaggagatacaattcacaagagctcagggtgcattctgcggtgctggaattctaagcccagacgctgcattgttcaacttggagtatgagcggtggcaggaggcacaccaccaagtgatcagccggctccgggccgctgtggaggagcaccgaccggatggcgagctgcagccccatgtcgatgaagccatgtcacactatggggtgctgatggctcacaaggctaggctggttggtgctgaccccctccacctcctctccggcctgtggaagggcgccgtagagcaatgcttcctctggataggcggcttccgcccctcggagcttatcaaggttgtggtccggcatgtggagcccctgacggagcagcagctcgccgccgtctacagcgcgcagcaggcggcgaggcaggaggaggacgcgctcgacggcggcctgcaggcgctgctccggtcgctctccgacgtcgtctcctcctcggacgcgccgtcgtcgtcgcagcagacgccgccggtgatgtaccacccctccgccgccgccgccatggctgcggcgagcttcatggggcagtacggcagctacagcaacctgcagctcgccatggacaagctcgccaacctcgccatcttcctacgacaggcggatgaggagaggatgcggacgctgcacgcgctgcggcggatgctgacggtgaggcaggcggcgcgctgcttcgtcgccgtcgacgactacttcggccgcctccgcgcgctcgccttgttctggaccaccacccggccgcacccggccgccggctag

SEQ ID NO: 11569 - DNA, 587 bp, Oryza sativa
  Clone ID: TFbOSC5587j.C1.o1.fg
agactctcaacatcttcccctcccagccaatggatggagagccaactccaacaccaaagaaagaaggtggcagtggcagcggcggcgccatggcagcgtcagcaagttcagagctcaaggggcccaagacgccggaccccaaaacgctgagaaggctggcgcagaatagagaggccgcaagaaagagcaggctaaggaagaaggcttacattcagcagctagagacaggcaggatcaggctggcgcatcttgaacaggagatacaattcacaagagctcagggtgcattctgcggtgctggaattctaagcccagacgctgcattgttcaacttggagtatgagcggtggcaggaggcacaccaccaagtgatcagccggctccgggccgctgtggaggagcaccgaccggatggcgagctgcagccccatgtcgatgaagccatgtcacactatggggtgctgatggctcacaaggctaggctggttggtgctgaccccctccacctcctctccggcctgtggaagggcgccgtagagcaatgcttcctctggataggcggcttccgcccctcggagcttatcaag

SEQ ID NO: 11570 - DNA, 1065 bp, Oryza sativa
  Clone ID: TFbOSC900100j.C1.o15.fg
atgaacagggagaaatccccgatcccgggagacggcggcgacgggttgccgccgcaggccacccgccgggcgggccctccggcggcggcggcggcggcggagtacgacatcagccgcatgccggatttcccgacgaggaaccccggccacaggcgcgcccactccgagatcctgagcctccccgaggacctcgacctgtgcgcggccggcggcggcgacgggccgtcgctgtcggacgagaacgacgaggagctcttctccatgttcctcgacgtggagaagctgaacagcacgtgcggggcgtcgtcggaggcggaggcggagtcgtcgtccgccggcgccgcggcggcggtggcggcggctgaggagctcgtcggggcgtcgcccgggacggaggggatgtcgtcggcggaggccaagaaggccgtgtccgcggccaagctcgccgagcttgctctcgtcgatcccaagagggcgaaaaggatttgggctaacagacaatctgcggcaagatcaaaggaaaggaaaatgcgatatattgctgaacttgagcgcaaggtgcaaaccctgcaaacagaagcaacaacactgtcagcccagttggcactgctacagagagataccagtgggctaactactgagaatagtgaactgaagctacgtctgcagaccatggagcagcaagtccacttgcaagatgctttgaatgacaccctgaagtctgaggttcagcggcttaaggttgcaaccggtcaaatggcgaatggtggagggatgatgatgaacttcggtggcatgccacaccaattcggaggcaaccagcagatgttccagaacaaccaggccatgcaatctatgctggcagcacaccagctgcaacagctccagcttcatcctcaggctcagcagcagcaggtgctgcaccctcagcatcagcagcagcagccattgcaccctctacaagcgcagcagctccagcaggcggcacgagacctcaagatgaaatcgccgatgggcggccagagccagtggggagatggcaagtcaggaagcagcggcaactga

SEQ ID NO: 11571 - DNA, 906 bp, Oryza sativa
  Clone ID: TFbOSC900383j.C1.o7.fg
atgaagcgcggcggcgccggtgtcggcggcggcggcggcggcggcgatccgggcgcctacgcggcggtgctgaagacgaagctcgacctgtactgcgcggccgtggctaaatcgatggaagctaaactgcaagaatcttctttgggctacctcaatttacaagcctcagacacttcacaattggtttctcaagattcttttaatggctatggatcaaccagagtaacaaactcaaatgccatacatgaagatgacgatcaaggtaaaccagctaatagtggtacatcaaaggaacagtcagatgatgatggcgatcttgaggaagatacggaccccgttaatgcaaagcggacaaggagaatgctgtcaaatcgggaatcagccaggaggtcaagaaaaaggaagcaagctcacctaaacgatctagaatcacaggtttcccagttaagatctgagaatgcatctctgcaaaagcgcttgtctgacatgactcagaaatataagcaatctaccacagaatatggcaatcttcaagatgacatgaacgctatgaggagaaaggtgaatatagctgaagaagcggtgaggagagtaactggaataggacttcaattgttcactacatctgaaatgcctgcaagcagcatgcccgtttcttcaggtgtatcagacgcagcttctgctgctgctgctgctgctctcgtcgaagacgactggacaaactgtagcctcccagatgaagcaattcctgtgccaagtgcagcaatggccttgaggtcaccgtccgtgcggcgtgtcgcaagcttggagaacctgcagaagagaatccatgctggagatgtgacacattttgaggcagcatcagccttgtcattgcctgaagctactgcctgtgataataagtag

SEQ ID NO: 11572 - DNA, 849 bp, Oryza sativa
  Clone ID: TFbOSC3436j.C1.o5.gm
atgggcggatgtgaggttaatttggagcgtcacgggctagttccggtcgggactggttcggggcgtgacaccctgtgtgacgtctcgtccttcacggttcgactacatcggcttttcggcgtcatcttcctcaacgactgccgtgattgtgtcaccgtcttcgtctccagtgcatcctcgcgcaccttgcttcctgacttcggctacaacgaccacggctactctacacacggcttcatcaactacggctcccttgcacccttcgctttggctacattgactacgcaacgcgcaggaaatcatctgtttaagtatggtgacctcatggtcaccgtcaccgaggcaacgtatggtgacctcatggtcaccgtcaccgaggcaacggctacaagcaagaaggtgcaggtgcagggtgcggccatggcgaactaccaccaccaggagtactaccagatggcggcggcggcggcggtggcgtggccgagggagccggacagcccgcagctgagcatcatgagcggctgcagctccctcttctccatctccaccctgagggacgacgacgacggcggcggcgtccgcctcgccggcgccgcgctgcccgccacgccggtgtcgctcgccgggatcgccggcggcgccagtacccccggcggcgacgaggtggacatggaggtgcggcagcagagcggcggcagcggcgacgaccggaggaccatccggatgatgaggaaccgggagtccgcgcttcgctccagggcgcgcaagagggcgtacgttgaagagctagagaaagaggttcgccggctggtggatgacaacttgaatctcaagaagcagtgcaaagag

SEQ ID NO: 11573 - DNA, 1230 bp, Oryza sativa
  Clone ID: TFbOSC402805j.C1.o29.fg
atggcttcgcatgctggaggtagtggcggcggcggcggtggaagtggccgggatgctggctcggcgcagcgcgggccgatgcaggggttggcgaggcaagggtcgctgtatgggcttacactcaatgaggttcagagccagttgggggagccgttgcttagtatgaaccttgatgagctgcttaaaagcgtgtttcctgatggcgcggaccttgacggtggcggtggcggtggcggcatcgcgggccagtctcagccggccctggggctgcagcgccaggggagcatcacgatgcctccggagctgagcaagaagacggtggatgaggtgtggaagggcatccaggatgtgccgaagaggggtgctgaggagggtggccggtggaggcgggagaggcagccgaccctgggggagatgacgcttgaggatttcctggtcaaagctggggttgtcacggatccgaacgatttgccaggaaacatggatgtggtagggggcgctgctgcggctgcagctggtacgtctgatttgaatgccggagcacagtggctacagcagtatcaccagcaggctttggagccccagcatccaagcataggtgctccttacatggcaactcacctggcacctcagccattagctgttgctacaggtgctgttttggatccaatttactccgatggccagatcacttcgccaatgctcggggctctttctgatcctcagacacctgggcgcaaacgctgtgccacaggggagattgcagataagctagtagaaagaaggcagaagaggatgataaaaaacagggaatcagctgccaggtcaagagcgaggaagcaggcttacactaatgagcttgaaaacaaagttcttcgtctagaagaggagaatgagaggctaaagaagcagaagcctacattcatactgtccagcaaagtgagccgcaagcaggtcaccaaagccatgagatctgccaccatttgtgtcctctgcatttgcattctcatgatcctgcaatgctttgccagcatcagtgcagtggatcttggcgatgctgcagcttcagcgtcagggggagaaggcctgatccggccgaggaagctgctgcagaatgcgccggcggcgaggtcaccgccgtcgcgctccgccgccgccgtggaggtcgaggtcaatgcgagcctggggaagcagaagccgtcgagcaagtcgaatcccaggcagaattag

SEQ ID NO: 11574 - DNA, 1278 bp, Oryza sativa
  Clone ID: TFbOSC419671j.C1.o6.fg
atggagcgggtgttctccgtggaggagatctccgacccattctgggtcccgcctccgccgccgcagtcggcggcggcggcccagcagcagggcggcggcggcgtggcttcgggaggtggtggtggtgtagcggggggcggcggcggcgggaacgcgatgaaccggtgcccgtcggagtggtacttccagaagtttctggaggaggcggtgctcgatagccccgtcccgaaccctagcccgagggccgaagcgggagggatcaggggcgcaggaggggtggtgccggtcgatgttaagcagccgcagctctcggcggcggcggcggcggcggcgacgacgagcgcggtggtggaccccgtggagtacaacgcgatgctgaagcagaagctggagaaggacctcgccgcggtcgccatgtggagggcctctggcacagttccacctgagcgtcctggagctggttcatccttgctgaatgcagatgtttcacacataggcgctcctaattccatcggaggcaatgctactccagttcaaaacatgctaagtggcccaagtgggggatcgggctcacagttggtacagaatgttgatgtccttgtaaagcagcccaccagctcttcatcaagggagcagtcagatgatgatgacatggagggagaagctgagaccactggaactgcaagacctgctgatcaaagattacaacgaaggaagcaatccaatcgggagtcagccaggcgctcaagaagcagaaaggcagctcacttgaatgagctggaggcacaggtatcgcaattaagagtcgagaactcctcgctgttaaggcgtcttgctgatgttaaccagaagtacaatgatgctgctgttgacaatagagtgctaaaagcagatgttgagaccttgagagcaaaggtgaagatggcagaggactcggtgaagcgggtgacaggcatgaacgcgttgtttcccgccgcttctgatatgtcatccctcagcatgccattcaacagctccccatctgaagcaacgtcagacgctgctgttcccatccaagatgacccgaacaattacttcgctactaacaacgacatcggaggtaacaacaactacatgcccgacataccttcttcggctcaggaggacgaggacttcgtcaatggcgctctggctgccggcaagattggccggacagcctcgctgcagcgggtggcgagcctggagcatctccagaagaggatgtgcggtgggccggcttcgtctgggtcgacgtcctga

SEQ ID NO: 11575 - DNA, 1386 bp, Oryza sativa
  Clone ID: TFbOSC400878j.C1.o1.fg
atggagcacgtgttcgccgtcgacgagatccccgacccgctgtgggctccgccgccgccggtgcagccggcggcggccgccggagtagatgacgtcggcgcggtgagcggcggcgggttgctggagcggtgcccgtcggggtggaacctcgagaggtttctggaggagctcgacggcgtccctgcaccggcggcgagcccggacggcgcggcgatttaccctagcccgatgccggcggcggcggcggaggcggcggcgcgctggagtaggggctacggcgatcgtgaggcggtgggggtgatgcccatgcccgcggccgcgcttccggcggcgccggcgagcgcggcgatggaccccgtggagtacaacgcgatgctgaagcggaagctggacgaggacctcgccaccgtcgccatgtggagggaattattaggtcacatacccttggaagatgaaattattttagtagaaaaaaagaaactgttatattggaatctggcctctggtgcaatacattctgagagtcctctaggcaataaaacatcactgagtatagttggttccatcctgagttcacagaagtgcattgaaggtaacgggatactagtgcagaccaagttaagtcctggcccaaatggaggatcaggcccatatgtaaatcaaaatacagatgctcatgccaagcaagctacgagtggttcctcaagggagccatcaccatcagaggatgatgatatggaaggagatgcagaggcaatgggaaatatgatccttgatgaagaagataaagtgaagaaaaggaaggaatccaaccgggagtcagctagacgctcaagaagcagaaaggcagctcgcctaaaagacctggaggagcaggtatcactattaagggttgaaaactcttctctgttgaggcgtcttgctgatgcaaatcagaagtacagtgctgctgctattgacaatagggtactaatggcagacattgaagccctaagagcaaaggtgaggatggcagaggagagtgtgaagatggttacaggggctagacaacttcaccaggccattcctgacatgcaatctcccctcaatgtcaactctgatgcttctgtgccgatccagaacaacaacccaatgaactacttctccaacgctaacaatgccggtgttaacagcttcatgcaccaggtttctccagcgttccagattgtggattctgtcgagaagattgacccaacagatccagtgcagctgcagcagcaacagatggcgagcttgcagcatcttcagaatagagcttgtggtggcggcgcaagttcgaatgaatatacagcatggggatcgtctctgatggatgcaaatgagcttgtcaacatggagcttcagtag

SEQ ID NO: 11576 - DNA, 513 bp, Oryza sativa
  Clone ID: TFbOSC900418j.C1.o13.fg
atgcagcatgatgccatatccaacattgcataccatcctagcatggatttcacaagctttttcctgccgcaaaccgacgcttactcgcatgatctcagtgcattgctggacatggctgtggttgatccatacatcagctgcaatggcagcagcatcaccatgattccagtgactgaagatgaagcaaatgctcagccgatgaaccatggcaatgacgagaggaagaagagaaggctggtgtcaaaccgtgagtctgcaaggaggtcccgggtgaggaagcagaggcgcctggatgagctctcatctcaggtttcagagcttcgagacaccaaccagaggcttcttgttgagctgaatcacatgatctccaagcatgctcgcattgtcagggagaattcccagctcagagaagaagcttctgacctgcagagaaagctcagtgagatgaaaatggaagatgctgaagtagctgctgctgctgctgcagcaccacgaacattagaagtagcttaa

SEQ ID NO: 11577 - DNA, 793 bp, Oryza sativa
  Clone ID: TFbOSC400070j.C1.o5.np
aggaggccgcggcggcggtgaggagcctggagtgggaggtgctcctggccacgaacagcctcgggagcctcgtggttgacggcgccgactacgacggtggaatcgacacgttcttcctcgacgacgccgacgacgtgctgttcgggcagctcgccgcggagcacgagccccccgccgccaagggcgcgcgcgcggcggcgaaggccgccgtggagagcctcccgaccgtggtcgtcgacgcggcccgcggcgacacgcagtgcgcggtgtgcaaggacggcatggaggccggcgagcgggccaggaggctgccctgcgcgcacctctaccacgacggctgcatcctgccgtggctcgccatccgcaacacgtgcccgctgtgccgccatgagctgcccaccgatgaccccgagtacgagaactggaaggcgaggcgagcagccgccggcggcaatggcgatggcgacaggtacggcatcattaggcaatcttgcagaagagcgcaggaggagaaggatgatatccaacagggaatctgcccgacgatcacggatgaggaagcagaaacagctaagtgagctctgggcacaggttgtccacctccgcagcactaatcgtcagctccttgatcagctgaaccatgtcatcagggattgcgatcgtgttacccacgaaaactgccagctgagagatgaacaagccaaactgcagaagcagtattttttaggttggcacaggcattaaggaagtaggtggaaatgatgaatgttgtgattggtagagaagagaaagt

SEQ ID NO: 11578 - DNA, 900 bp, Oryza sativa
  Clone ID: TFbOSC421842j.C1.o10.fg
atgaagaagtgcccgtcggagctgaacttcgaggcgttcttccacggcgagaggggggaggacgacgccgacgccgccgccgaccagaagcccggcggcggcccgcacccgccgccgttcgccatgttctccgccgccgacctctccagcttcggcttcgcggactcggtgacgcagagcaccatcactggggtcattcccaatcacatatggccccagtcccagagcctcaacgcacggcatcctgcagtctacacaattgagtcgcaatcatcaatctgtgcagcagcaagtcccacgtcagctaccactctgaacatgaaggagagccaaactctgggaggcacaagtggttcagattctgacagtgagtcgctgttggatatagagggcggtccatgcgaacaaagcacaaacccactggacgttaagagaatgagaaggatggtttccaaccgggagtctgctcgtcgatcaaggaagagaaagcaagctcacttagctgatctcgagacgcaggttgaccagctccggggcgaaaacgcatcgcttttcaagcagttgacagatgccaatcagcaattcacgacggcggtcacggacaacagaatcctcaaatcagacgtggaggccctccgggtcaaggtgaagatggcggaggacatggtggcgcggggggcgctgtcgtgcggcctcggccacctgggcgggctgtcgccggcgctgaacccccggcagggggcgtgccgcgtccccgacgtgctcaccgggctggactacgccggcgacgaccccttcaccgggctgtccccgccggagcaggtgcagatgcccggcggtggcgaggtgggtgacgcctggggctgggacaaccactccaatggcgccatgtccaagtga

SEQ ID NO: 11579 - DNA, 525 bp, Oryza sativa
  Clone ID: TFbOSC401561j.C1.o22.fg
atggcgtaccaatcgttcggcgcggtggacttggcggcgagcttcttcttctcctcctcctcctcctcgccgcagcctggattggtcggtgtccatggcgatcggttcttgggcggcggcggcggcgacggcggcgacggcgggagcagctacgacggcggcggcgatggaggggcggcgagcgggaaggggacgaggcgcgacgagaggaaggagaggcggctggcgtcgaaccgcgagtcggcgcggcggtcgcgggtgcggcggcggcggcagctggacgagctgtcgtcgcacgtcgccgagctccgcgccgccaaccaccggctcgccgtggagctgaaccgcgcggcggcgaggcacgcgcagatggcgcgggagaacgcgcggctcgccgaggaggcacgcgcgctccgggagaggctgcccctccgcggcggcggcggcggcggcggcgacggcgaggcggaggaggaagcgggaggaggctgcggcgcggaggcaattttggcgccaatggattaa

SEQ ID NO: 11580 - DNA, 819 bp, Oryza sativa
  Clone ID: TFbOSC3427j.C1.o1.fg
gcagctgctccatggaacagctatttcgacgacatcctcaaggatacggagcaccatgcatgcacccacacccacacctgcaacccgcctgtgcatgacctctcacacacccacacctgcgtccatgtccacaccaagatcgtctccgccccatccgacactccgtcggatgctgccgagaccgccgagtccccgacggagaacaatgcctccaagaagcggccgtcgggtaaccgtgccgctgtgaggaagtacagggagaagaagaaagctcacactgcctcgctggaggaggaggttgttcatttgagggctctaaaccagcagctcatgaagaagctccagaaccatgccacgctcgaggcagaggtatccaggctgcggtgcctgctcgttgatattagaggaaggattgaaggggagattggggcttttccttatcagaggccagtgaagaacatcgatttggtttctagtgttgatcagggaagttatcttggtggtgcccaggttatgaactcctgtgactttcgatgtgccgaccagatgtattgcagtccagggatgcaggtgagaacaatgggcgaggatggcgctgtgagtggtcaggtgttggggcaaggtgcctgtgatattgccagtatccaatgccaaggtgcaaaatctggatctgcaaagctcccagtctgtggggctatggagcatggttattacggcatccctaaggcagtaaggcgctgccagggtgtaaggcgtccactccgccttacgagaaagctagaggagaaagggcaaaaacaagtgataaacccatcctag

SEQ ID NO: 11581 - DNA, 566 bp, Oryza sativa
  Clone ID: TFbOSC3427j.C1.o1.gp
ccttcatttcttttcagaatttggcatacagccgacaggcatcgtacccatagccccacagactgggagctttgcagatccagattttgcaccttggcattggatactggcaatatcacaggcaccttgccccaacacctgaccactcacagcgccatcctcgcccattgttctcacctgcatccctggactgcaatacatctggtcggcacatcgaaagtcacaggagttcataacctgggcaccaccaagataacttccctgatcaacactagaaaccaaatcgatgttcttcactggcctctgataaggaaaagccccaatctccccttcaatccttcctctaatatcaacgagcaggcaccgcagcctggatacctctgcctcgagcgtggcatggttctggagcttcttcatgagctgctggtttagagccctcaaatgaacaacctcctcctccagcgaggcagtgtgagctttcttcttctccctgtacttcctcacagcggcacggttacccgacggccgcttcttggaggcattgttctccgtcggggactcggcgg

SEQ ID NO: 11582 - DNA, 3453 bp, Oryza sativa
  Clone ID: TFbOSC407343j.C1.o12.gm
atggatgacggggacctcgatttctccaacccggacacattcctctgcccggccgtcggtggtgctgaccccgacggcagctgctccatggacagctatttcgacgacatcctcaaggatacggagcaccatgcatgcacccacacccacacctgcaacccgcctgtgcatgacctctcacacacccacacctgcgtccatgtccacaccaagatcgtctccgccccatccgacactccgtcggatgctgccgagaccgccgagtccccgacggagaacaatgcctccaagaagcggccgtcgggtaaccgtgccgctgtgaggaagtacagggagaagaagaaagctcacactgcctcgctggaggaggaggttgttcatttgagggctctaaaccagcagctcatgaagaagctccagaaccatgccacgctcgaggcagaggtatccaggctgcggtgcctgctcgttgatattagaggaaggattgaaggggagattggggcttttccttatcagaggccagtgaagaacatcgatttggtttctagtgttgatcagggaagttatcttggtggtgcccaggttatgaactcctgtgactttcgatgtgccgaccagatgtattgcagtccagggatgcaggtgagaacaatgggcgaggatggcgctgtgagtggtcaggtgttggggcaaggtgcctgtgatattgccagtatccaatgccaaggtgcaaaatctggatctgcaaagctcccagtctgtggggctatggagcatggttattacggcatccctaaggcagtaaggcgctgccagggtgcacgcacgggatcccagccctccgaaccccaggttccccgcatcggacggcagagaccaccccctcgctctcgctccacgtcaagctcgccgcgccgcccagtaaaatactgccacgtggaggacgcgccacccgagccgtccgatcttccacgtggcgcgatcgcccccgcgtggaccgggcgcacggggtctccggctaagaagctccaagtcaatgctgatgacagcactgatgagttagttgatccgccgaaggtagaggagaagattggtggtgttccccatggcctgtccacggactctgaggttgttcagagggaggctgagtcaatctcgaggaagaccctcaggagctcagcggagaaatttgagttccaggctgaggtgtccagactcatggacatcatcatcaactcactctacagcaacaaggacattttcctgagggagctcatctccaatgcttctgatgctttggacaagattaggttcctggctctcactgataaggaggttttgggcgaaggtgacactgctaagcttgaaatccagattaagctggataaggagaagaagattctctccattcgggataggggtattggtatgaccaaggaagatctcattaagaaccttgggaccattgccaaatctggaacttcagcttttgtggaaaagatgcagactgggggtgacctcaatctcattgggcaattcggtgttggtttctattcagtatacttggttgctgactatgttgaagtgatcagcaagcacaatgacgacaaacagcatgtctgggagtccaaagctgatggatcattcgctatctctgaggatacatggaatgaacccctgggccgtggaactgaaataagactgcacctccgagatgaagccaaggagtacgtggaagaagacaagctaaaggatttggtgaagaagtactctgagttcatcaatttccccatttacttgtgggcaaccaaggaggttgatgtggaagtgccagctgatgaggatgagtcaagtgaatcaagtgaagaagaggaatcatcccctgagtctacagaggaagaagagacagaagagagtgaagagaagaagcccaagacaaagacagtaaaggaaaccactactgagtgggagcttctgaatgatgtgaaggctatatggcttcgtagccctaaggaggttactgaagaagaatacacaaagttttaccactcacttgctaaggactttggtgatgacaagcccttgtcttggagccacttcactgctgagggagatgttgagttcaaagctttgctctttgttcctcccaaggctccacatgatctctatgagagttactacaactctaacaagtcaaaccttaagttgtatgttagaagggttttcatctctgatgaatttgatgagcttcttccgaagtatctcagctttttgaagggtctcgtcgactcggacacattgcctctcaatgtatcacgagaaatgctccaacaacatagcagcctgaagaccatcaagaagaaactaatccgcaaagctcttgacatgattagaaaacttgctgaggaagatcctgatgagtacagcaacaaagataagacagatgaagaaaaaagtgcaatggaggagaaaaagggccagtatgccaagttctggaatgagtttggaaaatcagtcaagttgggcatcattgaagacgcaactaacaggaaccgtcttgcaaagcttctgagatttgaaagtaccaagtcggaaggcaaacttgcctctcttgatgagtacatttcaaggatgaagccagggcagaaggacatcttttacattaccggaagcagcaaggaacaattagagaaatcaccgttccttgagaggctaaccaaaaagaactacgaggttatctacttcactgaccctgttgacgagtacttgatgcaatacctcatggactacgaggacaagaagttccagaacgtctccaaggagggtctcaaactcggcaaggactctaagctcaaggacctcaaggagtccttcaaggagctgaccgactggtggaagaaggctcttgacaccgagagcgtggactcggtgaagatcagcaaccggctgagcgacaccccctgcgtggtggtgacatccaagtacgggtggagcgccaacatggagaagatcatgcagtcacagaccctctcggatgccagcaagcaggcgtacatgcgcggcaagagggtactcgagatcaaccccaggcaccccatcatcaaggaactccgtgacaaggtcgcccaggacagcgagagcgagagcttgaagcagacggcgaagctggtgtaccagacggccctcatggagagcggcttcaaccttcctgatcccaaggacttcgcctccagcatctacaggtcggtgcagaagagccttgacctgagccccgacgcggccgtggaagaggaagaggaggtcgaggaggccgaggttgaagagaaggaatcatccaacatcaaggaggaggcggagccgtcgtcgtatgataaggacgagctagctgccatgttcattagtttaaccgttgtgccctgtccatgtcgggaatactaccttatttcatga

SEQ ID NO: 11583 - DNA, 1074 bp, Oryza sativa
  Clone ID: TFbOSC400458j.C1.o48.fg
atgggggcgtacgaccggcctccgccagttggcatgtggagtcacgagcagttcaaggttgacaacggccaggccacgagtgcatccacgatcatggaggcagagatgaaatttgagaataggctagaagaaattccccaagtagttctggaggaagggagaaatgttgatcaggaggcaagcaagccgccagacaaggtcctcagaagacttgcacaaaacagagaggctgcacggaaaagccgcctgcggaaaaaggcttatatccaacagctggagacaagccggttgaaactagcgcagttagagcaagagcttcaacgggccaggcagcaggctgtgtatgcaaatgggagccttcgagaaccaaatcttggatttacaggaccgatcgatccaggtgccttaggttttgagattaagtacagccattgggtggacgagcagaatcgcaacactggtgagctgaggaatgcgctgctgcaggggcagacgacggaccaggacctggagctcaagttgctcgtcgaggctgggctcgacaactacaaccgcctcttcgagatgaaagaggaagccgccaactccgacgtgttctacatcatgtcgggcatgtggaagacccccaccgagcggttcttcctgtggatcggtgggttccggccatcggaggttctcaagaatttgagaccgcagctggagcctctgacggacaagcaggtcgtggaagtgggcggcctgcagcaaacctcgatgcaggtcgaggacgccctctcgcagggcatggacaagctgaagcagacgatcgcggactccctgacggcggccgacccgttcgactcccccgaggcctacatggtgcacatggccaacgccgtggagcagctcagatccctcgtccagttcgttacccaggcagatcatctccggcagcagacgctgcaggagatgcacaggatcctgacgacgcggcaggcggcgagggggctcctcgcgctgggggactacttccagcgcttccgagcgctgagctcgctatgggcagctcgcccgcgcgattcagggataagctaa

SEQ ID NO: 11584 - DNA, 1251 bp, Oryza sativa
  Clone ID: TFbOSC411284j.C1.o12.fg
atggcgccatcttccctcctcatcatcttcttcctcctcccgacctcccgctcctccgcactacagcagcatggcgtagcggtggtgggcatggcggcgcaccaggggatggcggcggcgacggcggcggaccggttctgcctgccgaggatggcggcggcggcggcggccgcctcgcaggtggagaactggggcgactccggcgtcatcgtcagcagcccgttcaccgacgacacctccaccgacctcgacgacagcgccgacaagcaccacctccacgctctagtgggcggcggcgatggcggcgacgacgccggcgagcagcgaggcgcggattcctccgccgtgtccaaggaaagaagaggggatcagaagatgcagcggaggcttgcgcagaatcgcgaggcggcgcggaagagccggatgaggaagaaggcatacattcagcagttggagagcagcaggtccaagctgatgcaccttgagcaggagctccaaagggcaagacagcagggaatcttcattgcaactggaggctccggcgatcacgggcactcgatcggaggaaatggtggtacgttggcgttcgaccttgagtacgcgcggtggctggacgagcaccagcggcacatcaacgacctgcgggtggcgctgaacgcgcagatgagcgacgacgagctgtgcgagctcgtcgacgccgtgatgatgcactacgaccaggtgttccgcctcaagagcttcgccaccaagtccgacgtgttccacgtcctctccggcatgtggatgagccccgccgagcgcttcttcatgtggctcggcggcttccgctcgtcggagctcctcaaggttcttgccagccatcttgagccgctgacggatcagcagctgatgggcatctgcaacctgcagcagtcgtcgcagcaggccgaggacgcgctgtcgcaggggatggaggcgctgcagcagacgctgggggacacgttggtgtcggcggccgccaccgtggtcagcggcggcggcggcgccgacaacgtcaccaactacatgggacagatggccatcgccatggccaagctcaccacgctggagaacttcctccgtcaggctgatctgctgaggcatcagacgctgcagcagatgcaccggatcctgaccacgaggcaagcggcgcgggcgctgctcgtcatcagcgactacttctcgcggctccgggcgctgagctcgctgtggctggcgcggccgagggactag

SEQ ID NO: 11585 - DNA, 456 bp, Oryza sativa
  Clone ID: TFbOSC14114j.C1.o1.fg
atgacgtccgggttcgggttcacgccgtgggcggctgacacgtgccctaccttggagcagctgatggcgtcgtccgcgtcgccctcgccgtcgtcgtcgcttgatgacaacgcggcggcggcggaggaggagaacggtgaggtggaggaggaggaggagcggaggcggcagcggcggaaggtgtcgaaccggctgtcggcgcggcggtcgcgggcgcggaagcagcagcggctggaggagctgcgtggggagagcgcccgcctccgcgccgagaaccgggagctggcggccaggctgcacgccgtggcgcgccacggcctcgccgcgcggtgccagaacgcgcgcctccgcgccgaggccgccgcgctcgcccgccgcctcctcgcgctccagcggctcgcccgcggccgccacatgatgatcacggcgtcgccgccgcagttctcgcgtcgctga

SEQ ID NO: 11586 - DNA, 456 bp, Oryza sativa
  Clone ID: TFbOSC900018j.C1.o1.fg
atgacgtccgggttcgggttcacgccgtgggcggctgacacgtgccctaccttggagcagctgatggcgtcgtccgcgtcgccctcgccgtcgtcgtcgcttgatgacaacgcggcggcggcggaggaggagaacggtgaggtggaggaggaggaggagcggaggcggcagcggcggaaggtgtcgaaccggctgtcggcgcggcggtcgcgggcgcggaagcagcagcggctggaggagctgcgtggggagagcgcccgcctccgcgccgagaaccgggagctggcggccaggctgcacgccgtggcgcgccacggcctcgccgcgcggtgccagaacgcgcgcctccgcgccgagggcgccgcgctcgcccgccgcctcctcgcgctccagcggctcgcccgcggccgccacatgatgatcacggcgtcgccgccgcagttctcgcgtcgctga

SEQ ID NO: 11587 - DNA, 543 bp, Oryza sativa
  Clone ID: TFbOSC416709j.C1.o1.fg
atgaccctgtcaggtgggaccctgtcaagcgggataacctctggctcaagccatgggacccggagctcagggtcagagggtgatatccagctgcaggtccaaatggacctgaagcggaaaagaaggaaggaatcaaaccgagagtcggcaaagaggtctaggttacggaaacaacagcacctcgatgaccttacctcacaggtgaaccagttgaagatggagaaccagcagctcaccacaacattgaacatggtcacccaaagctgtgccttcgcagagtctcagaactcagtgctgcgcactcagatgatggagctggatagcaggctatcagcgctccgtgagataatcttctacatgaacaatggaaaccaatcaccttctaatcctacaatagcagcgactacatacccatccaccactacaatgactgcagcaactactggccattacgattattatgatgttttcactgcaaatgcatggggctcagggatgcaaatgatgcagcagcccatagatcagtttctgtaccagtgctag

SEQ ID NO: 11588 - DNA, 612 bp, Oryza sativa
  Clone ID: TFbOSC400151j.C1.o14.fg
atggcggcgcaggagcaggagcaggagaagcagcaggtgaagacgagcacgacgagctcgctgccgtcgagcagcgagcgctcctccagctcagcccccaacaacctcaaggaaggaggaggggtggagagcgacgaggagatacggcgggtgccggagatgggagggggcggcgggtcggcgtcgtcgggggcgggggcggacgagcggcaggggaaggaggacgggaagcagcagggtggtggcggcggcggggcggcggcggcggggggcgggcaggagcaggcgccgccggcgaggaagcgagggcggagcgccggcgacaaggagcagaaccggctgaagcggctgctgcggaaccgcgtgtcggcgcagcaggcgcgggagcggaagaaggcgtacatgacggagctcgaggccaaggccaaggacctcgagctccgcaatgccgagctcgagcagcgcgtctccaccctccagaacgagaacaacacgctccgccagatactcaagaacacgacggcgcacgccggcaagaggggcggcggcggcggaggcaagggcggcgatggcggcggcggcgggaagaagcaccatttcaccaagagctag

SEQ ID NO: 11589 - DNA, 1083 bp, Oryza sativa
  Clone ID: TFbOSC401241j.C1.o11.fg
atggcgacaacacgcgcatctctcaccgatcccctccttccctctcccgcggcacgcgcgccagttaaagccaaaaagctctcatggtccatgcttcacgcaagcagcaaggacgagaggagaggacagagtggggaagctgaagctgaagcaagcggaggagtgcacgcgaatccctcctcgccggcgagaatgcaggagcaggcgacgagctcgcggccgtccagctccgagaggtcgtccagctccggcggccaccacatggagatcaaggaaggcaaggaagcgccacttcgatcccttctccttccctttcttgatttccattttactgttcctctttcgggaatggagagcgacgaggagatagggagagtgccggagctggggctggagccgggcggcgcttcgacgtcggggagggcggccggcggcggcggcggcggggcggagcgcgcgcagtcgtcgacggcgcaggccagcgcgcgccgccgcgggcgcagccccgcggataaggagcacaagcgcctcaaaaggttgctgaggaaccgggtatcagcgcagcaggcaagggagagaaagaaggcatacttgaatgatcttgaggtgaaggtgaaggacttggagaagaagaactcagagttggaagaaagattctccaccctacagaatgagaaccagatgctcagacagatactgaagaatacaactgtgagcagaagagggccagttcttctgaaaatccccaaatcgggtctgcgggaggcggcaccagcgggctgcggaggtttgcgggaggcggagggcgacgagaagtttgtcctcaacgggttcaccgccgcgaatctcagcttcgatggcatggcgacggtgaccccgaacgggctgctcatgttgaccaacggcacgaaccagctcaagggccacgccttcttcccggcgctgctccagttccacaggacgcccaacagcatggcgatgcagtccttctccacggccttcgtcatcggcatcatcagcgcgttcgaggaccagggcagcggcagcccggcggcggcaggtggcagcggcagggcggcataa

SEQ ID NO: 11590 - DNA, 717 bp, Oryza sativa
  Clone ID: TFbOSC7652j.C1.o3.gm
atggacctgccccagccaatgggaatgacgcagggagcccaagcccagtggggagtgaaaggctctcctgtcgggctcatcgccgcatccatgtcgatcacggaggctagcctccacttctgctacctccactcgctctccgtcgtgttcctctacttcttctactttctctttgtgctctgtgatacattcaagatgtcagttgcgccggcgacggaagggtccgcacgccgctcggcggcggcggcggcggcggaggaggaggagcggcagcgcaaccggaagaggtcgaaccggctgtcggcgcagaggtcccgcataaagaagcagcagtacgtggacgggctggccgtggaggcggagcagctccggcgggagaacgacgccatgcgcgccggcgccggcgccgtgctgcagcggtgccgcctggtcgagcaggagaaccgggtgctcgccgcgcacgcgcgcgagctgtgcagcgcgctccagctccgcgcctcgcagctccgcctgctcggggaggtggcaggcgtgcccctcgacgtgcccgacgtcgccgaccacctcgtgcagctctacggcggcgacctggggatgacgccgctctcgccaccgccgctgctgccgccgctgccgccacagatcgagatgctgtacttccagccagactcggtcatggatccggtcagtatgctgcagggctacgaaaacatatga

SEQ ID NO: 11591 - DNA, 210 bp, Oryza sativa
  Clone ID: TFbOSC7652j.C1.o3.np
atgctccggaatggaaatgagggaatgtccacaatacccggatttagtcagatccaattcgagggattttgtaggttcattaatcaaggtttggcagaagaacttgagaagtttccaacaattaaagatccagatcacggaatatctgttcaattagtagccaagtagtaccgaaggagtatctccgagttaaggagtaccgaagggaag

SEQ ID NO: 11592 - DNA, 522 bp, Oryza sativa
  Clone ID: TFbOSC900423j.C1.o21.fg
atgtcagttgcgccggcgacggaagggtccgcacgccgctcggcggcggcggcggcggcggaggaggaggagcggcagcgcaaccggaagaggtcgaaccggctgtcggcgcagaggtcccgcataaagaagcagcagtacgtggacgggctggccgtggaggcggagcagctccggcgggagaacgacgccatgcgcgccggcgccggcgccgtgctgcagcggtgccgcctggtcgagcaggagaaccgggtgctcgccgcgcacgcgcgcgagctgtgcagcgcgctccagctccgcgcctcgcagctccgcctgctcggggaggtggcaggcgtgcccctcgacgtgcccgacgtcgccgaccacctcgtgcagctctacggcggcgacctggggatgacgccgctctcgccaccgccgctgctgccgccgctgccgccacagatcgagatgctgtacttccagccagactcggtcatggatccggtcagtatgctgcagggctacgaaaacatatga

SEQ ID NO: 11593 - DNA, 1107 bp, Oryza sativa
  Clone ID: TFbOSC10722j.C1.o6.fg
atggacccgcgattcccgccgccggcgccgtccgggggagcgccgccgagggggcaccaccggcgggcgcactcggagacgttcatccggctgcccgatgccgacctgctgctcgacccggacggcgagttcggattctccgacctcgacttcccttccctctccgacgactcccccgcggcgtccgacccgaccccgcctcctcccccgccggcgctgccgcaggcggcgccgcggccgcctgggggtgcacacctgaggagcctctccctcgacgccgcgttcttcgatggcctcgcgttccagggaggaggagggggtggtggtgctgggagtgggagtagcggcggtggggctgggcataagaggagcgggtcgatggatggggagagctcgctgttcgagggcgagtccgcgccgcccgactacgccaagaaggccatgcccgccgataggctcgccgagctcgcgctcctcgaccccaagcgcgcgaagaggattctggcgaacaggcaatcggcggcgaggtcgaaggagaggaagatcaagtacaccggtgagctggagaggaaggtgcagacgctgcagacagaggcaaccacgctttcaacacagctcacgctgctccaggcgtactgggatgctatgatcataaaaagtgttagtctctgtttggttgtatttattctcaactgtgagtaccgctatagttctgtacttgcaaattgcactttccaggacaagcagggccattacaaggcaattgaaatcaaagaatccaaatatatttatccagataagcaaagcaacctgttgagaaagccttctctgtttaatgcagctctgaatgacgccctacgagaagaagttcagcggcttaagatagcggcaggccaagttccaaacatgaacggaaactccttcaatggaggactccagcagcagcagcagcagcagatgccgacctatttctcgcagcagcagcagatgcactacttaagtggccaccagggacgtcatcaccacccaaataatccccataactctttgaacggaggccaatcgatgagcggccagaccctaaatgactccatggatttcatgtga

SEQ ID NO: 11594 - DNA, 798 bp, Oryza sativa
  Clone ID: TFbOSC400259j.C1.o152.gm
atggcgtcgagggtgatggcgtcgtcgtcgccgtcgcacacggcatcggatctcgcgcggttcgcggcggggaggggtgggggcgggagcgcggggctggggtcgatgaacgtggaggagatcctccgcggcatctacgccgacatgccgacgccggcgctgcccctcgtcggcggtgacaggccgatgtcgccgctcccggcgccggatgtcgccgccgcgccgcggacggcggaggaggtctggaaggagataactggtgcgggcgtcgccgccgccgccggcggcgtggtgccccctgctgctgctgctgctgctgccccggccgtcgtcgctggcgctggcgctggcaccggcgcggagatgacgctggaggactttctggcgagggagggcgcggtgaaggaagacgaggctgtggtcaccgatccctcggcggccaaggggcaggtggtgatggggttcctgaacggggcagaggtcaccggaggcgtcaccggcggcaggagcaggaagaggcacctgatggatccgatggaccgcgccgcgatgcagcggcagaagcgaatgatcaaaaatcgcgagtcggcggcgaggtcacgggagaggaagcaggcctatattgctgagctcgagtcgctggtcacgcaactcgaggaggagaacgccaagatgttcaaagaacaggaggagcaacatcagaaacgacttaaagagctcaaggaaatggttgttccagtcatcattaggaaaacgtcagcacgagatcttagaagaacaaactcgatggagtggtag

SEQ ID NO: 11595 - DNA, 1941 bp, Oryza sativa
  Clone ID: TFbOSC11046j.C1.o1.fg
atggcggagccggccctgctggaccccaccgccgccttcgacctccgcctctacccggcccacctcttcgaccacgaactccctctcgccggcggcggcggcggcgacgacgacgacgacctcccgctcgacgggctcgagttcgacctgcccggcgatttctccgtggaggacttcctcctccggtctccggagcgggacgactccggcgagggctctgctgccggatccgggcccaccgcctccccgtcgtcgtccccgaccacctcggcgtccaactccgccgtcgccaacggcagcggcggcgaggtcaagcacgaggagtcggatgaggggaggagcggtgggggtgaccccaagtggagcctgaagcggaagcaggcgagccccggcccgagctcggacgcggccaagtgccgccgatccggggacggcgacgtttctccgtcggcgtcggcgtcgcggaccgctgtggattccgacgagggggggacggtgtgcgaggaggaggaggacgagcggcgggcggcgcggctgatgcggaaccgcgagagcgcgcagctgtctcggcagaggaagaagcggtacgtggaggagctggaggagaaggtgaaatcgatgcactcggtgattaatgacctcaattctaggatctcctttgtcgtggccgagaacgcaacactgcggcagcagcttagtggcggcagtgtgaattgcccaccacctggggtgtatccgccggcgccaattcccggcatgcatttcccatggatgcctgggtatgcaatgagaccccctggttcccatgtacctcttgtgccaatcccccggttgaagccgcaacagccagtgccttcatccaaagtagtgaagaaaccagagagcaagaagactgtggagaacaagagtaagagcaagaccaagaccaagaaggtggctagtgttagccttcttggtttgctgcttattatgcttgtctttggtgctttcattccagggtttaatcataactttggaatgtgtgggcagagtgataatgctatgtttaggaattttggtcagtctcatgctagggtgttgagtgtcagtagccaggataaaagtagtttgaacaatagcgacatgattggtgttgatgttggaaagatgacggggaatactgatgggccagggaagaaacatcagcctgcacacaactcaagtgagatcctccctgctttgttgtatgtgccgaggaatggaaagcatgttaagatcaacggcaacctgattattcattctgtgcttgcaagcgagaaagcagtggcacataaggcctcaaaagatgatagtgatcagtcagctagagatcacaaagagactagtgttgccatagctcgttatctttcgctgcctggaaaggatgtgaatcgacaggagacatcctcggcagatggaccattgccacaatggtttcgtgaaggaatggaaggacctatattaaattctggaatgtgcagtgaggtatttcagtttgacatttcgacggcttctagcaatcctggtggcattatacctgcatctcctgttgtgaactcgtcaagtgtcaatgctaccgagaaaatcccagcacattctgctgcttatcatggcaagctgaaaaacagaagagtcatgtacaatgaagcgattccactcaccgggaagacggcgaacaacacagagccttttaacagaacctctgaaagcagcagcaagttacctgatagcaagccagcatcatcagttgttgtctcggtgctagccgatccaagggaggctggtaatggggatggcgatccgagagtatctccgaaacccctgtccaagatatttgttgttgttcttgttgacggtgtgagatatgtcacttactcctgcacgcttcctttcaagagctccagcccacatcttgtgaactaa

SEQ ID NO: 11596 - DNA, 507 bp, Oryza sativa
  Clone ID: TFbOSC400025j.C1.o12.fg
atggccggcctccccttcccctccgactccgacaccgccctcgaggccttcctcgccgacattggcttcggcgcaccatgtccggaagctgctccggcgccgtctccgtcgcatccggacacgacggcggcggcggctactgatgagccggtgatggccggtgacgaccaggccgacgaggagcggcggcggcggctccggcggaggatctcgaaccgcgagtcggcgcgccggtcgcgcgcgcggaagcagcggcacctcgacgagctccgggccaaggcctccgcgctccgcgccaccagccgcgacctcgtcgcgcgcctccgcggcgccagggcgcgcgccgcgctcgtggcgctcaccaacgcgcaactccgcgacgaggccggcaagctcgcgcttcgcctcgccgccgcccgccgcgtcatagctctccggcagctctactccgccgccgccgccggcggtggcttcgagatgcaggcgctcgcctcgttgatcgcgtag

SEQ ID NO: 11597 - DNA, 531 bp, Oryza sativa
  Clone ID: TFbOSC33872j.C1.o21.fg
atgacgattaaaaggaaggacgacgggcaggtcgtgaagcaatcagtcaaagcggttggcgggggacttctagaaagggtggatagcgacgacgaggagatagtagggagggtgccggagttcgggctggcgctgccggggacgtcgacgtcgggcagaggtagtgttcgggttgcaggtgacgcggcggcgacggcggccgggacgtcgtcgtcgtcgcccgcggcgcaggccggcgtcgccggcagcagcagcagcgggcgccgccgcggacgcagccccgccgacaaggagcaccggcgcctcaaaagattgctgaggaaccgggtgtcagcgcagcaggctcgggagaggaagaaggcgtacatgagtgagctggaggcgagggtgaaggacctggagaggagcaactcagagctggaggagaggctctctaccctgcaaaacgagaaccagatgcttaggcaggtgctgaagaacacaacagcaaacagaagagggccagacagcagtgccggcggagacagctag

SEQ ID NO: 11598 - DNA, 1329 bp, Oryza sativa
  Clone ID: TFbOSC400036j.C1.o47.fg
atggagcaaactttggacgtacctagatcgttgagactactggcgccaaaagctcaacaacaaatggatgaattttggagggatcgacaaaaggagattgaaacaacaaaggactttagcgagcatgcgatccctatggcccgcttgaagaagatcgtatcttctcaaaagggtaacatgatgatgacctttgacatgccagcattcttatcgaagatgtgtgagctcttcgtacaagaacttgctgtgcgtgcatgggcatctgctcaatcccataatcgttgcatcatactagacacggatattgctaaagccattgcctccacagagtcttatgactttcttgttgatatcctccataatcatcgtgtgaaacacaaatccactccttgttctacacttactacaaagcgttgtaggttagtcgatcaaccttccacatctcacatgccctaccaacatcagctgccacaatttgctcctacatatactccggccatccctattactcctagtttaatgccaccaatttctcactatataccgttccaatatccatccttatcacaagaagtgtccccgatgatggcttctgcacccatagtgaatagatcaatgttgctcattcacaacatagcaaggggtctaggcttacaaggaaacaatatcagcacgttcgccaacaataatatcccagacaatattgttggttgtagtagccccacagttcttgcaagtatgatgagtcctgctttactagaagttgcagggacatcactaaatccaccaaactctcattccatctgcacaatgaacatgatcaactcgagtgatcctagtggatctagtattggtgacattaatgttgcaaatcaagcaagtcttgctccctctggacgttttaaccctgctatccttcgagagtcatcatgtccttcgttcttacatagtaacaatgacacaattgttgctataccggagggtgtagatattagtggcaccatggatgttgctagtgatgttgctgctatagttatcaatggtcaagaagaacatgagagggaaacaaatgttgagcatcatcagcaaaatgagatatatgaaagcattgatataggaataatcaatgcaagtgttgcggatgataataaatatagtattagctgggatgaattgggaatggctgatgattcattgctagacaaatttttggaggagtttcaagtaagaaatgacggtgttttgcgcactgggattgagttgcatgaagacccattccttggtgacgtgatgttagcaaacccaagtacaagcaatgccaataagtaa

SEQ ID NO: 11599 - DNA, 1104 bp, Oryza sativa
  Clone ID: TFbOSC900254j.C1.o20.gm
atggatcccaccaaatccagcacgccgccgccggtgatgggcgcgcccgtcggcttcccgcctggcgcgtaccctccgcctccccccgccggcgccgccgccgccgcctacgcgcagcagctctacgcgccccccgccgccgcggcggcgcagcaggcggcggcggcgcagcagcagctgcagatgttctgggcggagcagtaccgcgagatcgaggccaccaccgacttcaagaaccacaacctccccctggcccgcatcaagaagatcatgaaggccgacgaggacgtccgcatgatcgccgccgagggcccccgtcgtgttcgcccgcgcctgcgagatgttcatcctcgagctcacccacgcggggttggggcgcacgccgaggagaacaagcgccgtacgctgcagaagtcggacattgccgccgccatcgcgcgcaccgaggtgttcgacttcctcgtcgacatcgtgccccgcgacgacgccaaggacgccgacgccgccgcggccgcggcggcggccggcatcccccgccccgccgccggtgtgccggccaccgatccgctcgcctactactatgtgccccagcagccagccggcggggcgaaaggtcgccggggcgagaagggagaggagaaggcccgacggctggcgacaggcgacgaggcggcggcggcgacgcgggagcaggccggttggggaggaggccggcgacacagaggccataggccgtgcgggccgccgccagggacatctccacggccgccgtcgtctgggcgctcacgcacgtcgtccagcacggcgacaccatcctgctcctcgccgtcatgctgctgccgcacagggcacaactctggcaagaagtcctgggagtttccgctctttgcagggggttgtgcgagcggccacaggagcgtgttgattcagaattcggatgtcgcttatttgtgtaatcaaatgatgctaaaacttcgtgatttttatgatccgagcaagtggtgggagacggcggggcggtggccgtcatcaagcggcggcgcctgggcttgttttggacgggggagggccggcgcgggtaaccggtcggagggacgcacgtga

SEQ ID NO: 11600 - DNA, 1008 bp, Oryza sativa
  Clone ID: TFbOSC401168j.C1.o5.fg
atgccgatcccggaaaaggacggggtggaggacaatcaagaggatgatacattttcaaggttgcaattgcttgcacaacaacgacatgccatggagaagttctggaggatgagccaggaacagatcgaagaatccgcaggcaacgaagagcttatactgccgatttcccgtgtcaagaatatcatccatgcaaaggagggtggtatgatgttatctgctgataccccagcttttgtaacaaaactttgtgaacttttcgtccaggagctcatccttcgtgcttgggtgtgcgccaactcacacaatcgtgaaatcatacttggcacagatattgctgaggcaatcaccaccacagaatcctatcactttcttgctaatgtagtccatggccaccaggcgctaggaagcaacataccagagataggggtttctgcttggaagcgccataagctagatgaaatgacctcactctgccatcctccccaagcagtgcaggtcacagatttagctaaccatccacccaatattcctgtttgtcctcctataggtcaatcgggtactcagcacacaacatctacacatgttttgatgatgcaaggagaatctattcacaaggcaagtaaagaaaaatccccactgaaggaagtgatggtgccgaccaacaaggtgggcatgaccaacagctcttatggagttcctaatggtggtggtgctactagtagtaaagttgttattgatagcccgaaaggcgaaacagcacaagttttctcttcccagcatgcatgtccttccctagaagataactatgttattcccattcctgctggacatggtgatagttttcgtactcttgatgaggccaatataccccagctacatcaggagcagaaaaactttatttcacaagatgctattgttggtgaaaacattccgctgaatgagtctttggaaaagagcaagcataaggatgaggacttactttttcctgacaaagatcttcctgagtga

SEQ ID NO: 11601 - DNA, 777 bp, Oryza sativa
  Clone ID: TFbOSC401409j.C1.o13.fg
atgaggaagaagctgggcacccgcttccccgcggcacggatcaaaaagatcatgcaggctgatgaggacgttggcaagattgcactagctgtacctgttttagtatcgagggcccttgaattgtttttgcaagatttaattgaccgaacttacgaaattacactgcaaagtggtgcaaagacattgaattccttccacctaaagcaatgtgtgaggaggtacagttcttttgacttcctaactgaggttgtcaacaaggtaccggacctcggtggcgctgactcatgtggagatgatagagcattacccagaagaagaaaagccttgccaaatggaagtgacccagagaatgaggaatctcgatcaagcaaaatggccgtaagaagtgcaaatatcagtcccagaggacgtgggagaggtcgaggtagagggcgaggacgaccacccaccaagcggaaggaagttggttatgtacaatttgaggatgagagcagcatgtttgctgatcagggcgaagccttaccaggagaggagacggttccagagaccatccatggcaccgagagcgtacctccaagcacacaccctccagcagaagccccatcggcagcagagataccagctccaaatccaaaggtggaagaagcgaaaaacgacgaccatcagccggattggcctatgccagatgcgattggaaacatcggtgtcggaccatccggttttggacatcttacggtgcaagttgacgaggatgaggactacgacaacgaggattag

SEQ ID NO: 11602 - DNA, 870 bp, Oryza sativa
  Clone ID: TFbOSC418198j.C1.o28.fg
atggccgggaagaagaaggccctaacaaatcccgcctctccctccgcctccgcctccgcttccacccctaagaaatccaccgccacctccaaggaccgctccacgccgaaaccccgcaaaaaccccaaccccaaggaggaggcaccaccgccgccgcccgccaacaacaagcgcctcaacccccaagggggatccaaccgtaagaagaaggccgatgcggggacgccctccaagaagccgaagcgccagccgccggagcccaaacctcggaagcacaagggggccaagagcgagaagccgcaccgggtttccggcgaaggggagaagcccacgcccacgaagaagaagaagaagaaggagagcagcaaggagcccaagcgcgagaagcagcaagcgtccgcgcctatgtcgactccctcgaagaagaacaaggaagccaaacgcgacacaggaggagcggggaagcccacgcccaccaagaggaagctcggcgacgtggatcccccacaggagcgaccgtccggtgaaggccaggcaagctctcccacgcccgccaagaagcggaaggacaaggcggcggcggcggaggcggttgccgaccacggcgccggcagcttcccgatggctcgggtgcggcagataatgcgggccgaggacgccaccatccgcccctccaatgaggctgtcttcctcatcaacaaggccaccgagatattcttgaagaggtttgcagacgatgcttatcgaaatgctttgaaggatcggaagaagtcaattgtgtatgataacctttattttgttccacagaaagttacagctgaagatgctttgaaggctccagttagcagccaagtgaaccaaccacaataa

SEQ ID NO: 11603 - DNA, 873 bp, Oryza sativa
  Clone ID: TFbOSC416336j.C1.o2.fg
atgaggaagaagctggacacccgcttccccgcgcctcggattaagaaaatcatgcaagcagatgaagatgttggcaagattgctttagctgtacctgttctagtgtcaaaagcattggaattatttctgcaagacttgtgtaataggacatatgacattacagtgcaaagaggggtcaagactctgagttcttcccatttgaaacagtgcatacatagttataatgtttacgatttcttgagggatgtcgtcagtaaagttccagacatgggtacatctgatgctggtgttgatgataaacttggcaaaaggaggaaaactgctgaagatgacagtgaagaggaatcaaagcggacaagaaatgaggcagcaagccagacaagcactggtagagggcgtgggaggggtcggggaagaggccgacgtggtgggcgtgtgtctgagagggagattatttccgcttacgaaaaatttgaggagaaccatgagtttcctccaggtcaatttagcaagccttctcagctgaaggtagatgtttcagttgatggtacagatgcaattgaaacaaaggaggctaccccattaagcaacgcaagagcttctctaaggaacattgacttaaacatagagcttactgactatgatgatgagggttcagctccactggaggtccagcctccagctccggcagcaggtgtggttacaacctcttcaggaccacttgtttcggaggtgaacgaagaggcgaagaccaaagactttctaggatggcaattgcctgagctgaccaagatggccatggaccctgttcagtttgccttgtcttcaaaccataggttagaggaggatgaggattatgacaacgaagaatga

SEQ ID NO: 11604 - DNA, 417 bp, Oryza sativa
  Clone ID: TFbOSC420787j.C1.o13.fg
atgagttccgcgggcggcggcggcgggagggggaagtcgaagggctccaagtcggtgtcgcggtcgtccaaggccggcctccagttccccgtcggccgcatcgccaggtacctcaaggccggcaagtacgccgagcgcgtcggcgccggcgcccccgtctacctctccgccgtcctcgagtacctcgccgccgaggtgctggagctggcggggaacgcggcgagggacaacaagaagaaccggatcgtgccgaggcacatccagctggcggtgcgcaacgacgaggagctgagcaggctgctcggcgccgtcaccatcgccgccggcggcgtgctgcccaacatccaccagacgctgctccccaagaagggcggcaaggacaaggccgacatcggatccgcctcccaggagttctag

SEQ ID NO: 11605 - DNA, 891 bp, Oryza sativa
  Clone ID: TFbOSC27280j.C1.o3.fg
atggatccgatggatatcgtggggaagtccaaggaggacgtctccctccccaaatcaacaatgtttaagattataaaggagatgttgccccctgatgttcgagtggcaagagatgcacaagatcttcttgtggaatgctgtgtagagttcatcaacctcctatcttctgaatccaatgaagtttgcagccgagaggacaagaaaactattgctcctgagcatgttcttagagctctgcaggatcttggctttagggagtacattgaagaggttcaagcggcctacgaacaccataagcatgataccctggattctccaaaagcaagcaaattcactggtgtggagatgacagaggaacaagctgtagctgagcaacagaggatgtttgctgaggcccgagcaaggatgaacaatggtgccgccaaaccgaaggagccagaacctgaagcgcagcaacaaacacaacagccaccacagcctcagctgcaccctcaaccacagcaacccctgcagcctcaacttcagctccatcctcaaccacaacaacagccctcacagctacatcctcaacagctgctgcatcctcaatcgcagcaaactccgcagcctcaacctcaggtccaccctcaaccacagcagcctccacagctgcaaccgcaacctcagcttctccagcaaccgcagctgccccaacagctgcagccgcaatctcagctccccccacaaccgcagcagcccccacagctgcagctgcaatctcagctccacccacaaccgcagcagcccccacagctgcagccgcaacctcagctccatcagcaaccgcagccgcaggcagagctgcaatcacagtcacaaccacaaacagaacatggcttggacagttcatga

SEQ ID NO: 11606 - DNA, 690 bp, Oryza sativa
  Clone ID: TFbOSC401854j.C1.o11.fg
atgccggattcggacaacgagtcaggggggccgagcaacgcgggggagtacgcgtcggcgagggagcaggacaggttcctgccgatcgcgaacgtgagcaggatcatgaagagggcgctcccggcgaacgccaagatcagcaaggacgccaaggagacggtgcaggagtgcgtctcggagttcatctccttcatcaccggcgaggcctccgacaagtgccagcgggagaagcgcaagaccatcaacggcgacgacctcctctgggcgatgaccacgctcggcttcgaggactacatcgacccgctcaagctctacctccacaagttccgcgagctcgagggcgagaaggccatcggcgccgccggcagcggcggcggtggcgccgcctcctccggcggctccggctccggctccggctcgcaccaccaccaggatgcttcccggaacaatggcggatacggcatgtacggcggcggcggcggcatgatcatgatgatgggacagcctatgtacggctcgccgccggcgtcgtcagctgggtacgcgcagccgccgccgccccaccaccaccaccaccagatggtgatgggagggaaaggaaaggtagaagaagtacaaagcaaaggaaaaatccgagactttctacaactacaagcaagcatgcttgagttgatccagggagaaaattaa

SEQ ID NO: 11607 - DNA, 378 bp, Oryza sativa
  Clone ID: TFbOSC401203j.C1.o25.fg
atgaggcaggcgaggccctactcggcgatgttcgccggcggcgtgtcggcgcggactgggccgcacgcgctgccgctggctcgcatcaagaagatcatgaagcggtcggcgggggacagcagcgtcgtcgacggcggcggcggcggcggcggcggggcgaggatgatctccggggaggcgccggtggtgttctccaaggcgtgcgagctgttcatcgccgagctgacgcgccgcgcctgggccgccacgctcgagggcaagcgccggactgtgcacaaggaggacgtcgccgccgccgtgcagaacaccgatctcttcgacttcctcgtcgacgtcgtcacggcagacctcggcgacgatcatacggactataagtaa

SEQ ID NO: 11608 - DNA, 858 bp, Oryza sativa
  Clone ID: TFbOSC5489j.C1.o2.fg
atggcggacgcggggcacgacgagagcgggagcccgccgaggagcggcggggtgagggagcaggacaggttcctgcccatcgccaacatcagccgcatcatgaagaaggccgtcccggcgaacggcaagatcgccaaggacgccaaggagaccctgcaggagtgcgtctcggagttcatctccttcgtcaccagcgaggcgagcgacaaatgtcagaaggagaagcgcaagaccatcaacggggaagatctcctctttgcgatgggtacgcttggctttgaggagtacgttgatccgttgaagatctatttacacaagtacagagagatggagggtgatagtaagctgtcctcaaaggctggtgatggttcagtaaagaaggatacaattggtccgcacagtggcgctagtagctcaagtgcgcaagggatggttggggcttacacccaagggatgggttatatgcaacctcagagcaattttcacatattggtagttctgcaatcttttgcattcccatacatgtatcaggtggcacaaatctattgcaacaaatatgaagtgtcaagggagcaaatatgggatacccctcagataatggaactctccccatggataccgtacaccataaaccgtatttggaaagagactcatggtagccaggatattcgtattcagggaaggccgcgcgaggctgcaaatagcgctttggactggcaatggccatcaaagcactcatcgctggctagcaacttctatggtacacgagtggtgggaggccatcatgagtaccagagaagcaccaaaaaggacactacgcacgttaactttgctagtggcctgggagatctaggatga

SEQ ID NO: 11609 - DNA, 435 bp, Oryza sativa
  Clone ID: TFbOSC400992j.C1.o58.fg
atgacgaacgggcaggacaacctgctgccgatcgccaacgtgggccggatcatgaaggacgggctgccgccgcaggcgaagatatcgaagcgggccaaggagacgatccaggagtgcgcgacggagttcatcagcttcgtcaccggcgaggcgtcggagcggtgccggcgggagcggcggaagacggtgaacggcgacgacgtctgccacgccatgaggagcctcggcctcgaccactacgccgacgccatgcacaggtacctgcagaggtaccgcgagggcgaggagctcgccgcgtcgctcaacagcagcagcagcgccgccgccgccgccgccgccgccggcagcaggggcggtggcgccatacagatcgacgtgagagctgagctctccatcttcagatcaggcaacaaccaaggtcgtccaaacaattaa

SEQ ID NO: 11610 - DNA, 453 bp, Oryza sativa
  Clone ID: TFbOSC900366j.C1.o10.gm
atggctggggagacgggggaaggtgggggatcccattcccaacctgagaagcagccgggccaagcggcggcggcggcgtccatggcggaggcggaggtggaggagctgcccaaggccatcgtgcggcgcctagtgaaggagaagctcgcccaggtcgccgccggaggggccgaggtcatcgtcaacaaggacgccatgtccgccttcgccgagagcgcccgcatcttcatccactacctctccgccactgccaatgacatgtgcaaagaatcaaagaggcagacgatcaacgctgatgatgtcctcaaggcactcgatgaaatggagttccctgagtttgtagagccccttaatacttctttgcaagccaaggaggtcggagatttaaactccgaccacccctctgatgctctactgtgttcaatcctaagcttctcataccggatctggtaa

SEQ ID NO: 11611 - DNA, 599 bp, Oryza sativa
  unsure (1)..(599): unsure at all n locations
  Clone ID: TFbOSC402631j.C1.o11.gm
atgaagagtaggaagagctatgggcacttgctgagcccggggggcagcccgccgttggacaacgagtccggcgaggcggcggcggcggctgcggctggcggcggcggctgcgggagcaacgccgggtatgtcgtctacggcggcggcggcggtggggactcgccggcgaaggagcaggacaggttcctgccgatcgcgaacgtgagccgcatcatgaagcgggcgctgccggcgaacgccaagatctccaaggagtcgaaggagacgggccaagagtgcgtgtcggagttcatcagcttcgttacaggcgagggcctccgacaagggccaccgcgagaagcggaagaccatcaacggggacgacctcctctgggccatgaccacgcgtggggtgcgaggcctacggggggccgcgtcaagtcctacctaaccggtaccgggaggcccagggcgaaaagggccnactggctcaggggcgccgggggcggccaccagggagcgcctagggagagggcgggtcctagaaggaagacggggggggggaacgaggggtttgatgaggtggggggaaccgggggtgggggtatagacgggggcag

SEQ ID NO: 11612 - DNA, 894 bp, Oryza sativa
  Clone ID: TFbOSC30077j.C1.o6.fg
atgaagagtaggaagagctatgggcacttgctgagcccggtgggcagcccgccgttggacaacgagtccggcgaggcggcggcggcggctgcggctggcggcggcggctgcgggagcagcgccgggtatgtcgtctacggcggcggcggcggtggggactcgccggcgaaggagcaggacaggttcctgccgatcgcgaacgtgagccgcatcatgaagcggtcgctgccggcgaacgccaagatctccaaggagtcgaaggagacggtgcaggagtgcgtgtcggagttcatcagcttcgttacaggcgaggcctccgacaagtgccagcgcgagaagcggaagaccatcaacggcgacgacctcctctgggccatgaccacgctggggttcgaggcctacgtcggcccgctcaagtcctacctcaaccgctaccgcgaggccgagggcgagaaggccgacgtgctcggcggcgccggcggcgccgccgcggcgcgccacggcgagggcggttgctgcggcggcggcggcggcggcgccgatggcgtcgtcatcgacgggcattacccgctcgccggcggcctgtcacactcacaccatggtcatcagcagcaggacggcggcggcgacgtcgggctcatgatgggcggcggcgacgccggcgtcgggtacaacgccggggccgggtcgacgacgacggcgttctacgcgccggcggcgacggcggcgtcagggaacaaggcgtactgcggcggcgacgggtcgagggtgatggagttcgagggcatcggcggcgaggaggagagcggaggcggcggcggcggcggcgagagggggttcgccggccacctccatggcgtgcaatggtttagactaaagaggaatactaattag

SEQ ID NO: 11613 - DNA, 963 bp, Oryza sativa
  Clone ID: TFbOSC401807j.C1.o27.gm
atgccctccttcaccatcgcgatcgtactctcctctgtttccgatctgcagtgcgagctggagttcctcgcctgcgtgactagcaagaagcacggaggaacacatagccatggtatgaactgccctgccatgacagctgcaactgcagctggggcctttggctttggacggacaagagctgacatggaaccatcctcacagcctcagcctgtgatgggtgttgccactggtgggtcacaagcatatcctcctcctgctgctgcatatccacctcaagccatggttcctggagctcctgctgttgttcctcctggctcacagccatcagcaccattccccactaatccagctcaactcagtgctcagcaccagctagtctaccaacaagcccagcaatttcatcagcagctgcagcaacagcaacagcagcaactccgtgagttctgggctaaccaaatggaagagattgagcaaacaaccgacttcaagaaccacagcttgccactcgcaaggataaagaagataatgaaggctgatgaggatgtccggatgatctcggcagaagcccccgttgtcttcgcaaaggcatgcgaggtattcatattagagttaacattgaggtcgtggatgcacacggaggagaacaagcgccggaccttgcagaagaatgacattgcagctgccatcaccaggactgatatctatgacttcttggtggacatagttcccagggatgaaatgaaagaagaagggcttgggcttccgagggttggcctaccgcctaatgtggggggcgcagcagacacatatccatattactacgtgccagcgcagcaggggcctggatcaggaatgatgtacggtggacagcaaggtcacccggtgacgtatgtgtggcagcagcctcaagagcaacaggaagaggcccctgaagagcagcactctctgccagaaagtagctaa

SEQ ID NO: 11614 - DNA, 753 bp, Oryza sativa
  Clone ID: TFbOSC414618j.C1.o4.fg
atggagcccgcatttcccaacggaggtgcggctgctccaccaccgcccatggcggcggagcagctgccgccggcggcggcggtggtccgggagcaggaccgcctgatgccgatcgcgaacgtgatccgcatcatgcggcgcgtgctcccgccgcacgccaagatctccgacgacgccaaggaggtgatccaggagtgcgtgtcggagttcatcagcttcgtcaccggcgaggccaacgaccggtgccaccgcgagcaccgcaagacggtcaccgccgaggacctcgtctgggccatggaccgcctcggcttcgacgactacgtcccgccgctcaccgcctacctccgccgcatgcgcgagtacgagggcggcggatcaggtggtggtggtggtggtggccgtggcgccgccgccgcccccgccgtcgtgccgccgccgccgccgccgcctcccgaggacgcgttccgctacgtgcaggtccatcatcccgtgtacgcggcgccaggtgagccggtgcaggggtacggttaccccgtggccatgtcgtctgctctgccggcgccgcacgtgcacgtcggcgtccgcggcggcgggcagcacgaggtgttcggtggcgggccggcgcccctggctgtctactacggaggagcgccgtacggcgaggccagcagccgcggcggctgctctgccgccgacgaggggagctcgtcgtcgagcgcctcgccggcgccggtcggccccaactatgagtaa

SEQ ID NO: 11615 - DNA, 1593 bp, Oryza sativa
  Clone ID: TFbOSC419121j.C1.o2.fg
atgttatcctctatgttcctcttcctcctccctctctcccttctctctttctctctcttgggcaatctgtgggcaggggcggcgacgtcggcgggcgagggctggagcagcgtcgggctgcggctcatgctactaggaggtgctactccatttttctacattaacatcgagacggtgatcatcaccaacatgaactactacccggaggggtccaacccggtgtacttcgccgtgctcgtcaagtacgaggacctcgacggcgacgtcgtgcaggtcgacctcatggagtccaagtcggcgtacggcggcgccatcggagtgtggacaccgatgagggagtcatggggctccgcatcggcagtgacatcggcaagaccctttgtcaccaacaacgtcatcccagccatctggtctcgaatcgcgccatcactgcctccgtcaccccttccgcgccgacctcgttccgcgctcgcccactgccgcgcctctcccgcctcggtctctccctctgcccgcgcctccccgacgccaccctcgccgcgctcaccgccgcaccgtccatctcgcagtcgacatctcctgctctcggggattcctgctgctgcgcttgtcgttgcatgcccgaatctgaatgatctcgacttctccaatgaccactatggctcgacctcaggaatgcggcggcggcggaggtggccaagttgtgtggggttttgggggggttttggcgatggagatggtgatcgttattccatcaccttctctgcatatattgtagtgttaagaactcaagaggcatatgtgcagatcctacagcagttgcataggagtacatctttagaaatggacccacattcacacaagaaggcacatgaaggtctgattggtgacaaccctgacgcgtatgccgtgacgacataccaacctgtgctgatggtagaaccatcagccgctgctgccttccctccagctccccaggttgctccagcctatccagtgaacccaatgcagcttccagagcatcagcagcacgcaatccagcaagttcagcagctccagcagcagcagaaggagcagctccaggcgttctgggccgaccagatggccgaggttgaacagatgactgagttcaagctccccaacctcccgcttgcaaggatcaagaagatcatgaaggccgatgaggacgtcaagatgatcgcgggcgaggcaccggcgctcttcgccaaggcctgcgagatgttcatcctggacatgacgctgcggtcctggcagcacaccgaggagggcaggaggaggacgctgcagaggagcgacgtcgaggcggtgatcaagaagaccgacatcttcgatttcttggtggatatcatcactgatgataagatgaaggatgatggcatgggctctcaggctgcatccatggtttcgccatatacctcaggaggaatgggattttcctttgatctgtacccgaaccagcatcacctcgcatatatgtggcctccacaagagcagcaggagcagtggcctccacaggagcagcaggagcagaagcagaagcaggattctgatggtggtggacaagatgaatga

SEQ ID NO: 11616 - DNA, 534 bp, Oryza sativa
  Clone ID: TFbOSC400992j.C1.o59.fg
atggccgaccaccatggcggccaccacgccgacgggcatcgccggcagcagcagctgcagggggaggcggcggatcaggcggcggcggagatcatcaaggagcaggacaggttgctgccaatcgcgaacgtggggcgaatcatgaagcagatcctcccccccaacgccaagatctccaaggaggccaaggagacgatgcaggagtgcgtctcggagttcatcagcttcgtcaccggcgaggcctccgacaagtgccacaaggagaagcgcaagacggtcaacggcgacgacgtctgctgggccttcggcgccctcggcttcgacgactacgtcgaccccatgcgcaggtacctcaacaagtaccgcgagctcgagggcgaccgcgccgccgccgccgccacctcccgctccggcgccggcgccgccgcgggccccgaccacccttcctcctcctcctccgccgccgccgccaccgccggtcatttcatgttcaacgccatggacaggtcgacggatagctccaggcagttctag

SEQ ID NO: 11617 - DNA, 726 bp, Oryza sativa
  Clone ID: TFbOSC413083j.C1.o3.fg
atgtcggaggggttcgacgggacggagaacggcggcggcggcggcggaggcggagtagggaaggagcaggaccggttcctgccgatcgccaacatcggccgcatcatgcgccgggccgtgccggagaacggcaagatcgccaaggactccaaggagtccgtccaggagtgcgtctccgagttcatcagcttcatcaccagcgaagcaagcgacaagtgcctcaaggagaagcgcaagaccatcaatggggacgacctgatctggtcaatgggcacgctcggattcgaggactatgtcgagcctctcaagctctacctcaggctctaccgggagggtgacacaaagggttcaagagcttctgaactgccagtaaagaaagatgttgtacttaatggagatcctggatcatcgcttgtcaactacggggcccaaagagcagacgccaatgcaaaccacctcgacctcttcttcctcctccgtaaaaatccagagagcaccactgccaactgcatgcgggaggatgaagcgaagccggtgaccgtgaagatcatcgagacggtgtacgtggaggccgacaccgccgacgacttcaagtccgtcgtccagaggctcaccggcaaggacgccgtcgccggcgatgcaccggagctgaatagtgcccagaggtttggctcagggagagaggccagtcgccatggcgatcacaaggtcagaatctatgaataa

SEQ ID NO: 11618 - DNA, 618 bp, Oryza sativa
  Clone ID: TFbOSC400603j.C1.o33.fg
atggagcccaaatccaccacccctcctccgcctcctccgccccccgtgctgggcgcccccgtcccttacccgccggcgggagcctaccccccacccgtcgggccctacgcccacgcgccgccgctctacgccccgcctccccccgccgccgccgccgcctccgccgccgccaccgccgcctcgcagcaggccgccgccgcgcagctccagaacttctgggcggagcagtaccgcgagatcgagcacaccaccgacttcaagaaccacaacctccccctcgcccgcatcaagaagatcatgaaggccgacgaggacgtccgcatgatcgccgccgaggcccccgtcgtgttcgccagggcgtgcgagatgttcatcctcgagctcacccaccgcggctgggcgcacgccgaggagaacaagcgccgcacgctccagaagtccgacatcgccgccgccatcgcccgcaccgaggtcttcgacttcctcgtcgacatcgtgccccgcgacgaggccaaggacgccgaggccgccgccgccgttgccgccgggatcccccaccccgccgccggtttgcccgccaccgaccccatggcctactactatgtccagccgcagtaa

SEQ ID NO: 11619 - DNA, 904 bp, Oryza sativa
  Clone ID: TFbOSC419400j.C1.o11.gm
atggatcccaccaaatccagcacgccgccgccggtgatgggcgcgcccgtcggcttcccgcctggcgcgtaccctccgcctccccccgccggcgccgccgccgccgcctacgcgcagcagctctacgcgccccccgccgccgcggcggcgcagcaggcggcggcggcgcagcagcagctgcagatgttctgggcggagcagtaccgcgagatcgaggccaccaccgacttcaagaaccacaacctccccctggcccgcatcaagaagatcatgaaggccgacgaggacgtccgcatgatcgccgccgaggcccccgtcgtgttcgcccgcgcctgcgagatgttcatcctcgagctcacccaccgcggctgggcgcacgccgaggagaacaagcgccgtacgctgcagaagtccgacattgccgccgccatcgcgcgcaccgaggtgttcgacttcctcgtcgacatcgtgccccgcgacgacgccaaggacgccgacgccgccgcggccgcggcggcggccggcatcccccgccccgccgccggtgtgccggccaccgatccgctcgcctactactatgtgccccagcaggacatctccacggccgccgtcgtctgggcgctcacgcacgtcgtccagcacggcgacaccatcctgctcctcgccgtcatgctgctgccgcacagggcacaactctggcaagaagtcctgggagtttccgctctttgcagggggttgtgcgagcggccacaggagcgtgttgattcagaattcggatgtcgcttatttgtcacaagcacaagcacaacaaaagcacgatggcagtggtgggagacggcggggcggtggccgtcatcgagcggcggcgcctgggcttgttttggacgggggagggccggcgcgg

SEQ ID NO: 11620 - DNA, 753 bp, Oryza sativa
  Clone ID: TFbOSC407812j.C1.o9.fg
atggagccatcatcacaacctcagccggcaattggtgttgttgctggtggatcacaagtgtaccctgcataccggcctgcagcaacagtgcctacagctcctgctgtcattcctgccggttcacagccagcaccgtcgttccctgccaaccctgatcaactgagtgctcagcaccagctcgtctatcagcaagcccagcaatttcaccagcagcttcagcagcagcaacagcgtcaactccagcagttttgggctgaacgtctggtcgatattgaacaaactactgacttcaagaaccacagcttgccacttgctaggataaagaagatcatgaaggcagatgaggacgttcgcatgatctccgcagaggctcctgtgatctttgcgaaagcatgtgagatattcatactggagctgaccctgagatcatggatgcacacggaggagaacaagcgccgtaccttgcagaagaatgacatagcagctgccatcaccaggacggatatgtacgatttcttggtagatatagttcccagggatgacttgaaggaggagggagttgggctccctagggctggattgccgcccttgggtgtccctgctgactcatatccgtatggctactatgtgccacagcagcaggtcccaggtgcaggaatagcgtatggtggtcagcaaggtcatccggggtatctgtggcaggatcctcaggaacagcaggaagagcctcctgcagagcagcaaagtgattaa

SEQ ID NO: 11621 - DNA, 717 bp, Oryza sativa
  Clone ID: TFbOSC400426j.C1.o12.fg
atggccgccgccgccgtcgccgacgaggtcaccgaggcgatggagcaagtcgaaggggagcgtgaggaggccgacgcggtcgctgatgaggccgccgaggtgatggagcaagccgaaggggagcgggaggaagccatcgatgcggtcgccggcgaggccggcgaggtgatgaaggaagtcgtcgaaggggagcgggaggaggcgaatgccatggccgatgaggccgatgaggcgatggagccggaaggggagcgggaggaggaggcagacgccgtcgccgacgaggccaccgagccgatggagcaagtcgaaggggagggggaggatggcgacgccgccgcgcaacggccggcgctgccgctggggagggtgaagcggatcatccgggtggaccgtgacatcaagaaggtgaccaacgaggcggcgctgctcatcgccgcggccacggagctcttcgtcggctccctcgccgcgggcgcccacagggccgcctcccggcgcggccggcgcgcggtgcgtgccgtgcacgtgcgggccgccgcgcgcgagcaccgccccaccgccgacttcctcctcgactgcctccccgccgccgaggaggcggcgcctgctcgcgcggctgccgccggtcccagccgcggcggcggaagaggagaggcaaagccgttgccacgtgggacccgccgcatcgacgcgttcttccagaagaccacctag

SEQ ID NO: 11622 - DNA, 561 bp, Oryza sativa
  Clone ID: TFbOSC400070j.C1.o19.fg
atggcagggaacaaaaagcgtggtggcaggaacatggatcaggtcaagaaggcggcagtgagatcggatggggtgggaggtagtgcgaccaacgccgagctgccgatggccaacctcgtacgcctgataaagaaggtgctcccagggaaagcgaagatcgggggagcagccaagggtctcacccatgattgcgcggtggagttcgtcgggttcgtcggcgacgaggcctccgagaaggccaaggcagagcaccgccgcaccgtagcgccggaagactacttgggctcattcggcgaccttggcttcgatcgctacgtcgaccccatggatgcctacatccatggttaccgtgagtttgagagggctggtgggaataggagggtggcgccgcctcctccggcggcagctacaccgctgacgcccggtggaccgacattcactgacgcagagctgcagtttctccggtcggtgatcccctccagaagtgatgatgaatatagcggctcatcaccagccataggcggctatggctatggatatggctatggaaaaaatatgtga

SEQ ID NO: 11623 - DNA, 546 bp, Oryza sativa
  Clone ID: TFbOSC6715j.C1.o2.fg
atggcgattccaacaaaggaggaggtggagcagaatgaggaggacaatacattttcaaggttgcaattgcttgcacaacaacggcatgccatggaggaattctggaggaggagccaggaacaaatcgaggcatctgcaggcaaccatgagcatatactaccaattgactgcgtgaagaatgtcattcgaccaaagaatgatgctatgatgctatctgctgacacaccaacttttgtgacaaaactttgtgagctcttcgtgcaggagctcaccctccgtgcatgggtatgtgccaactctcacaaccgtgacatcatattaggcacagacattgctgaggcaatcaccaccactgaatcctatcactttcttggtaatgtacttcgtagccacaaggcactaggaagtactgctcctgacatagatacttctgctaggaagcatattaagctagaccaaatgacctcactctaccatcctacccaagaaatgcaggcctcacgtttagctgggtatccaccccatgttcctatatatcctccatag

SEQ ID NO: 11624 - DNA, 765 bp, Oryza sativa
  Clone ID: TFbOSC400069j.C1.o6.fg
atggaggccggctacccgggcacggcggcgaacggcgctgccgccgacgggaacggtggcgcgcagcaggcggcggccgcgccggctatacgtgagcaggaccggctgatgccgatcgcgaacgtgatccgcatcatgcgccgcgtgctcccggcgcacgccaagatctcggacgacgccaaggagacgatccaggagtgcgtgtcggagtacatcagcttcatcaccggggaggccaacgagcggtgccagcgcgagcagcgcaagaccatcaccgccgaggacgtgctctgggccatgagccgcctcggcttcgacgactacgtcgagcccctcggcgtctacctccaccgctaccgcgagttcgagggggagtcccgcggcgtcggcgtcggcgtcggcgccgcgcgcggcgaccaccaccatggtcacgtcggtgggatgctcaagtcccgcgtgcagggctccatggtgacgcaccacgacatgcagatgcacgccgccatgtacggtggcggcgcggtgccgccgccgccgcatcctcctccgcaccaccacgcgttccaccagctcatgccgccgcaccacggccagtacgcgccgccgtacgacatgtacggcggcgagcacgggatggcggcgtactacggcgggatgtacgcgcccggcagcggcggcgacgggagcggcagcagcggcagcggtggcgccggcacgccgcagaccgtcaacttcgagcaccagcatccgttcggatacaagtag

SEQ ID NO: 11625 - DNA, 2814 bp, Oryza sativa
  Clone ID: TFbOSC7036j.C1.o3.fg
atggagggaggccctcttcaagctaaaggtttgaaaggtcgcgacatgcaagcaagaccttatcgctattctccgttacaaaaagacgagattgagaaacaggtgaaagaaatgattgatgctggtttaattacacctagtatgagtccctatgcatcacctgttttacttgtcaagaaaaaggatggtagttggcgtttttgtgtggattacagaagattaaatgctctcaccattaaaagtaagtttcctatgccggttgttgatgaattattggatgagctctcaggcactaaattcttctctaaactggacttgaaagctgggtatcatcaaattcgaatggtggaaactgatgaagccaagacagcctttaagacacatcatgggcaatttcagtttagggttatgccatttggtctcacgaatgcaccctccacctttcagtgccttatgaactcagtccttgcaccatttatcaggaagtttgtgttggtgtttatggatgatatcttagtttatagccctgaccttgatagtcatttgcatcatcttcagcaagtttttgttattttgaggcagcaccagttgtttgctaggaggtctaaatgctcttttgcttgcactcaactggaatacttaggacatatcatttctgacaaaggagttagtactgatcctgagaagacagcagcaatgctggcttggcctgtgcctacttctgttactgaattgaggggatttttgggactgacaggctattacagaaaatttgttcagggttatagtatcatagcacgaccattgacactcttgttgaagaagaaggcctttctttggactgatgctgctcagcttgcttttgatcagttgaagacagctatgagtaacactccaatgttagctttgcccaattttcagcttccttttactttggagactgatgcatgtgcttatggtcttggtgctgttttaagtcagcagggtcaccctattgcttattatagcaaaactttgggccctgttaatcagaaattgtccatttacgaaaaagagtttctagctattatgatggctgtggataagtggagatgttatctgcagagaggtccatttatcattaaaacatatcacaaaatcttgtgtcatttggatgatcaaatattggggactgaattacagcaaaaggcaatgactaaattgatgggtttgcaatattcttttcaatacaagagaggggttaataatattgttgctgatgctttatctagaatgccttcctcctctcaattttgtgctttttctgtggtccaaccgatctggattcaggagatgatcaattcttatacagtggatcctcaagctcagcagctactagctgagttggctgtgcattctcctaattctcaagggtattcattgacacaagggattattagattccagaataagatttggattggatccaatgcaggactgcatactaagttgattcaagcttttcatgcttctgcacttggtggccattctgggattgctgctacttatcatcggattaagaaattatttgcttggcctggtctcaagttggatgttgaaaattttgtgaagcaatgtcaggtttgccaacaggccaaacatgaacactgtcggcttcctggactgttagctcctctcccaattccaaaagaggcctggcaggacatctccatggattttattgaaggtttaccgcgctctgatggctataatgcaattttggtggtggtggatcgttttactaagtatgcgaatttcattcctttgcgtcatccattcactgcatcacaagtggctcatctggtggacaaaactgtatttaaaactcatggcatccctcgttctattgtgtctgatcgtgatcgtctctttactagcaagttctggacaactctttttgctacttgggacactcaattacagatgagcacagcatatcacccgcaaacagatggccaaatagagcgtgtcaatcagtgtttggaaatgtatttacgatgcatgactcaggctaaccctaagaagtggagccattggattcatttggcagaattttggtacaatacaaattatcatacatatcttggctgttctcctcataaggctctttttggggtggatcctcattattctcaagttcctgatctgacattggctactctgcctgatgtggtggatgttcagactgaaaggcagcacttgtctgaatttttacagcagcagttaactcgagcccagctgcgcatgaagaacaaggttgataaaggtcgttctgaccgtgtttttgctgtgggtgatgctgttttcttgaagttacagccttatgctcagtcctcagtagttaatagaccatatcctaagttggcttataagttctttggcccttttactgttttggagcgcattggagtggcggcttatcgtttggatctacctgccagcagcactgtgcatccggtgtttcatgtttctcaactcaaagctcaggtgccagatcatactcctgtttatacttctttgccatcccaagtggttcttgatgctgctgacgttgttcctgaggcgattttggagcgtcgactagtgaagcgcagcaatgcagctcatgtccaggtgttgctgaaatggtcttcattaccagcagatcatgctacttgggaggactatcatgttgtgaagactcgctttccagatgctccagcttggggacaagctgaaactcctgcgggcggcactgtcatgaccggcaatggtgacactgagaaagaggtttaa

SEQ ID NO: 11626 - DNA, 3453 bp, Oryza sativa
  Clone ID: TFbOSC403247j.C1.o47.fg
atgccgccggcgagaggcgggaggcgtgggagggggcgaggtaggcgaggtggacgcggaggcgccgcctctagggcgcgaggcgagaacgtcgtagacgtcgagccgatcaagctcggtgatgatgatgcgaaggtagatccacagacgaagtcacctaacgaagaaataacaagcgcggaggtttgcgaggtggagacctctgaggctagcccgcttggtgccccggaggaagatgaggggaagccaggttccactaggaacctgaagcgtcttcggaagacgatcacgatcgattccgcagccgctgaggagcatggggcagagagtgacgatgaagagtttgatgttcttgccacagcaagttgccaagagttggctccatgcagaaggtccaagcgcctaaggtgcaaaccaactaggaagaggtccaaaccaactgggaagagggatttgggtggcaaggagagtgaagatgatgtatttgcaaatagctcgagcagttcccaggatgacgccgggaagttagcttctagaagatcaaagcgtctcagggagaggcttacatctgattattttgatggtgatatgaaaattgttcggctccccgccgaggatcaaaacgccttcggaacagactgggccccagaaatatttcatatgctgatgatgatagcgacaccgatgatacatgttacattaactactgaaattaccacagatcgcaagaagattgtcccatgcaggagaacgtcaaagcgcctacaggagaagcggaaagctcatgatgtttcagaggagagttacactgaagcttcgtcttgcatgttgtcgacttcttcttcatcagatgatgaattattgcacaattctataaaacctggcagacgtaattcgggtggacctagttgttcgatctgtaagattggaattgcctgctctttcctcatcaaatgcaagaattccacttgttctcgtagcttccacaccttttgtcttgatcctcctttgcaagagattataggcacctgggaatgttcttggtgcaaaagcaatgcagcaccagcagtcaaggtgacagaagtgttaacatcaaaaaaaatccaaagacttgttggccacagacgaattcttcaggaggcagatttccagtatcaattcctcgtgaaatggcaatctctttctcatcatcatgactgctgggttccgcttgaatggcttcatgtatctgatcctttacgagtacagagctatctaaacaagaactgcttgcctaaggaagtttattcagaggatcaaaggaagcttgagtggtttgaagtagatcatgccattgcatgtcggaggaagttccatcatgaaggtttatgtgatgtcttggctactttccaggataaccaagatttcgacgggtatgagttccttgtgaaatggaagggccttgattactgtgaagctacatgggagccatgttgtaccgatggtgtgcaacaggctgtttctatgcttgtcaggaggcataaaaatgcttcaaaaagagttaacatcagccaaacatgtctagatggatcaaaaatagaagaggtgcactgtggtgctctatatgactatcaacttcaaggtttacaatggttaatagataacttcaaaactaggagaagcgttattcttgctgatgaaatgggtcttgggaaaaccgttcaagttgtttgctttctgtaccacattattaaggaaagtttgactgcatccccagcattgatccttgctccaaagagcatcctcctgcaatgggaaaaggaattttgccagtgggctagtgatcttaatgttattgtttatcaaggagacagagactctcgaaagtgtatccaagtccatgaaatgtactcttctgatgggaaacctttatttgatgctctagtgacgagttatgagtttgtccaaattgacaaggcagttctacagaaattcaagtggtctacaattgtcattgacgaggctcacagaatgaagaagcttgactgcaaccttgcagcttgcctaaaacgatactgctctgaatttcggttgctccttacgggaacaccgttacaaaataacatcatggaactgttttctttgcttcattatattgatccggatgagttctctgatccaaaggctgatggattgttctcaccaattgaatctggaagggatttgacaatggatgaaaaagttgctaggattcacaatattttaaagcccaggatgttgcggagaatgaaatctgatgttctaacagattctatgccagtaaagaagtgggttgaagttccatgtgcacttgcagattcccagagagaactttacattaatattttagagaggaattactcaaagcttaacagtgccattcggaatggcagaaaactttctctgaacaacatacttatggaactcagaaaatgctgcaatcatccagtaggacttgaagttggacagcaagcaactgaagatgtgtttttatcacttattgcttcatcaggcaaacttcaacttcttcataagttgctcccaagattgaaagaaaggggaaatcgtgtactgattttctcgcagatgaccaggatgcttgacattcttgaggattttctttgttccctgggatacaaatatgcacgcatcgatgggcagacatcactctctgctaggcaggagagcatagaagagtacaaaaacattgatagtgaaacatttattttcttgatgtcaactcgtgctggtggcatgggagttgacctgcctggtgcagatagggtaattatatacgatcctgacttcaatccatttatggacttgcaagcacaatctcgggctcatcggatcgggcagacaagaccagtggttgtttaccaactcattacaaagtgttctgtcgaggaaaagatactgcagaagtcaaagcagaagttggccatcgaaaatatgttgatgaactcttccaagaagccaagtgctgatgagttgcagtctatattactccatggagcaaagacaattgtggacaggaagatcagtgcaacatccatccattatgacaatgaagccattgagaatctcctcaagttagacccttccactggtgagaaatgctcgtcggatgataacggttatcttggcagcattgtgagctttgctcatggcgtcgaggatgaagcaccttcttccccaaaggttgaggatctgaaagttctcaagcctgctactcccaaggttgatctcggccgtgggaagaggcaaaggaaagtcgtgaactacgctgacgaggttgagaatgaagacagtgatgatatgtatgccccggaaggttcgtcgacttccgaattcagcagttcgtcctccgatgatgaaactgacagcgctctgcagctgcaaatagttacagtaccggacattgatgcagattag

SEQ ID NO: 11627 - DNA, 3402 bp, Oryza sativa
  Clone ID: TFbOSC401367j.C1.o45.fg
atggagtccaaactcttggagaagttggaaggcatcacaaagtggatgcacgagattgatcagcggctggattcccaaggtggcagtctcgagaaggtgactaccaaggtggatctcgccatggattccgtcggcaagtttagaatggcagtcgaaacagaatttgagggtgttgtggaacgtgagaaaatgtctgcactagatactctgactcaaactggtacaatgactgagtataaacaacaatttgattctcttgtctatcagatcagagtgtttgatccatctgtgggggaaattcgagctgctgttgttgttcaattgcctgacactgtacagcaagcatctgctattgctcttatgcaggaatctgtcttggctagtagagctaccaaagctctcaaagggaaatttgtgaaacttcctcagtacaagagtgatatcagttctgatactgctccaggtcgagtagataaagaggatctatggaaggctaagcagttgaaagactatcgacgtgctcagggtctttgttttaagtgtggtgacaaatatactcctgaacatcgttgtgctgttggaggccaaatcaaagctatgcagttggaagaggtgctcactgatgacatattggatgttgttattgctgcagaacaatctgatgatgaggaggactgtcatatttctctgaatgcattgacaggagctcaccttcctactgctattcatttgagagcattggttcacagtaaagtcttgttacttttggtggattctggcagctctcacagctttattgattacaactttgcacagatgctgggtttacctctaaaaccaattccttctactctggtgaaagttgctaatggtgattgcttaccttgtcagtatgtggttcctggtttttcttggtggattcaggggcacacatttacttatgacatgagggtggtcactttggggggtcacgatgccatcttaggtagggactggcttgagcaatggggggaaatgtcttgtcattgggctaataaaacactcaagtttcagtatcaagggtcttggatttctcttcaaggagtacaagatgctgcagtcccttctgaaattgctgctgtcactctgccacaacttttgaaatggcataagggttgtgaaatatggactgctgctttgttggaacattcccaggatgatgtccagcatgtgattccttcttcagtgcaacaattgttaactgactttgacgatgtctttcacgatcctaagtgtcttcccccacacagggtttttgatcatgctatttctctagtacctgatgctattcctgtcaactgcagaccttatcgctattatccattacaaaaagacgagattgagaaacaggtgaacgaaatgattgatgctggtttaattacacctagtatgagtccctatgcatcacctgttttacttgtcaagaaaaaggatggttgttggcgtttttgtgtggattacagaagattaaatgctctcaccattaaaagtaagtttcctatgctggttgttgatgaattattggatgagctctcaggcactaaattcttctctaaactggacttgaaagctgggtatcatcaaattcgaatggtggaaactgatgaagccaagacagcctttaagacacatcatgggcaatttcagtttaggcaccagttgtttgctaagaggtctaaatgctcttttgcttgcactcaactagaatacttaggacatatcatttctgacaaaggagttagtactgatcctgagaagacagcagcaatgctggcttggcctgtgcctacttctgttactgaattgaggggatttttgggactgacaggctattacagaaaatttgttcagggttatagtatcataacacgaccattgacactcttgttgaagaagaatgcctttctttggactgatgctgctcagcttgcttttgatcagttgaagacaactatgagtaacactccagtgttagctttgcccaattttcagcttccttttactttggagactgatgcatgtgcttatggtcttggtgttgttttaagtcagcagggtcaccctattgcttattatagcaaaactttgggtcctgttaatcagaaattgtccatttacgaaaaagagtttctagctattatgatggctgtggataagtggagatgttatctgcagagaggtccatttatcattaaaacagatcacaaaagcttgtgtcatttggatgatcaaatattggggactgaattacagcaaaaggcaatgactaaattgatgggtttgcaatattcttttcaatacaagagaggggttgataatattgttgctgatgctttatctagaatgccttcctcctctcaattttgtgctctttctgtggtccaaccgatctggattcaggaggtgatcaattcttatacagtggatcctcaagctcagcagctactagctgagttggctgtgcattctcctaattctcaagggtattcattgacacaagggattattagattccagaataagatttggattggatccaatgcaggactgcatactaagttgattcaagcttttcatgcttctgcacttggtggccattctgggattgctgctacttatcatcgaattaagaaattatttgcttggcctggtctcaagttggatgttgaaaattttgtgaagcaatgtcaggctctttttggggtggatcctcattattctcaagttcctgatctgacattggctactctgcctgatgtggtggatgttcagactgaaaggcagcacttgtctgaatttttacagcagcagttaactcgagcccagctgcgtatgaagaacaaggctgataaaggtcgttctgaccgtgtttttgctatgggtgatgctgttttcttgaagttacagccttatgctcagtcctcagtagttaatagaccatatcctaagttggcttataagttctttggcccttttactgttttggagcgcattggagtggcggcttatcgtttggatctacctgccagcagcactgtgcatccagtgtttcatgtttctcaactcaaagctcaggtgccagatcatactcctgtttatacttctttgccatccccagtggttcttaatgctgctgacattgttcctgaggcgattttggagcgtcgactagtgaagcgctgcaatgcagctcatgtccaggtgttgctgaaatggtcttcattaccagcagatcatgctacttgggaggactatcatgttgtgaagactcgctttccagatgctccagcttggggacaagctgaaactcctgcgggcggcactgtcatgaccggcaatggtgacactgagaaagaggtttaa

SEQ ID NO: 11628 - DNA, 4176 bp, Oryza sativa
  Clone ID: TFbOSC401857j.C1.o18.fg
atggaggctaagcttctcgagaagctggactccctcacgctgtgtatggaggctttggacgacaagttaaccaagcagagcggccgaattgatcaagtcgctaccaaggtggatctcgccatggatgctgtggccgctttgcagaaggagcaagtgcaggcggcgcagctgcacaagcaagccatggcttcagaaccgatgtaccagattcctcctgtatttcaagtttcagcagctgttcttcacatgtcggggaatgctgcccagtggtatcaatcgtttaagctcgtggaggaagttgctaattggtctcagtttcgacatgctgttgtttgtgagtttgagagcacctcgcaacgtgagaagattcaggctctgcaaactttaagacaggcaggttctgtggctgaatataagcatcaatttgattctcttgtctatcagatccgtgtatttgatccatcagtgggagcagtgatggttcagttgcctaccacagttcagcaagctgctgctgtggcattgatgcaagagagtgttctacttgaattgagtactaagcaatctaagcgattgatgtataaaccattgcctaccaaaggggagttgcctcagggtggtactgatactcctgctattaagcctgaacgagcagaactatggaaggctcgacagttaagggattatcgaagagccaatggtctttgtttcaaatgtggggataaatattctcctgagcaccagtgtgcgctgggtggtcagattaaagctatgcaagttactgaagtgattccggatgatcttttgaatgcagtgactgctgaagaagactctgaccaggatgagaattgtcatatttcactcaattccctgtctggtgctagtcatgtgaacactatcagactccgagctttggtccagaataaggtgttgctcttactggtcgactctggcagttctcatagtttcttggactataactttgctcaactcttgggattgcagttgcagcccattgctccctccctggttaaagtagctaatggtgattgtatacactgtcagtttatggttcctcagtttacttggtggtttcaagggcgtactttcacttatgatatgagagttgttcctttgggtggacatgatgctattttggggatggactggttggcacagtggggtgatatgtcttgcaattgggccaacaaaactttgaagtttatgtatcagggtacttgggttgaacttcagggagtccctgattctcctccccaaactgagttgagtgctatgtctttgtctcaggttcttaagtgtcaaaaagggtgtgatatatgggcagctgcactgctggaaacagctgacttcccttctgctgattcagttccacctgctgtttctcagttagtgcatgagtttgctgatgtttttcaagatccacacagtttaccacctcacagagtttatgatcacgctattactcttttccctggttcagctcctgtgaatagcaaaccttatcggtattctcctttgcaaaaagatgagattgaaagtcaggtcaaggacatgattgattctgggttgatcactcccagtatgagcccttttgcttctcctgttttattggttaaaaagaaggatggcacgtggcgtttttgtgtggattatcgcaaactcaactctattactgtgaaaagtaagtttcctatgcctattgttgatgaattgcttgatgagcttgctggtactcgtttcttctctaaacttgacttgaaagctggctatcatcaaatatggatggtggaggatgatgaatataaaactgcttttaaaacacaccatggtcaatttcaattccatgtgatgccgtttgggttgaccaatgccccttctacttttcaatgtgtgatgaattcagtgtttgcacccttaatcaggaagtatgttttggtgtttatggatgatattctagtgtacagtcctgatttaccgtctcatctcacacacttgaaacaagtttttgaactgctgagacaacacaagttatatgccaaaaggtccaagtgttcttttgcctgttctcaattggagtatttgggacacataatttcagatcaaggagtcagtactgatcctactaagactgcagctatgttggcttggccagtccctgccaatgtgacagaactcagagggtttttggggcttacagggtattatagaaagtttgttaaaaattatagtatcctggcaaaacctttaactgtcttactacagaagaaagcgttccagtggtctgatgatgctcagcaggcttttcagaagctgaaacttgctatgagttcaactcctgtactggctttgcccgatttctcccaaccttttattttggaaactgatgcttgtgcgtttggagtgggagctgtcctcagtcagcataatcatcctattgcatattatagcaagacattgggagtggctaatcagaagctttctatatatgaaaaagagttcctggttctggggactgatttacagcaaaaggcaatgactaaattgatggggttacaatatactttccagtataagaaaggagtggagaacgtggtagctgatgctttgtctcgagtgcctcctcagtctcacttatctgctctgtcagtggctagccccatttggttgcaggaagtgttaaactcgtatgctgtggatactcaggctcagaagttattggtagaattggcagtccattctcctaatgatcagggttattctttgactgatggtctcattcgtcatcatggtcgcatttggataggagctaatctgggtttgcagactaagttaatcactgcttttcattcctctccaattggtggtcactcgggcactatggccacttatcaccggctcaaaaagttgttctcttgggttggtctgaaaactgcagtattcaactttgttaaacagtgtcaaatctgccaacaagctaaacatgagcattgtcgattgcctgggttgttagttcctttaccagtaccgaaagaagcttggatcgacatctcgatggattttattgaaggtttgcccaaatctgatggttacactgttatacttgttgtggtggatcgtttcactaaatttgctagtttcattcctttgagacacccttatactgcttcacaagtagcggtcacagtggataaatttgtgtttaagacccatggcttaccacagtcaattgtgtcggatcatgacaaagtgttcactagtcgtttttggggtgatttgtttaaagtatggaacactcaattgaacatgagtacggcatatcatcctcaaaccgacgggcaaaccgaaagagtgaatcagtgtctcgagatgtatttgaggtgcatgattcaagctactcccaccaaatggaacagttggctgcatttggctgagtactggtataatacatcttttcatacatctttgggttgttcccctcacaaagctttgtttggagtggaacctcatatcagtcaagtgccggtgctgctgtcctcagttcatcattctgtggtggacttaatttctgaacgcaatcagttgtctgtctttttacagcaacagttacaacgagcacaattgcgtatgaagcataaggctgataaagggcgatctgagcgttccttttctgttggtgatcatgtctttcttcgcttgcaaccttatgctcagtcttcggtggtgaatcgcccatatcccaaactggcattcaagttctttggaccatttcaaatcttggagaaagttgggtcggcagcttatcgtctggctttacctgaaggcagtgcggtccatcctgtgtttcatgtgtctcaactcaaagctcatgtgccagatcacactccagtgtttacttctctacccacaccggttgtactggatgctgccgatgtgtggcctgaactgattctggacaggcgtctggtaaaaaaggggaatgcagctcatgttcaggtgcttatcaagtggtcatctctgtctgctgatgatgccacctgggaggattatgatgtgttgaagacacgattcccttctgcgccagcttggggacaagctgcatctttggcgggcggtactgtcacagctgatggtattcagtgcgacgcgccacagtag

SEQ ID NO: 11629 - DNA, 3177 bp, Oryza sativa
  Clone ID: TFbOSC400864j.C1.o5.fg
atggagcaacaattggcggaacttgtggaggtcatgtctgcgattcagaagcagaattcggcgattcaaacttcggttggatcgctggaggagatcaagcccctggtggtggagttagcgagttggaagccggcgatggacaaggcggtgacagagctgcatgaggagatgggggatctgcgccaacaagtggagcggatagcccgtaatccggtgctctccgtcaagccatcggagttgccggcgctgcttcctacaccgactcggcctcgggataccgctcccaaggaggaggaggtctctccaagtgtgggtggcgaaggtcacgggccgttaggccaccgcgttgcttcgattccacgggggaaggcgtgtgggaaggagtcctctccatcgtctctcccggccaaggagggttcgaatcggggttttactgcggggtttcacggaggaaacgctcgggtagattgtccacagtttgatggggagaaccctagagcctggaaaatgaagtgcgaaacctatttccgtgtgagtggaatttgctctgaagtgtgggaggctatgacgagttaccgagctacggcccgttctgctacaccgtcgtttgcttccaagacatttggtggtggccgagctgatgaacggacactgccagtggaagataaggtagctgccctgagagcttatcgcaaagcaaagggattatgccatacatgtggggaacggtggagtcgcgatcacaagtgtggacctactgttcagttgcatattgtggaagagcttttggaattgttagctgattctgctgctgatggtatgcctgagattattgaaccaactactgacattgggtctgagtctgaacctcaaggcgaagtctgtcagatttctcgtgatgctatgattgcccagaaggatgagattgaacggcaagtgaaggatatgctgcagcagggagttattcaaccaagttcaagtcccttctcttctccggtgctgttggtgcagaaaaaggacctcacttggcagttttgtgttgactgccgtcacctgaatgctgttacagttaaaaatcgctatccccttccaatcattgatgaattattggacgaattgtcaggtgctagtctgtttaccagcttggatctgcgcgcggggtatcatcagattagaatgcgagctgaagatgagtataagacggcgtttaaaacgcataatggtcattatgagtttcgggttatgtcctatggacttacaggagccccggccacttttcaagggttgatgaacatgatttttgcaccgttattgaggaagggagttttggtgttcattgatgatatattggtgtacagtcgtaatttgcaggaccatgtcatgctgttgcgtcaagtggtcttcgtttggacttcagaacatcaagctgcatttgaagctcttaaggctgctttggtttctgccccagtgttggcgttgcccgatttttctgggacctttgtaattgagactgaagcttctgatttgggggtgggtgcggtgttaatgcaggatggacatcccttggctttccttagcaaatccctgggtccacgcaacagaggcctgtcaacttacgaaaaagagtgtctcgctatattgctggctgttgatcattggcgctcttatctgcagtttggtgagtttatcattcgtacggatcagcgcagcttgattcatcttgatgatcagcgtttggtgacatcttggcaacaacgagcattaaccaaattacttggcttatcttaccggctggtatacaagaaaggtcttgagaataaggcagctgatgtgttgtctcgttgcagatccaatgaggtgtatcaattgagtactgtgtcatcttgcgtgccctcttggttggaggaagttcagaagggttatgattctgatatttgcacttctcaattgctcgctaaagtgttgctctctcctagtcaatttccttcttattctctgaagaatggtattctctattatatgaggctcatttggctgggtgcaaactctgaattgcaacttaaaattctgtctgctttccattgctctgccgtgggtgggcattctggtatacaagttacttacagcagagtgcggcgcttgtttgcatggccgggtttgaagcaggccgttcgccagtttgtgtccaactgttcgatctgtaagcaagcaaaagctgaacgtgtgcgttaccccggtcttttgcaacctctacctgtgccggagcatgcctgggtaactgtttcacttgattttattgaagggttgccttcttcagcaggttttgactgcatactggtggtcgttgataaattcagtaagtatgcccatttcctggctttagtgcacccattcaccgcttttgatgttgctttggcttatctgaacaatgtttataaactttatggattgccacatcatatcatttcggacagagtccgtatttttaccagcgccttgtggacagagttatttcagttgacggatactcgtctgaagttaagtactgcttatcacctacagacggatgggcaaacggagcgtgtcaaccagtgtttggagacatttctccgctgttttgtgcatgcctgtccaaagaagtggttccgttggtgggctttagcagaattttggtataacactgcttatcattcagcgcttgagaggtctccatttgaggtactgaataaggtgggagcagtggcttatcgactacgattgccggatgattgctcgattcatcccgttgttcatgtctcccaacttcgacaagctgtggcaccaaccactgcgactgatgttcgtgctcttcctaccatggcaccagaggaggtggttcctgttcaagttctcgcccggcgagtttcgaagaaaggagctggagctgtggaacaagtcttggttcgttggacaggtcaatcatcaagtgaggctacctgggaagatgctgcggctttgcgtcttcgatttccggatgcgccggcttgggggcaagccgctttcgaagggggaaggaatgttacgggtgctgctactgtatctgaaccggtaagggagaataatcctgtgaagtctgggaaacgacctcaaagggagagaaggccgaatgtccgagtctctgggccggagtggtcttag

SEQ ID NO: 11630 - DNA, 2283 bp, Oryza sativa
  Clone ID: TFbOSC400896j.C1.o18.fg
atgggggaagtgggggaggagagagaggcgggattcgaaaatcgaatcccggccatctcgggcgcgggcgcgggcgggagagagaggggagtgggcgcggggaacgcggcgcacgcgcggcgtgggcgacgtggcccggaggaggcggagacgtgggcacggcggcggttgcgggcgcggcggggcggcgggagcggcgggaggttgggggaggacccgacagggtttactcttgctttgcaccggtattttcttagggcctcttataaattaaattttaggcttgggaggagaacttcggggtgtgacactgatgctactcagcttgcttttgatcagttgaagacagctatgagtaacactccagtgttagctttgccctattttcagcttccttttactttggagactgatgcatgtgcttatggtcttggtgctgttttaagtcagcagggtcaccctattgcttattatagcaaaactttgggtcctgttaatcagaaattgtccatttacgaaaaagagtttctagctattatgatggttgtggataagtggagatgttatctgcagagaggtccatttatcattaaaacagatcacaaaagcttgtgtcatttggatgatgaaatattggggactgaattacagcaaaaggcaatgactaaattgatgggtttgcaatattcttttcaatacaagagaggggttgataatattgttgctgatgctttatctagaatgccttcctcctctcaattttgtgctctttctgtggtccaaccgatctggattcaggaggtgatcaattcttatacagtggatcctcaagctcagcagctactagctgagttggctgtgcattctcctaattctcaagggtattcattgacacaagggattattagattccagaataagatttggattggatccaatgcaggactgcatactaagttgattcaagcttttcatgcttctgcacttggtggccattctgggattgctgctacttatcatcagattaagaaattatttgcttggcctggtctcaagttggatgttgaaaattttgtgaagcaatgtcaggtttgccaacaggccaaacatgaacactgtcggcttcctggactgttagctcctctcccaattccaaaagaggcctggcaggacatctccatggattttattgaaggtttaccgcgctctgatggttataatgcaattttggtggtggtggatcgttttactaagtatgcgaatttcattcctttgtgtcatccattcactgcatcacaagtggctcatctggtggacaaaactgtatttaaaactcatggcatccctcgttctattgtgtctgatcgtgatcgtctctttactagcaagttctggacaactctttttgctacttgggacactcaattacagatgagcacagcatatcacccgcaaatagatggccaaacagagcgtgtcaatcagtgtttggaaatgtatttacgatgcatgactcaggctaaccctaagaagtggagccattggattcatttggcagaattttggtacaatacaaattatcatacatctcttggctgttctcctcataaggctctttttggggtggatcctcattattctcaagttcctgatctgacattggctactctgcctgatgtggtggatgttcagactgaaaggcagcacttgtctgaatttttacagcagcagttaactcgagcccagctgcgtatgaagaacaaggctgataaaggtcgttctgaccgtgtttttgctgtgggtgatgctgttttcttgaagttacagccttatgctcagtcctcagtagttaatagaccatatcctaagttggcttataagttctttggcccttttactgttttggagcgcattggagtggcggcttatcgtttggatctacctgccagcagcactgtgcatccggtgtttcatgtttctcaactcaaagctcaggtgccagatcatactcctgtttatacttctttgccatccccagtggttcttgatgctgctgacgttgttcctgaggcgattttggagcgtcgactagtgaagcgcggcaatgcagctcatgtccaggtgttgctgaaatggtctttattaccagcagatcatgctacttgggaggactatcatgttgtgaagactcgctttccagatgctccagcttggggacaagctgaaactcctgcgggcggcactgtcatgaccgacaatggtgacactgagaaagaggtttaa

SEQ ID NO: 11631 - DNA, 4446 bp, Oryza sativa
  Clone ID: TFbOSC411208j.C1.o7.fg
atggcgtacagggcgcctactctccggccgcagctcgcggcgtctccggcgagccgagttccgctatctgattctcgtcggccgccagtatattccggaagtaacggcttctggagcggcagaggcagatcgggtcgcgcttcgaccagctcgagtagggttgaggacaaggtactccgacgacgaggtttggatggtgaccaaacttcagtccgcgctttctcgagcccaagagaaggggcgaattggatgggcagtagtcccgcttcctctagcagcagcagtagtagccatgcttcctcctcgagcgaaagttggattagagataagctgtccggtgtccgtccgtcatcgctcgccgggcgggcaccgaccaccggcaccaagaggcagtgcagcagtcctccgccatcagctgatcgttcagagaagaaggcgaaagaagatctggcgatggaggagcctccggaggctctggcaatggaggagcagcaggatgcacttgcaactaaggagcaagctctggcaatggaggaggagcagggtgcccctgcaactaagggggagcaggaggtgttgcccgagatggaggaggagcaactggtgatggaggaggagcaggagtcgttggcgatggataagatggagtcggggatggaggagcagccagggatagaggaggaggtgttgccggagatggaggagcaactgatgatagaggaggagcaggagttgtcggcgatggataagatggagtcggggatggaggagcagccagggatagaggaggaggtgttgccggagatggaggagcaactgatgatagaggaggagcaggagttgtcggcgatggataagatggagtcggggatggaggagcagccagggatagaggaggaggtgttgccggagatggaggagcaactgatgatagaggaggagcaggagttgtcggcgatggataagatggagtcggggatggaggagcagcctgggatagaggaggagcaaccggcgacggaggagttgggcgccgatgatgcgctccctagtgcgaatactcatctggatctggtctcctcccatctccgcgatgatggcaactggctcactgtgatgtcctctttatgccatcccagcaggggttggtgcctctgggctatctttgggtcgcacgcttttgccattgacaccaccgcggacgcagacattttgacattggatttggctggactgaaagaaactacttcttgccctagagcaaaaggtaataatgtaaagcactgtggcactgagagctgcgcatcatcatggatcaagccaggaattctgcaagcccctttgaagcaagctatggactccatggagtccaaactcttggagaagttggaaggcatcacaaagtggatgcacgagattgatcagcggctggattcccaaagtggcagtctcgagaaggtgactaccaaggtggatctcgccatggattccgtcggcaaggtgcagcaagagtgtgctgagttggcccgttcgatgaagcgggtggccagctgctctgatcaggccgggattttgggttcgcctttcgggatctcgcaggttagtgcaagtggttccgcgactcctccgccgttgaatccacttgttcctcctgtgttggatggggttgatttgggtcatggttttggtgatgggatttatcggcgtcatcagccacttcctaaaatggattttcctcgtttcgatggttctgatgtgcggatttggttggatatgtgtgagacttattttgacatgtaccaaatcactcaaaatttcaaagtctctgctgctgtgttgcatatgtcgggaaatgcggctcaatggtatcattcttataagttagtgaatgaggttaactcttgggatcagtttagaatggcagtcgcaacagaatttgagtgtgttgtggaacgtgagaaaatgtctgcactagatactctgactcaaactggtacaatgactgagtataaacaacaatttgattctcttgtctatcagatcagagtgtttgatccatctatggggggtaaaatgttagtgactcattttatgaatggtcttactgaagaaattcgagctgctgttgttattcaattgcctgacactgtacagcaagcatctgctattgctcttatgcaggaatctgtcttggctagtagagctaccaaagctctcaaagggaaatttgtgaaacttcctcagtacaagagtgatgtcagttctgatactactctaggtcgagtagataaaggggatctatggaaggctaagcagttgaaagactatcgacgtgctcagggtctttgttttaagtgtggtgacaaatatactcctgaacatcgttgtgctgttggaggccaaatcaaagctatgaagttggaagaggtgctcactgatgacatattggatgctgttattgctgcagaacaatctgatgatgaggaggactgtcatatttctctgaatgcatttacaggagctcaccttcctactgctattcatttgagagcattggttcacagtaaagtcttgttacttttggtggattctggcagctctcacagctttattgattacaactttgcacatatgctgggtttacctctaaaaccaattccttctactctggtgaaagttgctaatggtgattgcttaccttgtcaaccttatcgctattctccgttacaaaaagacgagattgagaaacaggtgaaagaaatgattgatgctggtttaattacacctagtatgagtccctatacatcacctgttttacttgtcaagaaaaaggatggtagttggcgtttttgtgtggattacagaagattaaatgctctcaccattaaaagtactaaattcttctctaaactggacttgaaagctgggtatcatcaaattcgaatggtggaaactgatgaagccaagacagcctttaagacacatcatgggcaatttcagtttagggaggtgatcaattcttatacagtggatcctcaagctcagcagctactagctgagttggctgtgcattctcctaattctcaagggtattcattgacacaagggattattagattccagaataagatttggattggatccaatgcaggactgcatactaagttgattcaagcttttcatgcttctgcacttggtggccattctgggattgctgctacttatcatcggattaagaaattatttgcttggcctggtctcaagttggatgttgaaaattttgtgaagcaatgtcaggtttgccaacaggccaaacatgaacactgtcagcttcctggactgttagctcctctcccaattccaaaagaggcctggcaggacatctccatggattttattgaaggtttaccgcgctctgatggttataatgcaattttggtggtggtggatcgttttactaagtatgcgaatttcattcctttgcgtcatccattcactgcatcacaagtggctcatttggtggacaaaactgtatttaaaactcatggcatccctcgttctattgtgtctgatcgtgatcatctctttactagcaagttctggacaactctttttgctacttgggacactcaattacagatgagcacagcatatcacccgcaaacagatagccaaacagagcgtgtcaatcaatgtttggaaatgtatttacgatgcatgactcaggctaaccctaagaagtggagccattggattcatttggcagaattttggtgcaatacaaattatcatacatctcttggctgttctcctcataaggctctttttggggtggatcctcattattctcaagttcctgatctgacattggctactctgcctgatgtgcagcagttaactcgagcccagctgcgtatgaagaacaaggctgataaaggtcgttctgaccgtgtttttgctgtgggtgatgctgttttcttgaagttacagccttatgctcagtcctcagtagttaatagaccatatcctaagttggcttataagttctttggcccttttactgttttggagcgcattggagtggcggcttatcgtttggatctacctgccagcagcactgtgcatccggtgtttcatgtttctcaactcaaagctcaggtgccagatcatactcctgtttatacttctttgccatccccagtggttcttgatgctgctgacgttgttcctgaggcgattttggagcgtcgactagtgaagcgcggcaatgcagctcatgtccaggtgttgctgaaatggtctttattaccagcagatcatgctacttgggaggactatcatgttgtgaagactcgctttccagatgctccagcttggggacaagctaaaactcctgcgggcggcactgtcatgaccggcaatggtgacactgagaaagaggtttaa

SEQ ID NO: 11632 - DNA, 3999 bp, Oryza sativa
  Clone ID: TFbOSC13017j.C1.o6.fg
atgccggctcgcaccaggtccgttaacagtttggatagtgtggatggatttgacgctagagctgagatcctgcagcttaggcgggagatgacagatctgagtaatctgagaggtgagatgggagaaatcaaggaccttttgaagagtatttgcacagctctacctggatttcactctgctggtgcgagtactagtgggacggctggtgcaggtggatctgcagggacccaggctatggctggtgcaagtgtatctgcaggagcacaggctgctactgggacaggggctttgattgcaccattagttccccctggattttcatcagtggcaccaattttatctacgggaggaatgcagtcaggagtggctctacctcaaactgctgatgagactcaggtaaactcaactaatgcaattccttccagtcagatacatgctggtatgggaagtgtttttccatcaacaagtcttccaccaatttttccaatacacatgtctggtgctgttccttctgttggacatgtgaatttttctattgagccaaacactgttaacccaaattttgcaccaatattcacctcagcaccaatattcacttcagctactagaactcaggctggtcatttacctggggggttaaatatacatggagtggagtctcaggaggatgtgggaatgaatcattatggaatagaaacaaaccagccatggaggtatccgcagatgcagccaacagccagacctcatctgaatgctacagggatacatatggcaaatggaggaggacctgtttggccagaaggacccagacatctgtttggtgggatgcctaatccatatgctgacatgacactaagaagccagaggttggagttaacaatatttaatggagaagatgctattgggtggttacaacaatgcgagaagttctttgaaatgacaggaacaccagtagagcaatgggtgaatttagccactgggcacttggtaggaagagctgggaagtggtttagaaatcttgggataccatggcattatattaattggccccaattttacttgatgatttcagatagatttactgaggcaaatgcacacgaagctgtggagcagttgcagaatgtgaggcagactggttctgtcatgcattatattgataaatttgaggatagtgttgcattggttaaaagggatcatccctatctgattgagtattatattttgagctgctttattgggggtcttagagctgatatcaaacatgatcataagtgcaggacagggaaggtgatacatatgatggaagaagtagaggatgaagaagaggaatcaggaagtcctgaagaaaaccaggaaggggaatatcaaacagcacctggaagtcctgctaagaaagaagatgataatgaagaacaactgatgcagatttctactcatgcaatacagggtacatatggaatcaatacattctctttgattacctatgttaaaggaaggaaagttgtggcattggttgacagtggtagcactaataccttcatgaattatgaatttgcattgagaagtgggtgtgaaatcatagaatttgaccacaatagagtcatggtagctgggggaggaatacttaattccacagctaaaaccgaggtgatccagtacaaggtccagggatatcttttcgtacatactctcaagactttggagatggagaatgtgccagtccctgattctgtagcaactatcctagctggatttgcagaggtttttgctgagcccaaggggttaccacccagaagagaatgtgatcatgctatcccacttaagatgggagctgaaccccctaatcagagaccatatagagtaccacaccagcagaagaatgcaatggaggaaattataaaggaactcctggagtctgaagagattaggcccaatttgagtccttactcttcaccagctgttatggtcagaaaaagggatggcagctggagaatgtgtgtggactatagacaattgaatgcaagaactattaagaacaagtttcctatgccaattgtagaggacttgctagatgagttgaatggtgctaagctggtgagaaaatgtgtactggtattcttcgatgacatattgatttacagcaaaaatctggaagagcatgaaaaacaattgcagtgtgtcctatctattttgagatcccacaagttatatgctaagaggagtaaatgcacatttgcagcaccaagtgtagaatatctggggcatatagtatcaggagaaggagtggcaaccaagcccagcaaaattaaagatgttctagaatgggcagtcccagtgaatataactaagttaaggggctttttgagattgacaggttactacagaagatttgttcaggggtatggtgctatctgtagaccactacatgatttattaaagaaggataatttccattggggtcctgaacagcagaaggcttttgaccaactaaagaagattatgactacttgtccagtattagctcttcctgatttcagcaaaccgtttgtattggaaacagatgcttgtggttcaagcattggggcagtactaattcaagagggcagaccaatagcttattatagcaaagctctggggcagagagcagcagggtcatccacttatgaaaaagaagcaattgccattttggaagcacttaaaaaatggaggcattatttgctgggtaatcaagtgattataagaattgatcagcagagtcttaagtatatggctacacataaactttcagaaggaatacaacacaaattattgctgaaactcctggagcttgactataacattgaatataaaaaagggaaagaaaatgcagcagctgatgcattatcaaggagagacaccaaagaagtggaagagaaggaaaaatgctatgcaatcacattggtctatcctgaatggatagaggatgtgaagagcagttatctaaatgatgcccaatatatgaaattggtggatggggaggaactaaatgaagaatctagcaatttttctttgggtgctggaatactaagatacaaaaacaggatatatgttggcagtactactaatatcaggaacaaactgatacaagctttccacaaatcagcttttgggggtcattctggagttaaagtcacttaccaccgaatcaagaagattttctattggccacagcttaagaaggaagtggagaaaattgtctctgaatgccccacttgccagattacaaaagctgagcatgttcattctcctggtcttctagatcctctgcaaatacctgaaatggcttggacacatatttctatggattttattgaagggctgccaaagtctcaaggcaaagatgtcacaccgtatgaagcactatatggtgtacatccacctcagaatggggagcaagctatccctggaaatgtaactgaagaaatcagaatcactgctcaacagagagaagagttgatgttgagattgaaagataacttgttgagggctcagaatcgaatcaggaaatttgcagacagacttaggtctgaaagaagttttcaggagggagacatggtgtatctaaagatgcaaccttatagacagaacgcttttggcttgaggggatcactgaagcttcgtgcaaagttctatgggccatttagaatcctgaaaagaattgggaaagtggcttaccatctgcagttaccggaggaagctggaatacatccagtgttccacgtaagccagctgaagaaacatgtgggaaatttggttgtaccacttcctaatcttccattggtggatgaagatggtaacatcaagactgaacctgtcgctgtactagcaagaagggtagttccaagaagaaatgagccggtcactcaatggcttgttcactgggaaaatctatctcctgaggatgctacttgggaggactctgcttttattcaagcaacgtttccacattttcgaccttga

SEQ ID NO: 11633 - DNA, 4134 bp, Oryza sativa
  Clone ID: TFbOSC400920j.C1.o23.fg
atgccggctcgcaccaggtccgttaacagtttggatagtgtggatggatttgacgctagagctgagatcctgcagcttaggcgggagatgacagatctgagtaatctgagaggtgagatgggagaaatcaaggaccttttgaagagtatttgcacagctctacctggatttcactctgctggtgcgagtactagtgggacggctggtgcaggtggatctgcagggacccaggctatggctggtgcaagtgtatctgcaggagcacaggctgctactgggacaggggctttgattgcaccattagttccccctggattttcatcagtggcaccaattttatctacgggaggaatgcagtcaggagtggctctacctcaaactgctgatgagactcaggtaaactcaactaatgcaattccttccagtcagatacatgctggtatgggaagtgtttttccatcaacaagtcttccaccaatttttccaatacacatgtctggtgctgttccttctgttggacatgtgaatttttctattgagccaaacactgttaacccaaattttgcaccaatattcacctcagcaccaatattcacttcagctactagaactcaggctggtcatttacctggggggttaaatatacatggagtggagtctcaggaggatgtgggaatgaatcattatggaatagaaacaaaccagccatggaggtatccgcagatgcagccaacagccagacctcatctgaatgctacagggatacatatggcaaatggaggaggacctgtttggccagaaggacccagacatctgtttggtgggatgcctaatccatatgctgacatgacactaagaagccagaggttggagttaacaatatttaatggagaagatgctattgggtggttacaacaatgcgagaagttctttgaaatgacaggaacaccagtagagcaatgggtgaatttagccactgggcacttggtaggaagagctgggaagtggtttagaaatcttgggataccatggcattatattaattggccccaattttacttgatgatttcagatagatttactgaggcaaatgcacacgaagctgtggagcagttgcagaatgtgaggcagactggttctgtcatgcattatattgataaatttgaggatagtgttgcattggttaaaagggatcatccctatctgattgagtattatattttgagctgctttattgggggtcttagagctgatatcaaacatgatcataagtgcaggacagggaaggtgatacatatgatggaagaagtagaggatgaagaagaggaatcaggaagtcctgaagaaaaccaggaaggggaatatcaaacagcacctggaagtcctgctaagaaagaagatgataatgaagaacaactgatgcagatttctactcatgcaatacagggtacatatggaatcaatacattctctttgattacctatgttaaaggaaggaaagttgtggcattggttgacagtggtagcactaataccttcatgaattatgaatttgcattgagaagtgggtgtgaaatcatagaatttgaccacaatagagtcatggtagctgggggaggaatacttaattccacagctaaaaccgaggtgatccagtacaaggtccagggatatcttttcggtaaagcattccagttgattcctttaaaggggtatgatattgttttgggggcagactggatatatgagcacagtccaattaatttggacttgaagcagagaactctgacaatgaacaaaatgctggacaaaaatgttatggggtttgtaattgaagtacatactctcaagactttggagatggagaatgtgccagtccctgattctgtagcaactatcctagctggatttgcagaggtttttgctgagcccaaggggttaccacccagaagagaatgtgatcatgctatcccacttaagatgggagctgaaccccctaatcagagaccatatagagtaccacaccagcagaagaatgcaatggaggaaattataaaggaactcctggagtctgaagagattaggcccaatttgagtccttactcttcaccagctgttatggtcagaaaaagggatggcagctggagaatgtgtgtggactatagacaattgaatgcaagaactattaagaacaagtttcctatgccaattgtagaggacttgctagatgagttgaatggtgctaaggtattctccaaactggatctgagatcaggcaaaaatctggaagagcatgaaaaacaattgcagtgtgtcctatctattttgagatcccacaagttatatgctaagaggagtaaatgcacatttgcagcaccaagtgtagaatatctggggcatatagtatcaggagaaggagtggcaaccaagcccagcaaaattaaagatgttctagaatgggcagtcccagtgaatataactaagttaaggggctttttgagattgacaggttactacagaagatttgttcaggggtatggtgctatctgtagaccactacatgatttattaaagaaggataatttccattggggtcctgaacagcagaaggcttttgaccaactaaagaagattatgactacttgtccagtattagctcttcctgatttcagcaaaccgtttgtattggaaacagatgcttgtggttcaagcattggggcagtactaattcaagagggcagaccaatagcttattatagcaaagctctggggcagagagcagcagggtcatccacttatgaaaaagaagcaattgccattttggaagcacttaaaaaatggaggcattatttgctgggtaatcaagtgattataagaattgatcagcagagtcttaagtatatggctacacataaactttcagaaggaatacaacacaaattattgctgaaactcctggagcttgactataacattgaatataaaaaagggaaagaaaatgcagcagctgatgcattatcaaggagagacaccaaagaagtggaagagaaggaaaaatgctatgcaatcacattggtctatcctgaatggatagaggatgtgaagagcagttatctaaatgatgcccaatatatgaaattggtggatggggaggaactaaatgaagaatctagcaatttttctttgggtgctggaatactaagatacaaaaacaggatatatgttggcagtactactaatatcaggaacaaactgatacaagctttccacaaatcagcttttgggggtcattctggagttaaagtcacttaccaccgaatcaagaagattttctattggccacagcttaagaaggaagtggagaaaattgtctctgaatgccccacttgccagattacaaaagctgagcatgttcattctcctggtcttctagatcctctgcaaatacctgaaatggcttggacacatatttctatggattttattgaagggctgccaaagtctcaaggcaaagatgtcacaccgtatgaagcactatatggtgtacatccacctcagaatggggagcaagctatccctggaaatgtaactgaagaaatcagaatcactgctcaacagagagaagagttgatgttgagattgaaagataacttgttgagggctcagaatcgaatcaggaaatttgcagacagacttaggtctgaaagaagttttcaggagggagacatggtgtatctaaagatgcaaccttatagacagaacgcttttggcttgaggggatcactgaagcttcgtgcaaagttctatgggccatttagaatcctgaaaagaattgggaaagtggcttaccatctgcagttaccggaggaagctggaatacatccagtgttccacgtaagccagctgaagaaacatgtgggaaatttggttgtaccacttcctaatcttccattggtggatgaagatggtaacatcaagactgaacctgtcgctgtactagcaagaagggtagttccaagaagaaatgagccggtcactcaatggcttgttcactgggaaaatctatctcctgaggatgctacttgggaggactctgcttttattcaagcaacgtttccacattttcgaccttga

SEQ ID NO: 11634 - DNA, 5454 bp, Oryza sativa
  Clone ID: TFbOSC416668j.C1.o17.fg
atggagaagagtggccgccggccatctcgctcttgcacgcgctcgccggtaagactagggagctcgcctagctccttcccaccggtcgtcgcccttgtccccgatggctgccgtgtcagggactctccactgtcaactgttgagggtggtgccattggcgggaaggatctgaatgcagaagaggaggaggacgtccagacttctcaaagcgacatctccacaggcaatggtcatcggccggttcgggagcgtaggcccaacccaagagtgttaggccctgaatgggtggcgcgtaggcggcggcggctcgatcctgtcggatctgagaggaaataccacatagttgccacaatttcgcatatatctgagttgttcttgagagtccctaacaatctggtatcagagccattcgcgctgcaaaatcctcttggtttagccgtaaaatttccgggagagaggtgggatcctgctaccttggtggcgtgtgatccacaaaagcttcggctccctcaatctgagaatgaaaggaagagagaggaagcggaggtccgaaccagggcggagtacctggatctgaagaagtcggtggaatctcgtattccggcggtggagaagagggtagaagatctgggcgcctcgctgcagtcgctgagtaccaaggtcgagcacctcgagggcagtctgatgcgtcacaccaagttggagccagatgctagtactgccaagactgggggatctggaattatcaaggaagagcagaaccaacccaacacagatctgacttccccttctttcggtatgaatgaaaatttttctctatcccgtgctccttttggatttgaacctagaacaccttctcttgacagtggaattgctagttacaatttgagtagcactattcctcccatgacatgcccccagttttgtggtgacaacccacagatgtggaaggttaattgcgaacaatattttgatgtgtttggtatccagcaaattcattgggttaaaattgctactctcaatttttgtggtaatgccgcattttggttgcaatctgtccgaaatcagcttggtggtattacttgggtgggtctctgtgatttagtgtgttccagattctctaaggatagacaacaagctcttattagacaatggttccatatcagacaagatggttcagttgctgaatacgttgagaaattcgatagtctaatgcatcagctccttgcttatgataattctctattgccagtctattttgtcactaaatttgtggaagggcttagaagtgatatcagagttgtagtcctagttcagagaccccaggatatggactcagcttgtgctgtggccttacttcaggaagaggccttggagggtgttcagtctactcagtataaaaaacctgacacctcaatacctattcgcaatagtcacaagggtgctggggttcttccatccaccttgccacctaaacaattgttatcaccacaatctgaagataggaggggcactgaatcagcaagagcaagagatgataagctctctgctctaaaggcttacagacgatccaagggactctgttttacttgtggtgaaaggtggagtagagaccataagtgtagtactgctgtgcaattacatgtggtccaagaattgctagatgccttgcaagatgttaaaactgttgaggtgtctgatggggaacagtttctgcactgtgaggacaccagtgatttaatggctatctctcagcaggctatctggggtacagaatctcctaactcattcagattaagaggatgggtccagggtactgaattacttatgcttgtggactctggtagtacccattcctttatggaggaaagtattggtctcaaattggctggagttaaacccttgagaagcaagttatctgttaagttggctgatggcgaaactctttcttgctcatatgaagttaccaattgtaggtggtggatgcagggacataactttattaacaatttcaggctcctgaaccttggtggttatgatatcattctgggcatggattggctggaacaattcagtccaatgcaggttaactgggtggacaaatggatggatatcactatttctggacagcctgtcaggttgcaaggtattgtatcccaggtttctcattgctctcctatttccacagaacaatgtctgggtatggtcagacaaggatctctcatgtatttggttcaactcacttcttctgaccctgtgactaaggaacccattcctgctgctgtacagcaacttattgattcatttcaggcagtttttgctgaacccaatggactacctcctaaaagatattgtgatcataccattcctcttgtccctggagcagcccctgttaacttgagaccttacagatttaatccagctctcaaggatgaaattgaacaacagatttcagatatgcttaagtctggggttatccaaccaagtcatagtgccttttcttccccagcccttctagtcaaaaagaaagatggtacttggagattggtgattgattacagaaagctgaatgctatcactgtcaaaggtacttatcctatgcctgttatagatgagttgcttgatgaacttgctcatgctaaatggtttactaagcttgaccttagagctggataccaccaaattcgcatggctcctggtgaagagtataaaacagcttttcagactcatactggccattatgagtataccgttatgtcctttgggcttactggggcacctgccacttttcaaggggcaatgaatgagacattgagtcccgtgcttaggaagtttgcacttgtgttttttgatgatattcttatctatagccctgatttctcatctcacttggaccatattgctcaagttctctcactcctctccaagcatcagtggtatgtcaagttatccaagtgttcttttgcacagaaacaactgacatacttgggtcacactataagtgcagctggagttcatactgaccaaggtaagattcaggaggtagtgaactggaaggtgcccactactgtgaaaaaacttaggggttttctgggtcttgctggttactaccgcaaatttgttaagggatttggagttatcagtaagcctctgactaatctcttgcgaaaaggagttcctttcatttggactcctgaaactgatgctgctttccataaccttaaacaggctttggtttctgctcctgttctggcattacctgactttcaaaaggtgtttacagttgagactgatgcttctgattccggcattggagctgttctctctcaagatggacacccagttgcttatatcagtaaggctttaggtcccagaactaaaggtctttccacttatgaaaaagagtgcatggcagttttactggcagttgatcaatggagatcttatttgcaacttggtgactttattattctcactgatcatcatagtttaatgcatctctcggatcaacgtttgcatacaccatggcagcataaagcttttaccaaactcctgggtctatcttataagatttgttacagaagggggtctcataatggggcagctgatgctttatctaggaaatttcagcatgatgaggaagaattatgccacatttcagcctgtactccaacctggctccaggaagttaccacagggtatgccagtgattcttattccagtcagttgctcactgaattaactgtacagcccaatgcaagaaaacatttctctcttcatgctgggttgcttaaatataaaggaaggatatggattgggaataacagacagctccaattgaaattactaactgaagttcattccaatccaattggggggcattctggtttccctgttacttataggaaactaaagcaactttttgcttggcccagtatgaaaaaaatgactaaactatttgtgcagcagtgccagatatgtttacaggctaaacctgatagagctaaatatcctggtctccttcagcctttacctgttcctgagggtgcttggcaggtggtctctttggattttattgaagacggccaaacagaaagggttaatcaatgtctggagatctatctgaggtgctttgttcattcagctcctagcaagtgggcagcttggttacatcttgcagaatattggtataatacctcatatcactctgctgtccagtctactccctttgaagtgctctatggtcattccccttgtcattttggcatcagtttacaagattgtgccattcctgatttacatgtttggttaaaggaaaggcagttgatgcagaagcttgttcaacagcatcttcacagagcacagcagcagatgaagcattttgctgataagaaaaggagttttcgtacttttgctattggagactgggtgtacctcaaattacagccctatgttcaaacttctgtggctgtcagagctaatcacaaattggctttcaaatattttgggccatttcaaattacagcacagattggaactgttgcttataaattgcagttacctcccaccagttctatacacccagtttttcatgtgtctcaattgaaatctgctactggctttacaggacatgttcagtctcatctgccatcgtctatctctgccttgcaagttccttggcgcattctggacaggcggcttgctaagaagggtaattctactatctctcaagttttggtgcagtggtctgagtcccctccagaagatgccacttgggaagactatgaagaattgcatgctcgatttcctgctgcattggcttgggggcaagccaattctcaaggggtggggcttgtcagggactctccactgtcaactgttgagggtggtgccattggcgggaaggatctgaatgcagaagaggaggaggacgtccagacttctcaaagcgacatctccacaggcaatggtcatcggccggttcgggagcgtaggcccaacccaagagtgttaggccctgaatgggtggcagctgacaacgacaagttgctgcgcccactcgccgtacatggcgcgcgccatgggcacgccgacgacgagcgagttggtcagcgtggacagcgagaagctggtgatggaccagcgacggcgcagccgcctttgctcatgaaccgtgcccagacgccgatgacggcgatgggttcgtctggactagattcagatcccttgggatccaccaagagaggcttgagctcggcagaggcggcgagggggtcgggtgaggcgcgggcagcacgaagtcgagcggcgaggtcgggctacgaggaggcagcggcgaggtgctcctgccgctcgtggagctcgtcgcgggcggcgaggaggcggtcggagaggcctggggacgaggagagcggcgcgagcgccaaagcgagagaggaaaggggagagagatga

SEQ ID NO: 11635 - DNA, 4392 bp, Oryza sativa
  Clone ID: TFbOSC400800j.C1.o14.fg
atggccgagcccaccatcgccgacctcttgaaggagatcaagaacatgtccgccgaactcacctccctgaaggccgatatggcgaccatgaaggacaaggcctcgacggccgcaagcaccgagactcgccaccctgatgggttgcgcgacctcgacctgcctccccggcccaagaagtgggattttccccgctacgacggcaccacggatccgctgctcttcctcaacaaattcgaggcgtacttccgtcaccaccgtaccatggccgaagagcgcgtcggcatggcgtcctaccacctggacgacgtcacgcagacttggtacacccagctgctcgaggatgagggaaccccgacgtgggggcgcttcaaggaactcgtgaacctgcgtttcgggccacccctgcgttcggccccgctcttcgaactttccgagtgccgacgcacgggaacagtggaggaatactccaaccgcttccaggccctcctgccgcgcgcgggtcggctcgacgagtcccagcgcgtccagctcttcaccggcggtcttctgccgcctctcagccacgccgtccgcatccaccatccggagacgctcgccgccgccatgagcctggcacgccaggtggagttgatggagcgtgatcggccggcgccacctccactacgtgctccgccgcgtgggctgctacctgcgcctgcgccacggctcgcgttacccgcgcccgcgcagcagttggcgctgcctgccccaccagcggccgccccacagggtcgcgacgcggccaacccacggcgcctgacgccggaagagatggccgaacgctgccgccaaggtctgtgcttcaattgcaacgagaaattcacccgtggccacaacaggttctgccgtcgcctcttcttcgtcgacggggtggagatcgacgacgtcgcaatcgagggtgacgcggcggccgccgccggggatacggaggcgcccgtgttctccctgcatgccgtcgccggcgtgcccatcgcggacacgatccagctccaggtgaccgtcggcgatgcctccctcctcgccttgctggatggaggctcgacgcacagcttcatcggtgaggaggcggcaaggcgcgccggcctcccgatccagtccagcccgcgcatgacggccatcgtcgccaacggcgaacgcgtggcctgccctggtgtcatccgggacgcggcgttcaccatcaacggctccacattccacaccgatctctttgtgatgcccctcgcaggtttcgacgtggtgcttggcactcggtggctcggcacgttgggtcccatcgtgtgggacttcacctcccggtcgatggcgttccagcgagacgggcaacgcttcgcctggaagggcgtggcctcgacctcaacaacgcacctgcgtaccctagccgcggccagtgggacgctcctggatgagctcctggtcgcctatgaggacgtcttcggcgaaccgacgggcctcccacctccacgtggccgcgaccacgccatcgtcctcaagcctagctccgctcccgtggcggtccgtccgtaccgctacccagcggcgcacaaggacgagctggaacgccagtgcgccgcgatgatcgagcagggcgtcgtccgccgcagcgactcgcccttctcctcgccggtcctgctcgtcaagaaggccgacggctcgtggcgtttctgcgtcgattaccgcgccctcaacgccctcaccgtcaaggacgcgttcccgattcccgtcgtcgacgagctccacggcgcccgcttcttcaccaagctcgatctgcgatcggggtatcaccaagtgcggatgaggcccgaggacgtccacaagaccgccttccgtacacacgacggcctctacgagttcctcgtcatgccgttcgggctgtgcaacgccccggcaacgttccaggcgctgatgaacgacgtgctccgaccgtttctgcgacgcttcgtgcttgtcttctttgatgacattttgatttacagtgagacttggaccgaccacctgcggcacctgcgtaccgtcctatccgtgctccgtcagcaccggctcttcgtcaagcgcagcaagtgcaccttcggctccccctcggtgtcctacctcggccacgtcatatccgaggcgggcgtcgccatggatccggccaaggttcaggctatccacgagtggctggttccccgttcggcacgggcggtgcgcagcttcctcggcctcgccggttactaccggaagttcgtccacaactacggcaccatcgctgccccgctgacggccctcaccaagaaagacgggttctcctggacggaggacaccgccgctgccttcgacgcccttaaggcagcggtgacttcggcgcccgtcctcgccatgccggacttcgccaagccgttcaccgtcgagggcgacgcgtccacccacgggttcggcgctgtgctggtccaggacggccaccccgtggcgttcttcagccgccccgtcgtgctgcgtcatcgtgccctcgctgcctacgaaagggagctgatcggcctggtgcacgccgtacgtcactggcggccgtacctctggggccggcgcttcgtcgtcaagaccgaccactactccctcaagtacctgctggaccagcgcctcgccaccattcctcagcatcattgggtgggcaagttgctgggattcgacttcgccgtggaatacaagccgggcgctgcaaacactgttgcggacgccctgtcaaggcgcgacacggaggagggcgccatcttggcactgtctgcgcctcgctttgacttcatcagcaagctgcatgacgcgcagcgccaggacccggcgctcactgccctccgcgacgaggtcagcgccggcacgcgcacgggcccctgggcgctcgtcgacgacctgctgcagtacaacagctggttatacattcccccggcatcgcccttagctcgggagatcatcgaggctacacatgaggacgggcacgagggtgtcaagcgcaccatgcaccgcctccggcgcgagttccacatccccaacatgaagcagctcgtccaggactgggtacgctcctgcgcagtgtgccaacgctacaagtccgagcacttgagcccggccggcctcctgctgcccctgccggtgccccagggcgtttggaccgacatcgctctagatttcatcgaggcgctaccacgagtgcgcggcaagtccgtcatcctgacggtggtggacaggttcagcaaatactgccacttcatcccactggcgcacccgtactccgccgagtccgtcgctcaagccttcttcgccgagatcgttcatctacatggcgttccgcagtccatggtgtcggaccgcgaccccatcttcacctcgacgttttggcgcgaactcatgcggctgatgggcaccaagctgcacatgacgacggcattccacccacagtcggatgggcagtccgaggctgctaaccgggtgattattatgtacttgcgttgcttgacaggggaccgtccacggcaatggctgcgctggctcccatgggcggagttcatcttcaacacggcgtaccagtcctcgcttcgggacaccccgttccgggtcgtctatggcagggatccaccctccatccgctcctacgaagcgggggacacgcgggtcgccgccgtcgccaaaagcatggaggagcgggctgagttcctctttgacatccgctaccggctcgagcaagctcaggcggtccagaagctgcactatgacaagcaccaccgccacgttgcataccaggtgggcgactgggcgctcctccgcctgcgccagcggcccaccacgtcgctccctcagtccggcacgggcaagctgaagccccgcttctatgggccataccgcatcaccgagctcatcaacgacgtggccgtccgcctggagctaccggccggcgctcgtctccatgacgtgttccacattggcctgctcaagaagttccacgggccgccaccgggtgcaccaccggcgctgcctcctctccatcacggcgccatcgcccctgagccggaacgtgctgttcggtttcgtttggcgcgaggcgtgcgccaggcccttgttcagtggaagggcgagtctccggcttcggcaacttgggaggacatcgaagttctccgtgccaagtaccctgcccttcagctcgaggacgagctgagtctcgaggaggggggagatgtcatgtgggggaagacctacaccaggagacaccgagccagagatgtgcgccgggcagcagaacgtgcgggcgcacgcatggacgcagaacgcgcggtgatcgcgggcacggcgcatgcaaccgaggatgaagcgatcagcgcaagtggctga

SEQ ID NO: 11636 - DNA, 4275 bp, Oryza sativa
  Clone ID: TFbOSC900060j.C1.o13.fg
atggcggcggcggaaactgagttgggagatctgagtcagaaggtggtgaatctcacaagcaacctcaacaacatcctgggatcactcaccaagctggagacatggattccggcggttgatgtgggaattcaaggtttgaacaatgtggtggaggagatctcagcaagggtgacgaagctggagagcatgctagcgacggcgacgttcgcggcggctcaaacgcccgtaggacccgacaatgttgagaatcaccagggcaacgcatccaaagcccttgtggctcatgagcgaaccctggtcaagggtaagtctcggttgccgatttcccccgtcaatttcgatttgggtgaagcgtctgtgcagagtcagtttagcagtcgatccagtagccctagattgccaaaaactaatttcccaaggtttgatggagataacccaaaactgtggaagaagaactctgaaaaatactttgatatgtaccaagttccctatgatagttgggcaaattttgctactctgcactttgtgggtaatgctgcactgtggttgcaaacttatgaggctttgcatagtgttgagacttggcctgaactttgtgtagtagtgcataataagtttgggaaagataaatatcaggagcacttagaggagttagagagtcttaggcaaaccagtggggttgatgcatattatagcaaatttgaggagttgatgcacagagtcttagtgtataatcaggcttttgatgagacatattttgttaccaaatttgtgggtggccttaaaactgaaatcaaagcagcaatcaagctgcataaacctagaactgttgatgcggctttgtctcttgctaaaacgcaggaagatttggcgttggagataaagaaaggaggtcagaagtccacttataaggaaggatttaaatcaacagctttcagggtaaactaccaaggcaaaggtatactgggacaagctcctgatgacaccaccaagacagaagaaaagccaaagtgggaggattgctttgagtctctcaaggctgccagaaaagcaaagggagaatgttttaagtgtggtgagaaatggggaccaggtcacaaatgtccaaaatatgtccaacttcatgtccttgaggaattattggaagtgtttcaacttcgtgaggatgacgaggtgtgtcagaatgaagaggctgagagtagtgaagaggaacttgttgtctcagaatgtgttgtgtctggaactatgggaaagaagaccatcaggttgcaaggattgatacagaatcatgaagttctgattctcattgattcaggaagctccaacagtttcatttctcaacagttggtggaaaagttggggttggctgttacagatattcctttatctcaggtgataattgcggatggtggggttatgcagtgtgataagttggctataggggtggagtggtggtgtcaaggacacagtttcacaaatgaccttaaggttctgaaactgggtggttatgatatcattttgggaatggactggttggagcatcatagtccaatgtggatacattggcagaggaaaaagcttaggtttacataccagggaaagagaattaatctagttggggtgaaggaaaatttgtctgattgtaaatctgtcacttccaagcagttgaaaggaatgcttaagactggagcagtttcccaagtggttcagttatgctcaattgctgaagaaagtttggagactgaactacccccaactattagtgcagtcttgaaggaatttcaagaacagttcaaggcaccttcaggactaccacctcacaggagttttgaccatagcatacctttactgtcaggatctaaaccagtcaatgttaaaccctacagatatgctcccaagcaaaaggatgagatagagaggcaggttaaggaaatgttgctccagggcatcattaaacccagctcaagcccatttgcttctcctgtgttgctggtgaaaaagaaggatgggacttggagattttgtgtggattacagaggtttgaacgatattacagtgaagaataaatatccaatgctagtggtagatgagttgcttgatgaattatcaggggctcaatggttcacaaagttagacctcagatcgggttaccaccaaattcggttggtccagcaggatgaacataaaaccacctttaagactcatcaagaattgtatgaattcagagtaatgcctttcggattgactaatgcaccagcttctttccaaggactcatgaacacaatctttgacaaaatgatcagaaggaatgtgctggtatttgtggatgacatactagtttacagtaaaactctcgaggaacatgtgcaacatttgagggaagtctttgcagttctgcagcaacacaaattgtttgtcaaggcaagcaaatgttcatttgctaaacaacagttggaatacttgggacacataattggagctcaaggtgtggccacagatccttccgaggtacatgctgttcaagattggctagttccaaggaatctcaaacagctaaggggttttttgggactgacaagctattacaggaagttcataaaaaattatggaattatgaccagacccttaactgcattgctcaagaaaggggtgcctttcaagtgggctgaattgcaacaacaggcatttagtcaagttaagtgggctatggttcaagcacctgtgttggctttaccagatttttcccaggaatttattgtggaaactgatgcttgtgataaaggaattggggctgtgctacttcagaatgggcacccaattgcttatttgagtaaagctttaggggttaaagctcaagcattgttcacttatgagaaagagtgtcttgcaatattgatggcagttaacaaatggagagcttatttacagaacaatgaatttgttatacagactaaccacaagagtcttacacatttgggggaacagaaattgactactagcatgcaacacaaagcattcatcaagttgatgggtttgcaatataagatcagatataaacaaggggcagaaaacagggtggctgatgccttatctaggagggatgcagatgaggagttgtcggcaatctctgttggaagacctaaatggttggaatctgtggttgattggtatgatcaagatgaggaggcaaaacagttgctggctcaactgataatcaatctagtaggggtagaacatttcaccttgactaatggagtaatcagtgggctaggaggacattctagaataacagccacctataatagaattaaaaatctattctattggccgggaatgaaaaaagatgtttaccagtatgtgtcatcctgtgacatctgtcagcaagccaaacctgaacattgtaagagtcctggtaaactacagcctttaccaattccagagcaagcttggtcaaccattagcatggattttattgaaggtttacccaagtcagaaggctttgatacaattcttgtagtggttgacaagttctcaaaatttgctaagtttatacctctcatcctttcacagcactacaagttgccacagcttttatcaagaatgtttatgatacatttgggatgccacagtgctctgaagaaatctccctatgaagtgctctttgcaaggaagccaactccttttggtcttattgatgttggaaaaagtacagtccctgatgtgcaaatttggttgcaaaacagagctcatatgaatgaggttctacatcaacaactgactagagcacaacagaggatgaaacatcaggctgacaagcatcgttctgagagggtttttgcagttggtgacatggtttatttgaaacttcaaccatatgtgcaaatgatagtagcacgaaggagttgtcaaaaactgtgtttcatgtactttggcccctacaagattctggaacgtatcggtgaagtagcttatcggctggatcttctccagagtagccaaattcatccattagtgcatgtgtttttgctcaagaaggtgattcattctggcatacaagtccaggcggatcttcctgaaaactgtgtttctgaagaagctgaggtggttccagaagaaatacttagtcgtcaactcattaagagaggtaattctgcagttccttacgggttaattcgctggactggtttacctgcatcgctggctacatgggagaatctgcgtcaacttcagcttcgttttccaggagctccggcttggggacaagccgtttcttaa

SEQ ID NO: 11637 - DNA, 1515 bp, Oryza sativa
  Clone ID: TFbOSC401061j.C1.o30.fg
atggcgcgtgggaagaatcacccggacggggaggaggaggaggcgccggcggcggcgggggaggaggaggcgccggtggagatggacgaggagggggagatggaggaggaggaggaggaggagcagggggagggggagggggaggagagagacgaaggggaggaggaggaggagtgggaggatgcggaggaagtggaggggggagaggagagcgagcaggcggcggcggaggaggaggattcgccgctggtggtggtggaggccgaggcggcggcgcctgtggtggatggctccccgccgaagctggcggaggggtactacgagatcgaggacatccgccgccgccgcctccgcaaggggaagctccagtaccttgtcaaatggggttctcaatgggagggtggggcatgggacctcgcagccccggagctgtcaggaaggataagaacagaggactggaaagaccaagaggaaataacttattgtttgcctaaacaagtgcgtgttgatgtggaccatgtggtaaaagtgcccaggttgagaatggctgtggacactcatattgccatatttgggacaatacacctctacgagttcagctatgaagaccaagaacaggattgcgttcagaagaagcagcagtacggcaggcgtggatggccggaaagtgctaacacatgggagcccctagaaaacctgagtgcctgctctgacattattgatgctttcgagatgcggttacaatctccaaggcccggtcggaagcgtaagcggaagataacaactactccagtagcaggctcaaacccatctcatggtaaacggggccgccctcgcttggatgctaagtcccacactcgagctcctgcaccagaacctaagcaactgccctgtcggacaagttgtaggagagcgactaattgtagtagtaagacagttgcagggcttgatgcgtcagggagtgtggtgaggaaccagcttgcacagaacattgtacaggagggtagttccagtgtgatttcaaggacaccatgtcaggagctaccgctctcaattaggttgacggaccaacaaaacgagcatcaccttgtgaatggttcgtctaattctgagaacttagtgaaggtacctccatctcagggtggccaggtaactggtgccaagaagcgtaaatctggaaatgtgaggaggtttgagcagaataaaccaacacaaggacaaggagaatgtggagcattagtggtggctgaggatgttggttccactgaaggagaaactggcgataagaaaaagacagagggctgtcctaaccgagttcatatcaccaagatcatcaagccagtgcgatttgcagcagctgtgaacaacgatgtgcagcaagtttcaattacattcaaagcactcaggtctgatgggcaggaagtcatggtggacgacaaagaattgaaagcaaataatcccttgctgcttattagctactacgagcagtgccttcgttataatccgacttcgtga

SEQ ID NO: 11638 - DNA, 8799 bp, Oryza sativa
  Clone ID: TFbOSC400390j.C1.o75.fg
atgacgaagccatcatctaagacggaggtggagccatctcatgtgataccggtcacattggatgactttgaaggagaggatcgtaaagccatggaagagcacatcaacgagctcacacgggaggcgttgatgagagcaactactaggactcgtcaaggcgtgatcatcaagcccgggccacgtcccaaactcgctcccgacatggaaaaggttgatgggtttttaaggaataggctaggttctcttatggatgattacacattaaaagataaagcctataccactgttagtcaatctcccatagatccaatagggtctaaaaccgacggagcggcgttcacggccggtccgaccgggcctgatggccggggatatcctcccgatactaggcaaggccaatataatcatattgcgtcacaaactcaacctattaggccaccaaacccaccaccaaatccacaagggcctaataacatggaggatatgattagtgatattatgaggaatagattcgggatcgaaactaggaatcgtgctagagcttacaaaaagccatatcccgattattatgataatgtgtcgtttcctagaaattatagagttcccgaattttccaaatttagtggtgaagatgttgattactctgatgctagtgatagtgaggaggagggtgatcatgatatttatgttgccgaatggtcatggactaacaaaaataaaccttttgtttgttctaacttaatgccgactcttcgtaaagatcggcaaagtgaggttaaatatagttttgatgtggctaagtgtgataagattttgattatcttttgcaagagaagcaaattagattacctaaaggccatgtcataccttctcaagaagcgtcgagcatattgtaaatggcataattctcattctcactctactaatgattgcaatgtgtttcgacgacaggttcaatcggccatagatgagggacgattgaaattcaccgatggctccaagatgaagtttgatcatgatccttttccggtgaatacaattaatttcaataataagaaggtgttgattcggccggagcaagccgaatctaccaagggaaagaaagtggtcattggtgagccaaggcctaagatgatggtgccaaagaagcaggagattggcgtttggaaggagaataagggtgaagcttcgacttctaaggcccctagaaagaccaaagtgacttttgatatgcttttggaaaagtatgagaggcaaggtggtgagagggatcacaacaaagggaaaagaccaagatcacctcctagggagcgatttggtcattcgccaagacggtcatgttcacctccatattttcatccacaagacatgtcatggggtccttatccaatgccgccgccgggttatccttatccttactttatgccagggggggcaacgccgccaatgtacaatcatatgccgccaatgagattcaaccaaggatggggaggaccacggaggccaattcatgagcgtttatcttcaccaaacaaaagccgattttatggtaaaaatcgggttaatgaagagaagagggaaggaaagcgcgtcaagatagaagagaggacttcggaggtgattaccatcaagataggatcccatgatgtgcctataccttccgaagatggagttggaaagtccccaagtaaaaagtccgaagccggttctagctcctcgcagtcggccggtctgaccaggccttctggccggtctgaccgcggccatgttgccggtccgaccgggccatctggccggtctgaccgccgatctgacgacggtctgaccgacgcctcaggccggtctgaccgtgtgtctaacgtcgatctaaccggcgcatctggccggtctgaccggcggtctgctgccggtctgaccggtttccagcgccggtttgacgggagagttgcaaaaggcgatgtaagggcttcatcgtcttcaaacaaggttaataaaggacattatttacctcctggaacagagccgaatcctaggtggatgcctaaggatttgacggctacacaaaagagaaggttgcaacgtcttcgggcccaagaattaagggagaaaaaggccgaagagaaaagggataaaaggttcaatgagttgcgaccaccaccattttgtgctatggatgaagccgaggttgcccaattcttattaggtcctaaagacgcggtttttgagaaacccgatgaatcaaaccgtcacatgaagcctctctatctcaaaggccatgttgatgggaagccggtctctaggatgctagtggatggaggtgccgccgtgaacttgatgccgtattcgctattcaagaagttggggcgtgagggtgatgagttgaagaagaccaacatgattctcaatggattcaatggtgaaccaacggaggcgaggggtattttttcggcggagctcaccgtgggaaataagacgctaccaaccgctttcttcatcgtcgatgtgcaagaggctagtttagagtggttacaaaagagggtgcaagaatatcggtctacaaagaacgatattggtgaaactgttgaagattttgatgaagttgagaagcttggacaagggtttacatcggccgatccattggaagaagtagatataggtgatggaactaaaccaaggccgacttttgtacagaaaaacatgaaagccgattataaggttaaggtaatcgagctacttaaagagtatgttgattgctttgcatgggagtaccatgagatgccgggtcttagccgtgagcttgttgagcatcggcttccagttaaaccgggttttaggccttataagcaaccacttcgtcgttttaatcctttattatatgaccgagtcaaagaggagattgatcggttattaaaggcggggtttattaggccatgtcgttatgcggagtgggtttctagcatagtcccagtggagaagaaggggagtggtaaaattagagtttgcatagattttagatatttaaataaagccactcctaaagatgagtatcctatgcctatagctgacctgatgattaatgatgccttgggtcataaggtgattagctttttagatggtaatgtcggctacaatcaaatctttatggcggaagaggatatgtacaagacggcttttaggtgcccggggtttgttggtttatttgagtgggttgtcatgacctttgggttgaagaatgccggtgcaacgtatcaaagggcaatgaatttgatctttcatgatttgctaggtattatcttagagatctatattgatgatattgttgtcaaatcggatggtatggaaggccatatagccgatttgagattagcttttgagaggatgcgccggtatggtttgaagatgaacccacttaaatgtgcttttggtgtgtcggcggggaagttcttaggattcatggtgcatgagagaggagttgagattgatcctaagaagatagaaaaaattcatgatttcaaagcgccgacatgcaagaaagaggtccaaaagttgctaggtaaggtgaattatttgaggaggtttatttctaacctagcgggtaaaatcgatgcttttgttcctatacttcgcttgaaaaaagaagccgattttacttggggggcaaaacaaaaagagacgtttgaagagttgaagaggtatttatctactccacccgttgtgcgagcgcctaaagccggaaagccttttcggttatatgttgcctccgaggacaaagtcattggtgccgttttgacgcaagaggaagatggcaaggaatatatcattacatatttgagccgccgtcttttggatgctgaaacgagacatattgctaggtgtgataattctagagcaaatgacttggcacaacaaacatctggttataatgtaaaaagggggttatttctgatattagaagagccggtgcttgattttaaatttttgcgcaaaattggcaaagttggggaccagaggcggtctgaccgacgttgcacggccggtctgaccgtgaccaggggcggtctgaccggccacatgccgccggggcataggttcgtgctagtcgctacggattacttcaccaagtgggccgaagccgtacctttgaagaatatgactcatacggaggctaatggacaagccgagtcgagtaataagacattgttaaagctagtaaaaaagaagattgaggaacacccgaagaggtggcatgaggtgctttctgaagcattgtgggcacataggatatataaacatggtgccactaaagtcactccttttgagttggtttatggtcaagaagccgttttaccggtggaggtaaatcttggttctcttcgttatatcaagcaagatgatttgtcaagtgaagattacgagacgtttatgggagacaaccttgatgaagtcaccgacaagcgcttgaaggcattggaagagatagagaaagagaagaagagggtggccaaagcgtacaacaagagagtgaaagcaaaattgtttcaagttggagacttgatcgaggtggttggcgactctaggatcaccgcaaagcttaaggtgctgcgatcgtgcttgtcaacttgtcaaaaaagttgccaacagttccagaagatggactttccccgctatgatggcacgaccgatcccctgatcttcgtcaacagatgtgaatcttatttccatcaacaacgcatcatggaggaggagaaagtatggatggcttcatacaacctggaggacgtggcccaattgtggtatatccaactccaggaggacgagggtactcccagatggaatcgcttcaaggacctcctccacctgcgctttggaccgcccctgcgctcagcgccgctgttcgagctcgccgagtgccggcgcacgggtaccgtcaaggagtaccagaacagcttccaggcgctcctaccacgcgccggtccactgcaggaagcccagctggtccagctattcacggggggactccttccgccgctgagtcacgctgtgcggattcacaacccgcagtcgctcgcggccgccatgagcctggcccgtcaagttgagttgatggagctcgacaagccggctccagttcccgcccggccagcgccccgcggcctgctgccggcactgccccagcgcctcgcgctccctgcaccgccggcgagcgcacccgtggccaagatggaggccaaaccggtgaaacgcctctcccaggaggagcaggcggaacgtcgccgcctcgggctgtgctacaattgcgacgaaaagtactcccgtggccataaccgggtctgccgccgcatcttctacatcgacggcgtgacgctcaccgacgccgaggacgccgcgttggacgcggaccaagatggggaggcccctgtcttctctttgcaggcggtcgcaggagtcccgatctgcgacacgatgcaagtccgggtgatgctgggcgcggtcaccctcaccgccctcctcgacaccagctccacccacaatttcatcgccgaggaggcggcgcgccgcaccaacctggccatccagcccaagccgcgcctcacggccacagtggccaatggcgagaagatccagtgcccgggcgtgctccgacaggcgccgatcaccatcgatggagaggagttccacgtggacctcttcgtcatgccgttggcgggatacgatctcgttctgggaacccaatggatggttaccctggggccgataacatgggacttcacggcgcgcaccatgtcgttctcgcgccacggcatggaggttcgctggtccgacgtggcggcgcgcccggagccgactgtcgccgtcatagcagcctcggaggtccttctcgatgggctgctggcctctttcgaaggggtcttcgccgagccatccggtctgccaccacagcgcgctcgggaccacagcatcgtcttaaagccgggtgcgctgccagtggccgtccgcccctatcgttacctggcggctcacaaggatgaattggagctgcaatgtgccgccataatcgagcaaggcattgtccgccgcagcgactccgcgttctcgtccccggtcctcctcgtcaagaagccggacggatcgtggcgcttttgcgtcgactaccgcgccctcaacgcgctcacggtcaaggatgcgtttccgatccccgtcatcgacgagctgctcgatgagctccacggggcgcgcttcttcaccaagctagatctccgctccgggtaccaccaggtgcggatgcggccggccgacgttcacaagaccgcgttccatacccacgacggcctctacgagttcctcgtcatgccgttcgggctgtgcaatgccccggtgacgttccaggctctgatgaacgacgtacttcggccgttccttcgccgtttcgttcttgtgttttttgatgatatactaatttacagcaagacctgggcggatcatctgcgccacatccgcgccgtcctcagcgagcttcagcggcaccagctcttcctcaagcgcgccaagtgcgccttcgccagcgcgtccgtcgcgtacctcggccacgtcatctctgaggcgggcgtcgccatggacccggccaaggtgcaggctgtgcgggattggccggcgccacgctcggcgcgcgcagtccgcagcttcctcggcttggcgggctactaccgcaagtttgtgcacaactacggcgccatcgccgcgcccctcaccgccctcctcaagaaagatagtttctcctggtcaggggaggccgcaacggcgttcgacgcgctcaaggcagcagtcaccaccgccccggtgctcgccatgccggacttctccaagcccttcatcgtcgaatgcgacgcttcgtctcatggcttcggagcggtgctcgtccaggacagccaccctgttgccttcttcagtaggccggtggcaccccgccatcgcgcgctcgcagcatacgagcgtgagctgatcggcttcgtgcacgctgtacgtcactggcggccgtacttgtgggggcgccgcttcgtcgtcaagaccgaccactacagcctcaagtacctgctcgatcagaggctcgcgacgattcctcagcatcactgggtggggaagcttctcgggttcgacttcaccgtcgagtacaagccgggacatgccaatgccgtagcggacgcgctgtcgcgccgggacacaccggaggatggcaccatcttggcgctctcggccccacgctttgacttcgtcgacaggctccgccacgcgcaaaccactgacccggccctcgtcgccatgcatgaagagctcacctcgggctcccaagctctgccgtgggcggccgtggacgggatgatccagtacagcgggcggctgtacattcccccggcctcgcctctgctgccggagctcatggcggctgtccacgaggaaggacacgaaggcgtccagcgcacgctgcaccggctgcggcgtgattttcattttcctaacatgaaacagctcgtgcaggatttggtgcgggcatgccctacgtgccagcgctacaagtcggagcatctacatccggctggccttcttctaccgctgcccgtgccacaaggagtctggacggacatcgccctagacttcgtcgaggcgctaccacgcgtccggggcaagtcagtcattctgacggtggtggacaggttcagcaagtactgccacttcatccccctgtctcacccgtactccgcggagaccgtcgcccaggccttcttcgccgacatcgttcgcctccatggcatgccacagtccatcgtgtcggaccgggacacggttttcacctcccacttctggcgcgagctgatgtggttggtgggtaccaagttgcacatgacgacggcctttcacccacagtcagatgggcagtcagagtccgccaaccgcgtcattgtcatgtacctgcggtgcctcactggtgatcgaccgcggcagtggctccagtggcttccgtgggcggagtacgtcttcaacaccgcctaccaaacgtcactgcgggacacaccgttccgcgtcgtctacggccgcgatcccccatccatccggtcatatgagcccggagacaccagggtggccgccgtcgccaagaccatggaagagcgggataagttcctcgctgacattcgcagccgccttgaacaagcacaggcgacccagaagcgccactatgacaaggcacatcgccatgtcacgtaccaggtgggtgactgggccctactacgcctcaggcagcgcgcggcatcttcactgccacagaccgtcgccggcaagctgaggccccgcttctacgggccctaccgcatcaccgagctcatcaacgacgtcgcggttcgcctcgctctgccaccccgagctcgtctgcacgacgttttccacatcggcctcctcaagaagttccatggctccccgccggatgctccaccgcccctgcctgctgttcaccatggtgccgtggtcccggagccggaacgagccgtcaagacgcgcctcgcacgtggtgtgcgccagctgctgatccaatggaagggagagtccccagcttcggcgacgtgggaagacgccgacgctttcatcgccaagtaccccgacttccagctcggggacgagctggctctcgatgaggggggagatgtcatgtggggccgcacgtacgcgagacgccgtcgcgcgcgtgacgtgcgccgcgctacagagcgcgcccagcgcacagctgaggaagccaccgggagtggctaa

SEQ ID NO: 11639 - DNA, 2171 bp, Oryza sativa
  Clone ID: TFbOSC401613j.C1.o1.np
agtcagttaccaagtggaccccacctaagaccgtgtcacagattcggagttttcttggacttgcgggttgttaccgtcggttcattgaaaatttctccaggattgccagacctatgacttagttgcttaagaaagacgagaaatttaaatagacggccgagtgtgacaagagttttgaggaactcaagaagagattagtgtctgctccagttctgattctgcccgaccaaacaaaggacttccaggtctactgtgatgcgtcccgccacgagcttggatgtgttctaatgcaagagggcagagtggtcgcttatgcctcgtggcagttgcgtccacatgaagggaactatccaacgcatgacctggaattggtagcggtggttcatgctttgaaaatctggaggcactatctgattggcaaccgctgcgaagtatacacggatcacaagagtctgaaatatatcttcacccaacctgatctaaatctccgacagcgaagatggttggaactaatcaaagattatgacatgagcattcactaccatccgggcaaagccaatgtggtggcatatgcattaagcaggaagagctactgcaatgccttatgcaccgaggacgtgtgtaaggaattgcagcaggagcttgaacggctcaacgtgggaatcgtagaacacgggttcgtagctgctctagaggcacggcctacgctcgtggatcaagtcagagcagctcaagtaaatgatccggagatagctgaactgaaaaaaaaatatgagggtcggaaaagcccgggactttcttgaggatgaacatggcacaatctggatgggagaaagattatgcgtgcctgatgacaaagagctgaaagatctgatactcaccgaggctcatcaagctcaatattccattcatctgggtagtaccaagatgtaccaagatctcaaagaaaaattttggtgggccaacatgaggagggaaatagctaaattcgtcacgctctgcgatgtctgtcagcgagtttaagcagaacaccagagacccgcaggattgttacaacctcttcagatcccggaatggaaatgggaagaaattaaaatggatttcataacaggtctgcccaggacatcatcgggccatgattcaatctgggtagtcgtggattgacttaccaaagttgcttatttcattccagtgcatacttcttatacgggcaaaaggttggcggagctctatctctcgagaatcatgtgtctgcatggagtagccaaaaagatagtatctgattgagggagccaattcacttcaaagttctggcagaaattgcaagaggaattgggaacccggctgaacttcaacacagcctaccacccgcagaccatcccgatggtcagaccgagcgggtcaatcaaatattggaggatatgttaagggcttgtgtgcttgattttggtggaacatggtacaaaagcttgccgtatgcggagttctcttacaacaacagctatcaggccagtctacaaatggcgccgttcgaagcgttgtatggccggaagtgccgcacacctctcttctgggatcaaacaggcgaacgtcaactgtttggaacagaagtgttaacggaagcagaagagaaagtcagaaccgtcagagagaggctgagaattgcccagtttcgacataagagctacgcggacaaccgccgaagggagctcacttttgaagcaggggattacgtgtaccttcgtgttactccgctccggggagtgcaccgtttccagacgaaaggcaagttagcaccacgcttcgtgggaccatacaaaatcttggaacgaagaggagaagttgcttatcagctagaacttccatccaacatgatcggcatccatgacgtgttccatgtgtcccagttaaagaagtgcttgagggtacccgaagaacaagccgattcggagcacatcgacattcaagaagatctgacttatgtggaaaagccggtttgtattcttgagaccagagaaagaagaaccagaaataaggttaccaggttgtacagggttcagtggagccaccactcagaagaagaggcaacttgggaaagggaagatgagttaaaggccgcccatccgcacctcttcgccagctcttccgaatctcggggtcgagattctgtt

SEQ ID NO: 11640 - DNA, 3786 bp, Oryza sativa
  Clone ID: TFbOSC17178j.C1.o4.fg
atggtcaacaccaggaatggcagccgtgcagtaggtgagggcagcaacggcgaagaacgcaccgacggtgggcatcccaacagcgcctctggccacggtccaccaccactccccgagaacccgacgctcgcacaagtgatggcccatcagactcagatgatggcggccatgatgcagcagatgcagcagcagcaccagcagatgcaccagaggatgcagcagcaagccgagcagcagcagtttggtccccctccccctcagtccaagctaccagagtttctatgcgtcaggctacccactttctctagcaccaccaaccccatggaggtgaatgactggctccatgccataaagaagaagctaaaccttctgcaatgtaatgatcaggagaaggtcgcctttgccacacaccagctccagggccccgcgtcagcttggtgggacaatcacatggctacccgcccgccaggtacagaagtcacttgggcggagttctgtcgcagcttcaggaaggtgcaggtgccagacggggttgtggcacaggagaagagggaattccggatactccaccagggcaacaggacagtgactgagtatctccatgagttcaatcgtctagcgcgatattcaccggaggatgtccgcaccgacgccgagaagcaggagaagttcctagcaggcctggatgacgagctgaccaaccagttaatctctagagactatgccgactttgagaagctggttgacaaggcaatctgtcaggaggatcagcgcaacaaaatggacaggaagagaaaggcagcgcagttccggtccaaccaaggaagccaccagcgcccgcgcttcactcccggacagcagggtggacctaccaccatgatcgtccgccagcatcgccctttcaactcgagcagcttccaccagggcgccagtggcagccagaatcaccagggaactccatcagcccaagccaagaaggagactggagcaaagccaaggtcctgtttcaactgtggcgagcatggtcactttgctgacaagtgccctaagctaaggcgtgccgggccaaggtttgcccaagctcgtgccaaccacgcgtccgcagaagaggcgcaagcagcaccagaggtcgtactgggtacgtttcctattaactcaatccctacaaccgtacttttcgattctggtgcaacgcattcgttcatttcaaagaagtttgttgggatgcatgggttaagaaaagaagagattagtacactaatgagggttcataccccgggaaatagttcaacctcgatcagttatagcccttcagtgctaatagaaatacaccgatcacgatttctagccaacctcatccttcttgaatccaaagatctagatgtcatccttgggatggattggctgaccaagttcaagggagtcattgattgtgcgaatcgcacagtcaccttgaccaatgagaagggagaaactgtggtgtacaagtcactagtctcaccgaagcaaggaatctccttaaatcagattgaggtggaaaaccttgtggccaccgaggagaagagttcgcggaaattggaagatatccccatagtctgcgagtatccagaagtgttccccgaagacctcactaccatgccacccaagagagagattgaattccgggttgatttggcaccggggaccactccaatttacaagagatcgtacaggatggcagccaatgagctagcagaggtcaagaagcagaagaaggacaggacgaagagaatgtgtgttgattatcgcgcactcaatgaggtcacaatcaagaacaaatatcctttaccgcggcttgatgatttgtttgatcagctgaaaggagctaaagtgttttctaagatagacctgcgatcaggctatcaccagttgagaattcgggaagaggatatccccaagacagccttcaccactcggtatgggttgtatgagtgcatggttatgtcttttggacttaccaacgcacctgcattcttcatgaacccgatgaacaaggtgttcatggaatttctggataagtttgttgtggtattcattgacgacatactcatctattcaaaatctgaagaagaatatgagcaacatctccgtctggtactcgagaagttgaaggagcaccaattatatgccaagttcagcaagtgtgacttctggttgtcggaagtcaagtttctgggtcacgtcattacagctcagggcgtgacggccgagtgtgacaagagttttgaggaactcaagaagagattagtgtctgctccagttctgattctgcccgaccaaacaaaggacttccaggtctactgtgatgcgtcccgccacgagcttggatgtgttctaatgcaagagggcagagtggtcgcttatgcctcgtggcagttgcgtccacatgaagggaactatccaacgcatgacctggaattggtagcggtggttcatgctttgaaaatctggaggcactatctgattggcaaccgctgcgaagtatacacggatcacaagagtctgaaatatatcttcacccaacctgatctaaatctccgacagcgaagatggttggaactaatcaaagattatgacatgagcattcactaccatccgggcaaagccaatgtggtggcatatgcattaagcaggaagagctactgcaatgccttatgcaccgaggacgtgtgtaaggaattgcagcaggagcttgaacggctcaacgtgggaatcgtagaacacgggttcgtagctgctctagaggcacggcctacgctcgtggatcaagtcagagcagctcaacgagttaaagcagaacaccagagacccgcaggattgttacaacctcttcagatcccggaatggaaatgggaagaaattaaaatggatttcataacagttctggcagaaattgcaagaggaattgggaacccggctgaacttcaacacagcctaccacccgcagaccatcccgatggtcagaccgagcgggtcaatcaaatattggaggatatgttaagggcttgtgtgcttgattttggtggaacatggtacaaaagcttgccgtatgcggagttctcttacaacaacagctatcaggccagtctacaaatggcgccgttcgaagcgttgtatggccggaagtgccgcacacctctcttctgggatcaaacaggcgaacgtcaactgtttggaacagaagtgttaacggaagcagaagagaaagtcagaaccgtcagagagaggctgagaattgcccagtttcgacataagagctacgcggacaaccgccgaagggagctcacttttgaagcaggggattacgtgtaccttcgtgttactccgctccggggagtgcaccgtttccagacgaaaggcaagttagcaccacgcttcgtgggaccatacaaaatcttggaacgaagaggagaagttgcttatcagctagaacttccatccaacatgatcggcatccatgacgtgttccatgtgtcccagttaaagaagtgcttgagggtacccgaagaacaagccgattcggagcacatcgacattcaagaagatctgacttatgtggaaaagccggtttgtattcttgagaccagagaaagaagaaccagaaataaggttaccaggttgtacagggttcagtggagccaccactcagaagaagaggcaacttgggaaagggaagatgagttaaaggccgcccatccgcacctcttcgccagctcttccgaatctcggggtcgagattctgtttaa

SEQ ID NO: 11641 - DNA, 3770 bp, Oryza sativa
  Clone ID: TFbOSC23279j.C1.o1.fg
gagtgaggatgttggaccaacagaggaacatttatctgggtcaggcaggagaagggaatcagtacgctgaggctgtcctcaaggggccaagattagaaatccctctgttcagtggagaagatccaatagattggcttaagcagtgtgagaagttttttgagattacgggtacccctctggatcaatgggtgaatttagcggtggctcatttgaatggcagggcattgaaatggttcggaggaattggtctgccatggcaagtgatagcttggccacaatggtgcagcatggtctgtactcgattttctgctgcgagtgaacatgaggcaattgagttgttccaaaatgtgaaacaatttggaacaacagtggagcaatatattgacaagtttgaggattatgtggatttagtaaagagagaccacccttatctccaggagcaatatctgaccagctgtttcattgggggattgagagcagatattaaatacgatgtgtgtgggctgctaatgccagaaaaatggtgggaaatttcaaccgaaacaggaatcagaatccacttggaggtaatcaggggcggaatgctaaccataggggacaaaacagaggtgagggagataggagagaggaaaagaagtgctggttctgtaaagaaccttggtttccaaggcaccagtgattatgcccttaggaattcttatcccttgaaaaatactgacacaaagaaagtagtagttgctggtggtggagaacttaagactgatgtcatggtgccagacatcagctatgagattcaaggagaatgctttactaaccaatttaagttgcttcctctcaagggatatgatattatctggggtgctgattggatctataattatagccccatttcgctggatttgaagcaaagaattttgggaattacaaagggaaacaaagtaatactcttacaagatttcactaaaccaaataagcactttcagatcagtggtaaaagattggagaaaatgttaaagaagggggctcttggtatggtgatacaagtcaatgtcatgtctgaaactgtggaggaagaagggcatgttatacctgaagacattagtgacattatacaacaatttccagctgtgcttaaagaaccaaaggggctaccacctaagcgagaatgtgaccatgtgattaatttacagagtggggctgtaccacctaacatcaggccatacagagtgccacattatcagaaggaagcgatggaaaatattatcaatgagctgattgaatctaaggagattcaaactagtgatagtccctattcatctcctgctgtgatggttcgcaagaaagatggatcttggaggatgtgtgtcgattaccgacaattgaatgcacagactgttaagaacaaattcccaatgccaatcattgaagacttgttagatgaattaaatggagcaaggatattctctaaactagaccttcggtcagggtatcaccaaattaggatggctgagaaggatgttcataaaacagcatttagaacacatcttgggcattatgaatatcaagtaatgccattcggtttgacaaatgaccctgccactttccagtcacttatgaatcatgtcctagcaccattcttaagaagatttgtgttggtgtttttcgatgacatattaatctatagcaaaacaagggcagagcatctggagcatgtgaagttagtaatgcaagctttgcaagacaaccatcttgtaatcaagcttaaaaagtgtgcttttggacttgcaagtgtgtcttacctaggacatgtaatctctcaggatggggtggctacagatcccaagaaggtggggaaaattaaaaattggcccacacccaaggatgtcactgatgtaaggaaattcctggggatgacaggatactaccgaaggttcattcaaggctatggtaccatttgtagacctattcatgacatgctgaaaaagaatgggtttcaatggggagcagatcagaccacagcttttgagactctaaagcataagctgagaaccagccctgtcttggctttgccagactttgatcaagcattcaccatagaagcagatgcttgtggagtcggcattggggcagtactaatgcagggagggcgacccattgcatttttcagtaaggctttgggacccaaggcagctgggcaatccatatatgagaaggaggctatggctattcttgaagctcttaaaaagtggaggcactatgtgttgggcagtaaattgatcattaagactgaccagcaaagtttgaaattcatgatgggtcagagattggtagaggggatacaacacaaattgttgctaaaattgatggagtatgattataccatagagtataaatctggaaaagaaaatttagtggctgatgctctgtccaggctaccacaaaaggaagctgttgcagacaggtgtcacccaatgactgtggtgatacctgagtggattgtggatattcagaggagctatgaaaatgatgtacaagcacacaaaattctcagtttgattggtactgcagcagatccagatagagaatataagcttgaagcaggattgctaaaatacaaagggaggatctatgtgggagaagccacggatatcagaaggcaattgatcacaacctatcattcatcttcttttgggggtcactcagaaataccagatatggcatggactcatattactatggactttatagaggggctaccaaaatcacaagggaaagatgttattctggtagtggtggatcgtctgaccaaatatgctcatttcatagcattagcccatccatatgatgtggagcaggtggtagaggcgttcatgaacaatattcacaaactgcatggtatgccgatggtcatcatcactgacagggaccggatttttactagcagtctgtttcaggagattttcaaagcaatgaaggtcaagctgagatttagtactgcttatcacccacaaatggatggacaaactgaaagagtcaatcaatgcctggagtcctaccttagaaatatgacgttccaagaacctcacaaatggtattcatggctggcactagctgagtggtggtataacaccactttccacaccgcaattcagatgactccgttcaaagcaatgtatggttattctcccccacaaatcaatgaattttcagtgccatgtaacatatcagaagaagctagggtgactattgaagaaaaggaagcaatactgaacaaactcaagaatagtttggctgatgctcaacaccgaatgaagtattttgcagataaaaatagaactgaaagaaacttagaagttggggatatggtatatttaaaattgaaaccctatagacagtctgcatttgggatcagagggtctctcaagctaagatccaagttttatggaccattcaaggttcttcagaagattggccaattagcttataagcttcagttacctgatgatgctcagatccaccctgtgttccatgttagtcagctcaagaagcatctggggaagcatgctattcccatgtccaatttaccctcagtaggaccagatgggcagattaaaacagaaccactagcagttctacagaggagaatggtacccaggaaaggagttgctgtgactcaatggttgatattatggcagaatttgtctcctgctgaagccacatgggaagacgcatcagtcattcaagcaatgtttccatcgtttaatccttga

SEQ ID NO: 11642 - DNA, 617 bp, Oryza sativa
  Clone ID: TFbOSC10179j.C1.o2.np
atggtggtgcggactgcggaggaggagcgcgtcgattctgtgaaaaatccggcgcacgagtgcacgacggtgcgggggcgagagagcgcgaggaggaaatgcgtgggagatgcgggagaaagaggagggaagagcgagacacaggacggtggatgcggcgtgatttcgccatttcaggtgcgggaaggagaggagggggagaggtgggaatacggtctgtgggtattccccatcgacaactgttcatcgttttccctagttgaaggccagaaacaaaagagggggaagatgggcgcggtgctccgggttaacgacatcatgagttgttgtccggcaaaatccaccaccatccattcaatgaggtcttggtcaatgagcttggtgcagctagatgaggttggttttgttggatctagctcttcctcctttctactgcttggatttggtcttatttggttcaccctgtagctcccgatctctcgcgcacagccaccgcagactacgcttacacgccaccgtttgcctctctgtctccgcctatgggaacaaccatcagtgaggatgctgccgcctcaaccagcccacttgtgttggcagccgggcacctcttccatcta

SEQ ID NO: 11643 - DNA, 496 bp, Oryza sativa
  Clone ID: TFbOSC10179j.C1.o6.gp
acgatcaacgagatcgcatcgcctccgccgccaacgccgccattcgattgatctccaaagatacctttctgttcttacaagttttgtttatattcaacacactctctctcactggttgctgggtcccagccaggctgtcgacagagccatagccagctattacttacaagcccattcaggcccactcagacgaacattagacttcttaattctagtagctcgcttcagcggcctagtaattgtgttctcctgtgcttcgtcagacaacggcaactccctggaagcagtattgctgctgacaaaccccaccccttgaagactgacttgcccccaaggcagtgcagaagggaaacgctgcttgagctcttcttcatcttcccaggtggcttccactgcaggcaaattagaccagcaaacaagaatttgacggacaactttgttacctttcttctgtatccttgtatccaagatctgaacaggatactgaatatgatct

SEQ ID NO: 11644 - DNA, 4113 bp, Oryza sativa
  Clone ID: TFbOSC900333j.C1.o7.fg
atggaagctatggaaggtcggcttgtggacatgatccagtcgttggtgaagaaagtggaggaggtgaacgtaatgggatccaagctggagataattgataagaaattggagcagtatggggagcaattggggaaagtgcaggcgaaggtggatctatccatggattcccttgggcaagtgcagatggagcaagctttcgtgaccaaggcactcaaggaaggaaacccacacgctgcgccaacctcgactcgccccggcaaggctccgattctgcaaactccatcgacggcttctacgtcatcgacaccaccaactccaccaccgcttcctaatttgaatgggtatgcctctgttcagcccattcactctgctgcgcgtgatcatgctgaagtagaacacaaacgaaattggacccctaaaatggatttcccgaagtttgatggattgaaagatgaattgcactattcagttgctgctcagttgcctgaaaacgttcatcaagctttccaggttgctttaatctttgagagtgcacaccgtatgaaaaagggagttcataagaaggaagggtatctgactaagggaatagatacaccagcaaaagtaccaggagacatttggaaggcgcagcagttgaaggagtatcacaaaactcatggtttatgctttaagtgtggagacaaatatgcacctaggcatgtttgtgctaagcaagagggtccacagttgaaggcaatggaagtggagcaaaattctgaaatgttgactgatgaaatgttagatgtggtggcctgtttggagactcaaccagagaatatgttactgtctattcaagccatttctggttctgtggctcctaagaccattcagttaagggcattggtaaaagatcaggtggtactgattttagttgattctggaagctcacatagtttcattaatgaagctttatgtcagaagttgcaactgtcaacagtacctcatccttcttatgatgttaaagtagctaatggagctctcttgacttgtgcttctcatgtaccacactttaggtggctattgcagggacagacatttcagtttcctgtcaaagtactagctctgggaggttatgatatggtattgggaatggattggttggaacaacatagtcccatccaatgtgattggaatttgaagactatttctttcaatcatcagggttcttgggttactttacaagggattcaggccagtgctatgcattctttgactgcagcaactcctgatcagattatgaattggtttcagggtaatgatatttgggctatggctgttgttcaacagattactcctcccttgaactctgttataccatctacagtacaagccttgttggacaaatatcaatttgtattctctgcccctgactctttacctcctcatagagctgtggatcatgccttgccattactgcctggtgcagttccagtcaattgtcggccttacaggtattctcctgctcaaaaagatgagattgaaaaacaagtttgtgaaatgttggaggctggtctaatcactcatagctgtagtccttttgcttcacctgtcctattagttaagaagaaggataacacttggaggttttgtgtggattatcgtcgtttgaatactttaactgttaagaacaaatttcctcttccaattgtggatgagttgcttgatgaattaactggggctcaatacttttcgaagttagatttgaggagtggatatcatcaaatcagaatgttgcctgaggatgagtacaaaacagctttcaaaacacaccatggtcattttcaatctagagtaatgcctttcgggcttacaaatgcaccagctacatttcagtatttgatgaattctatatttgctccatttatgaggaagtttgtcctggttttcatggatgatatcctggtatatagtcactcttgggctgagcatttgtcccatttggagctggtctttcagacattacagaatcatcagttatttgctaaactctctaaatgctcctttgctacacccactttggaatatttgggacatactatatctaaagatggtgtggctactgatcctgcgaaaacagcatgtatgcaacaatggcctgttcctgctaatatcactgaactcagggggtttcttggtctcacaggatactatagaaaatttgttcaccattatgggattattgcaaaacctctgaccaaactgttacagaagaatgtgaagtttgtttggactcctgaagctgattctgcttttcacgccttgaagcaggctatgtgttctaccctagtgttagcactgcctgatttctctaagccctttgctctggaaactgacgcttgtgacattggaataggagctgtgctgcttcaagatggtcaccccattgccttttatagtaaagctataggcacacaaaacactattgggggacattctggaggtcaagccacttatcaacgactgaagaaattgtttatgtgggctggtctgaaacagcaggtggaggaatttgttcagcagtgtgctgtgtgtcagcaagctaaacacgaacactgcaaatatcctgggttgttgcagccactccctatacctgaaggtgcttggcaagaagtgtgtatggattttattaagggattacctctgtcccgaggatttgatgtcattttggtggtggtggataggtttactaaatatgctcatttcatccctttgaagcatcctttcactgccttacaagtggctgaagttttcctcaataatgttactaagttgtatgggttacctaagattattgtttctgatcgagacaaggtgtttaccagtgcattttggcaggctttgttcaagcgttttgaagttcatttgcatctaagctcagcttaccatcctcagtccgatggacaaacggaaagggtcaaccaatgtttggagatgtatttgaggtgtgctgtttctaatactccctctaagtggtgttattggttgccattagctcagtattggtacaacactacattccatactgctattcagtgttctccacataaggcattgtatggtgtggatcctcatcatggcattttaccctcctttgctttggaagatgttgacacctctacttcgtcctctgaggctgataacttgctgaaagatcgcactttctatgctagtttacttcgtcaccatttgactcgagctcagcatcgtatgaaacaggcagctaatgctaatcgcacgttgcgttcttttcaagttggtgacatggtttacttgaagctccagccttatgcccagcattcagttgtttctcgcccctgccccaaactggcaatgaagtattttggtccattctccattgtcagcaaaattggctcagtagcttacaagctacagttgcctgaagctagccgtatccatccggtattccatgtctctcaattgaagcaagtgatccctaataatgcaccagttttttctaccctccctatgtctttggagctagatgttcagtcattatctccttctgccatattggatcgtcgcatggttaaaagaggcaatgcggctgtcgtccaagttaaggtgcgctggggttctttgcctgaagatttttccacttgggaagactatgatgtcttgtgtgttcgttttccggaggttaaatcttggggacaagattcctctcatgggggcggcactgtcatagctgcagccatgacagagtcgaagtctaaagcagaggagaagaagaaaggcaaagcagagcgattggtgtggtttgatgattctcgaccttatgttgtgttgatgtgtacaatttcgcagggaattggtggatttgttttcggaaacgagaggtccgagtccaaggaagacagttacgtcgagagattccttgactgcataagcaacggtaccatacctgacgacagcaggcctgttctcctcaacgttctaaaagaagaccatgaagatgctgagcttgtgagaggtgctctagaaacctttgtgagtgcagtgactcctattgaaacctcaaaaaaccgaggttcagcctgcatcagtgaactctga

SEQ ID NO: 11645 - DNA, 4890 bp, Oryza sativa
  Clone ID: TFbOSC401333j.C1.o5.fg
atgttcaaggccttgttcttgatggtggatgaggaggagcccttgcagttggagacggagataaaccaagaaacaaggaccaagaaccaaaccctaggtaggataggaagaagagaggagaaggaagagagactcaaaagtgagaaggtggccagcggaggagacggtcgccggaggggagagcgccgcgtcgtcggagcgccgtcgaatcccagtcacgtccgtgtcaaggagcaaccactgtccgagggcgctaagtcagttgcagaagacgctggagatgatgctgattccggaaggagggaagatgaacttgaagcagctgaaggagaagtggtgcgccgtgcaacaaggcccgtcaagataaacctgaagtactatgggcctgactgggccgtgatgtcgcaggagagtaaacttgatgtcttgttgagaactattgaggagaatgagaagaagagaatggaggcggaggcgaggactcgggatgatctcgctgatctgaagaagatggtggagatttgtcttcccaagatggaggagaaggtggaaaaactcagcgagtccgtgcagacactaagccacaagcatcacaccgatctgagtactagtcttcctcctatgacttgccctaagtttgatggtgagaacccacagatgtggaagagcaattgtgagcaatactttgatatctatggtattaatcctatgcattgggtcaaggtggccacactcaatttcagtggtaatgcagcattttggcttcagtcgatccgttctcaaattatgggtattacttggcaaactctgtgtgacttgatctgtgctagattcactagagatatacaggaagcactaattagaaaatggttccatgcgcaacagaacagcacagtcactgaatatgttgaacaatttgacagtatcatgcaccagctaatggcatatgacagtgctctcacccctgtgtattttgttactaagttcattgaagggctcagggatgatgtcaggggtgcagttatgctacagagaccccaggaccttgactcagcttgttcaattgccttgctccaagaagaaatcctggaaagtaataagtctactacacacagaaggtctgataatcacattgcgttcaggccagtaccaaaactcaacaattatgtgccagtgcctccaggacagagatctgtagctgttagtgcacatgatgacaaaaagggagtggaatctgctaagtccagagaggacaaatttgcttctcttaagtcttacagaagggctaagggtctttgttttgtctgtggtgaaagatgggggagagaccataaatgtgctacttctgtccagctccatgttgtccaagaattattggaagcaatgcgctctgagtgtaattctgatgacatcctgacagctaaagaccctattgaatcagtagaggcaattgatggaggattgatggctatatctcagcaagctttattaaggggatgggttcaaggaacagagattcttatgttgattgactcaggcagtacacactccttcatagatgagagcattggcagcaagcttgtgggcctcattcctttaagtagatctgtaactgtgaaaatagcagatggtggtactatgaagtgcacacagcaaattctggggtgtcgttggtggactcaaggtcattatttcaagagcgacttcaagctgttgaatttgggctcttatgatgctattcttggcatggactggctagaacaatttagtcctatgcaggtggattgggttaacaaatggctagaggttgtgattgatgggcagcctgtcagactgtatgtcaatcctagacccaagggattacccccaaagagaatatgtgatcatcacattcctttacttcctgggtccaagcctgttaaccttcgcccttatagattcaatccagccctcaaggatgaaattgaggcacaaatttcagagatgttgcaaagtggtgttatccaaccgagtcagagtgcctttgcatctccagcccttctagtcaggaagaaggatggcacttggaggctagtaattgattacagacaactgaatgccatcactgtcaagtgttcctaccccatgcctgtgattgatgaattgctagatgaattacctggggctaaatggttttcaaaacttgaccttagggctggagctccagcaacctttcagggtgccatgaatgagacatttaaatcagtcctgaggaggtttgctctggtattttttgatgacattcttatttatagccctgatttgccctcacaccttgaccacctcaagcaagtgttaaccctgctgcagcaacatcattggcaagtaaagttatccaagtgttcttttgcacaacagcaacttacctacttaggtcatgtcataagtgcagagggggtatctactgatccaagcaagattcaagagattgttaattgggaaacaccaacaaccaaaaagaaactcaggggattcttgggtttggctggctattacagaaagtttgtgaaaggatttggattaatcagtaaaccaatcactcagttactacgaaaaggggtgccatataaatggactttggagactgaaactgccttccaacaattgaaacaagctctggtttctgccccagtgctggcattacctgattttagtttgccttttactgtcgaaattgatgcttcagattcagggattggggctgtcctgtctcagaacaaacacccaatagcctacattagcaaggcacttggtccccgaaatcgagggctatgtcacgcccggaatttctatccaaaattccaaacgcttacatacggccgagatcgatcggtccacgaccggctcacgggagagggcgacgatgacgtcggcgatgacgtcaccaccggcggcggcggctcggcggctcggacggcgcacgctcgccggcgaacggcggcgcttcggcacgaacggaggacaccaacgggtagcggacggcacggcgaactcaccggcgaccaaagcgatggcggaagaggaacggacggtgacggcgacgaggaggaagcggcggcaaacttcgggttgacggcggcgacggtgctccggcggtcttcggcggcggcgaaggagtggacgaggacggcggcgacttggcgaccacgacggcggtcttcccgagcgacggcgacggctggaacggcggcggcgcacggctggagcgacggcggcgacggcggcgctagggcacacggcgctagggcgtttccgacgacgagaggcgaaggcaaagggtgtgacaggctatcaacttatgagaaggaatgtatggctatcttgttagcagttgatcactggaggtcatacttgcaacttggggaatttataattctaactgatcaccatagcttgatgcacttatctgatcagcgtttacataccccatggcagcacaaggctttcaccaagttattgggcttaaactataaaatttgctatcgtaaagggaccagcaatgctgctgcagatgctctatcaagaaagtttcaaagtgattctgagttgtccatcatctctagttgtgttcccagttggttgcaagaggttgctaaggggtatgaacatgatccctattcttctgatctgctttcagccttgtctgttcagcttgactgcaaacctggatttcagttgcagtctggaattattaagtacaaggggcgcatttggattgtcacttacagtaagatcaagaaactgtttgcttggcagggtatgaaatctcaagtaaaggattttgtacagcaatgtcaaacttgtctgcaagcaaaacctgacagatctaagtacccagggcttctacaaccattacctgttcctgatggatcttgggaagtcatcatcatggactttattgaagatcgtgacaaaatttttactagccagctatggacttatcttttctctgcttctggaacaaaacttaatctgagcacttcttaccatccccagtctgatcgacagacggaacgagtaaaccagtgccttgagatttatctgcggtgttttgctcatgccaatccttctaaatgggtcacatggttgcacttggctgaatattggtacaatacttcttaccattcctctttaaagacttccccatttgaagtcctatatgggcactctcctaggcattttggaatcaatgtggacacttgtgaaattcctgatttgcaagaatggctaaaggagaggaaactgatgcaagcattggtgcaacagcatttacatagagcaaatcagcaaatgaagcatatggctgacaagaagagaagtttcagatcttttgcagttggagattgggtgttacggaaaattggcacagtagcatataaacttcagcttcctgcaactgccagtgtgcatcctgtctttcatgtatctcagttaagggcggctaagggttataaagagctttcatcacttcagttgcctaaagctaactctgctctgcaagttccttctcagattcttgatagcagggtggtcaagagggctaccgatgctgttcttcaagtgctgatccgctggtctgattctgcagccgaggatgccacttgggaaaacatggaggacttacgcactcgatttcctactgctttggcttggggacaagccaaatttcaaggggaggggattgtcaaggagcaaccactgtccgagggcgctaagtcagttgctaaagacgctggagatgatgctgattccggaaggagggaagatgaacttgaagcagctgaaggagaagtggtgcgccgtgcaacaaggcccgtcaagataaaccagaagtactatgggcctaactag

SEQ ID NO: 11646 - DNA, 2893 bp, Oryza sativa
  Clone ID: TFbOSC900010j.C1.o13.np
ccaccaaacttgagaccatatagagtacctcactatcaaaaggcagctatggaaaatataatcactgatctagttgagtcgaaagagatacaagaaagtgagagcccttatgcctcactagctgtcatggtaaggaagaaagatggctcctggagattatgtgtcgactacagagagctcaattcacagacagtcaaaaacaaattccctatgccaatcattgaggatctgttggatgagcttcacggggctagaatattttctaagctagacctgaggttaggctaccattaaattaggatggctgagcaagatgttcacaagacagccttcagaactcacatgggccattatgaataccaagttatgccctttgggctgactaatgccccagcaacctttcagtcacttatgaaccaagtgctcaaaccattttcgaggaaatttgaattagtgttctttgacgatatactgatttatagtcggagcaaagaagaacatttggatcatttgaagctagtcctacaagtcttgaaggagaatgatctggttatcaggttgaagaaatgtgcttttgggctatctgaagtttcatacctggggcatgttattttacagaattgggtagccacagatcccaagaaggtggataagatctcaaggtggcctattccaactgatgttacagagctcagaaaatttcttgggatgataggttactgtagaagatttataaaagggtatggggtgatatgcagaccaatgcatgacatgcttcagaaacaaggatttcagtggggtccagagcagactgctgcctttaatgaattaaaaagtaaaatgtgcacaagcctagttttggccatgcctgactttagcaaggagtttttgttgaagctgacgcatgtggttcaggcataggtgttgtcctgatgcaatctggcagaccaatagcattcctaagcaagtctttaggacccaaagctgatgggcaatcggtgtatgagaaggaagcaattgcaattttagaagcaattaagaaatggagacattacattctcggtgggaagctggtaattaggactgatcaacaaagtttgaagttcatgatgaaccaaagattggtagagggaatccaacacaaattaatgttgaaactgatggaatatgattactctgttgagtataagcagggcaagcaaaattatgtagcagatgcactatcaaggatgcccataatccaagagaaagaggaggaatcttgtcaagccatcaccatagtagttcctgactggattgaggacatcaaaaggagctatgatgatgatgtccaggctcacaaattgctaagtttggtgggaactgaagctgatccaaatggggaatatagacaagaatctggattgctgaagtacaaagggaggatatatgttggccagggcactaacatcagaaccgaactgttgagggcatgtcatgcatcctcttttggtggtcactctagtatgagagcaacttaccacagaatcaaactgttgttttactggccaagacttaagaaagaagtagaaaactttgtcagggaatgcccaacctgtcaagtaacaaaaggggagaatgtgcacattccaggtttgttggaacctttggaaatacctgatatggcatggtcacatattacaatggattttattgagggacttccaatgtccaggggtaaagatgtgatatttgttgtagtggataggctgaccaagtatgctcacttccttgcactatcccatccttatgcagtggagcaggtggtggaggattttatggacaacatacacaagttgcatggaatgcctaatgcaataattactgacagggataggatcttcaccagtgggttattccacaaaattttcaaagcaaagaaagtacaactgaggtttagtactgcttatcactctcaaaccgacggccaaactgagagagtgaatcaatgcctagagtcatacttgaggaatatgacgttccaagaaaccaaaaattgctctccttggctggcactggctgagtggtggtacaataccacctatcacacagcaatccagatgactccatttaaggcctagtatggttactcaccaactcaaataaatgaattttctataccttgcaatgtgtcagctgagggaagaatgactttggaggagaaagaagctattttgcagaagttaaaggggagcatggagttggctcaaaaaaggatgaaatactttgccggcaagaacagaactgaaagagtttttgaaactggagacatggtttaccttaagttacaaccatatcgtcaaactgcccttaggatcagaggttctctgaaactaagatcaaaatattatggaccattcaagattattcaaaaagtagggaaagttgcatataaattgcaactaccagctgaagctcagatccaccctattttccatgtaagtcagctgaaaagacaccttgggactcatgcaattcctatggccaaccttcctgctgccggacctgatggacaaattaaaacagaacctgttgctattttgcaaagaagaatggtgcctagaagatggtagcagtaactcagtggttagtgttatggcaaaacttgagcccagcagatgcaacttgggaagatgcgacggtgattcagggtatgtatctagattttcatccttgaggacaagaatgttgccatggagggggactgaccaaactatttgatgaaggttcatgcaggcggcgcgaagcatatgcccaagctgcagtgtgctaccagcattgaccgtacgcggtgccaggccgatggtcgcctcagctttcgagaggtcctcaacctcgctggtgagtcctactg

SEQ ID NO: 11647 - DNA, 4431 bp, Oryza sativa
  Clone ID: TFbOSC401054j.C1.o44.fg
atgggggacgatctcaagtccaccctggagaccctcgccaagaccctggcctccctgcaatcttcatccgaagccacgaccaaggcgatcgaggacaacacacaggccatcgcggccctgtccgttgctcggactaccgagaaggcttccacggaatcatcggggacacctgcaccagatcggccgccgaagcattggcgtccggagttccccaagtacgatggcaagaccgatccgctcgccttcatcaatcgatgcgagtcattcttcatccagcaacacgtcatcccggcggaacgcacgtggatggcttcgtacaatctgcaggacggcgcgcaactgtggtacatgcacgtccaggacaacgagggtacgccgacgtgggagcgtttcaaggaactcctcaacctccgctacgggcccccgctccgctccgtgccgctattcgagctctcggcgtgccgccgcacgagcaccgtggaagactaccaagatcggttccaggccctgcttccccgcgccggtcgtctcgaggaagcccagcaggtacagctgttcaccgggggcctcctcccgccgctcagcctccaggtccagcagcagaagccggcatccctggaagaggccatgagtctcgcccgacagttcgagctcatggagccctacctgttcccggccacgacatccgcgcgcggcgtactcccgacgccggccccccggccatcgaccggccccgtcgtcaagccggcaccggccaccgtcaccgtcgagggtcgcccggtcaagcggctctcccaagcccagcaggaggagcgccgtcgcctcgggctgtgctacaactgtgacgagaaatacagccgctcccacaacaaggtatgcaaacggttgttttttgtggagggtggtgcaatcgaagaaggcgacgacacggtggaggatgacaccgaagaggcgactgtcgaggcgcccgtgttctccttgcacgcggtggctggcatcccgttgggcaaaccgatcctgctccaagtgacgctcggtgccgcctccctcgttgccctggtggacacgggctccacccacaacttcatcggtgaggacgccgcgctccgcaccggcctgcccgtccagccgcgtccacggctcactgcgacggtggcgaacggggagaaggtttcctgtccgggtgtgctgcggcgggcaccgatcaccatccagggcatggcgttcgacgtcgacctttacgtcatgcccctcgccggctacgacatggtgctgggcactcagtggatggcccacctgggcaccaccatcgcctgggacgtgaccacggggaccgtgtccttccaacatcaagggcgcaccgtctcgtggcagagcctacccccgcaccagcgcgccgatgtccacgccgtcagcaccgggacgagcctcgttgcggccaccgggtcctcctccagcaccccggcgcccacgacggagcctgccctcctcgacggcctcctgggctccttcgacgacgtcttcgccgagccacggggcctgccaccaccacggggccgcgaccacgccatccacctcctgccaggcgccccgcccgtcgccgtgcgtccctaccgctacccggtggcgcacaaggatgaacttgagcggcagtgtgccgtcatgatggagcagggcctcattcgccggagcacgtcggcgttctcgtcccccgtcctgttggtcaagaaagccgacggctcgtggcgtttctgcgtcgactacagggccctcaacgccatcaccatcaaggacgcctacccgatcccggtggtggacgagctgctggacgagctgcacggcgccaagttcttcaccaagctcgatctgcgctcgggctatcatcaagtccggatgcgggctgaagacgtcgccaagacggcgttccggacgcacgatggcctctacgagttcttggtcatgccattcgggctgtgcaacgccccggcgacgttccaagcactaatgaacgacatcctccgcatatatcttcgccgttttgtccttgtgttttttgacgatattctcatctacagcaacacctgggcagaccatctgaggcacatccgggcggtgctcctcctgctgcgtcagcatcgcctgttcgtcaagcgttcaaagtgcgctttcggcgtcagctccatctcctacctgggccacatcatcggcgcgacgggcgtgtccatggacccggccaaggtgcaggctgtcgtggactggccgcaaccgcgctcggcccgcaccgtccggggcttcctggggctcgcgggctactaccgcaagttcgtccacgactacgggaccatcgccgcccccctcaccgcgctgaccaagaaggaggggttccggtggtccgacgaggtggcgactgcgttccacgccctcaagcacgccgtcaccacggccccggttctggcgctacccgacttcgtcaagccattcgtcgtcgagtgtgacgcctctacgcatgggttcggcgcggtactcctgcaggacaagcacccgctggcgttcttcagccgccccgtcgcgccgcgccaccgtgcgctcgctgcctacgagcgggagttgatcggcctcgtcctcgccatccgccactggcggccgtatctgtgggggcgtgcgttcgtggtgcggacggaccactacagcctcaagtacctgctcgatcaacgcctggcgaccatcccccaacaccattgggtgggcaagctcctcggcttcgacttcacggtggagtacaagtcgggcgcctccaacgtggtggccgatgccctctcgcgccgcgacacggacgagggtgccgtcttggcactgtcggcgccacggttcgactacatcgagcggttgcgggcagcccagaccacggagcctgctctcgtggccatccgcgacgccatccaggccggcacccgcagcgcgccgtgggcgcttcgcgacgggatggtgatgttcgactcccggctgtacattccgccatcgtcaccactgctccacgagatcttggcggcaatccacaccgacggacatgaaggcgtgcagcgtaccctgcacaggctgcgccgcgatttccactctcccgccatgcgccgggtggttcaggagttcgtccgggcgtgcgacacatgccagcgcaacaagtctgagcatttgcacccgggcggcctgcttcttcccctgccggttccaactacggtgtgggccgacattggcctcgacttcgtggaagctctgccccgtgtgggtgggaagacagtgatcctcaccgtcgtcgaccggttcagcaagtactgtcatttcatccctttggctcacccctacacagctgaatcagtagctcaggcgttctacgcggacattgtgcgcctccacggcataccccagtccatggtgtcggaccgggatccggtgttcacgtcatccttttggcgcgagttgatgcggctgaccggtacaaagatgcacatgacgacggccatccacccacaatctgatggccagacggaggccgccaacaaggtcatcgtcatgtacctgcggtgcttcaccggcgaccgacctcggcagtgggttcggtggctcccgtgggcggaatacatctacaataccgcctatcagacatctctccgcgacacgccgttccgggtggtatacgggcgcgacccgccgatcatcaggtcctacgagcccggcgagacgcgcgtggcggccgtcgctcgctccatggcggaccgtgacgagttcttggccgacgtgcgctaccggctagagcaggcccaggcgacgcacaagaagtactacgacaaaggccaccgtgcggtgtcctacgaggtgggcgacctcgttctcctgcgcctccgtcaccgcgccccggcatcgctgccccaagtgtccaagggcaagctcaagccccgctacttcgggccctaccgcgtcgtcgaggtgatcaaccccgtcgccgtccgcctcgagctcccgcctcgcgcaaagctccacgacgtgttccacgtgggcctactcaagaagttcgtgggagctgcgccaccatcgcctccggcactgcctgctgtccaccacggtgccattgatcccgagccagagcgcgtcacccgttctcggctagctcggggcgttcgtcaagttctggtccactggaagggggaatcggctgcgtccgccacatgggaagacctggacaccttcaaggagcgttacccggcgttccagctcgaggacgagctggctctcgaggaggggagagatgtcatgtggggccgaacctatgccaggcgccacagggcacgggacgtgcgccgagccggcgaacgcgccgcggcgcgcgcgcagagcacgtccagggagccacagggccaagtcaacaatagtggctag

SEQ ID NO: 11648 - DNA, 639 bp, Oryza sativa
  Clone ID: TFbOSC20914j.C1.o1.fg
atggagtattacgtttccaagggcgtatttggttgggtaataaggttgccgttcagtctaagattttggctgctttgcattgttctgctcttggtgggcattccggaatttaggtcacttatagtcatatacgccgtttgtttgcctggccaggttttcctcaaggctcagccctacgttcagagttcgctggctgttcgttccaaccacaagttgactttcagtcttgattttccggtacgtcttccactggtggttaatcctgacaccattgaacctgttcaagttttggctcgtcgggttttgaagaaaggagctggtacttctgagcaggtccttgttcgttggactggacaaatgtcggaggatgcaacttgggaagatgcggggatgcttcgtcagcaattccctactgcaccggcttggggacaagccgattttgatggagggaggaatgttgcagactctacagtatctggtacggttcctgatctggcaatctatgcgaatccagtgaaaaagataccagtgcgagcaaggcgggccaacgtaggaatgggcctgagttgtgttgtaaagatgcggctatataagcatctgtggtgtggagaaggggtatcgaatatgaaatggatgtga

SEQ ID NO: 11649 - DNA, 5013 bp, Oryza sativa
  Clone ID: TFbOSC400555j.C1.o16.gm
atgtgggactacctccaagcccccaggtacctgctcgtcgtcttcaacgacgtgcccgtcgagcaggctgacgccgggttcttcaacgtcgagctcaaaatctttgactccccacctgccgatcgtggcgataatccatctctgaatgaatacactccaccctctgccaaagcgttccagaatagcttcgagtacactgattatcctaatccgccgatcattgtggtcctccgtggtgtaaatgtcagccagcctctgatccatagggcccttgctggccagcttcagggcatccttctccgccgcaaacgtcgccttggcctctttccacattcgcttcaccctatggtagcgtggagggaggaaatcatcaacgggcgagtatatatcatcaggaaagatcttgacaaccccctccccttgaaaagtggcttgcccccaagccagtgccattggaaaacgctgctgaagatcttcccgatcctcccaggtggcatcctctgcaacagaatcagaccaatatacaagaacttgagaaacaagcgcgagacgttcgccgagctgcggaacgcgcggcgcgcgcagaggcagaacgcgcggctgcggcagatcaggccacgccaggggccagctaccctagggatcaacgcccttgacaacctggtatcgcggtcacgtcgatcttcgtcttccgttgccgactccacctctgccccagccaccaccgatcccatctacgactccaccaccactccagccgccgcccctgctgtcgctccgcccaatttcccacctgctgccgccgcctcccctgcgtcctcaccctcagtcgcgtcctgctcggcccaccacatgggtgacgacctcaaggcctccatcgaggccctctccaaggacatggcgctgatgcacgagtcgatcaaggccaacgccgcctccatcgcggccaacgccaaggcgatcgctgcgctcgccaccaccaccagttcatctacgtccggcgcccgccccggctttggcgatcagccgccagaccggccgcccaagcactggcgacccgacttcccgcactacgacggcaagagcgacccgctaatcttcatcaaccgctgcgaatccttcttcctgcaacagcgaatcatgcaagaggagaaggtttggatggcctcccacaacctcctcgagggcgcccaactttggtacatgcaggtccaagaagacgagcgcggcacgccgacgtggactcgcttcaaggagctcctcaatctccgctacgggccacctctgcggtccgctcccctgttcgagctgtcctcctgtcgccgcacgggtacagtggaggactaccaggaccggttccaggccctgctcccccgcgccggtcgcctcgacgaagaacagcgagtgcagctgttcaccggaggccttcttcctccgctcagcctccaagtccagatgcagaatccccagtcgctggcggctgccatgagcctcgcccgccagttcgagctgatcgagcagtacaccgccgttcccgccaaagctcctggtcggggtgtcctgccggcacctgcgcctcggccgcaactcgccttgccggctccagctggggctgccaagcccgcgccgcccgccgccaccgctgctgataaccggccggtcaggcgcctgaaccaggccgaacaggaggaacgtcgccgcctcggcttgtgcttcaactgcgacgaaaagtacagtcgcggccacaacaaggtttgcaaacgtctgttctttgtggacagcgtggaggacgaggacgaggaagcgccggaggacgaggtcgacgcggaggcaccgctgggcgcgaccacgctcgtcgccttggttgatacagggtcgacccacaacttcatcggcgagtcggcggccgctcgcaccgggctatccgtccagccgcggccacggatgacggccacggtcgccaacggcgaaaaggtggcctgcccaggcgtcctccgccacgcacccatcaccatcgagggcatgccgttccacgtcgacttgtacgtcatgcctctcgccggatatgacatcgtcctcggcacccagtggatggccaagctgggccggatgtcctgggatgtcaccacacgcgccctgacgttcgacctggagggccgtaccatctgctggcagggcgcgccaaaccaggacgggccggcagtccgcgcggccagcgcagacgactccctattgggggggctcctcgactccttcgccgacgtcttcaccgagcccacaggcctgcctccacagcgcggccgtgaccacgccatcgtcctcaagcagggcacgtcgccggtggctgtccggccctaccgttacccggcggctcataaagatgagctcgagcggcaatgcgccgccatgatctcccaaggcatcgtccgccgcagcgactcggcgttctcgtcgccggtcctcctcgtcaagaaggcggacagttcgtggcgcttctgcgtcgactacagagcgctaaatgcgcttaccgtcaaggacgcttttccgatccccgtcgtcgacgagcttctggacgagctccatggcgcgcgcttcttctccaagctcgacctgcggtccggctatcaccaagtgcgcatgcggcccgaagatatccacaagacggcgttccgcacccacgacgggctgtatgagttcttggtcatgccgttcgggctttgcaacgccccggcgacattccaagccctcatgaacgatgtgctccgctccttcttgcgccgctttgtccttgtgttttttgatgatattttgatctacagtgacacatgggctgatcatctccgtcacctccgggctgtgctgacggtgctcagggagcacaaactcttcatcaagcgcagcaagtgtgcctttggcgtcgactccgtggcataccttggccacgttatctcggctgctggtgttgccatggacccggcgaaggtccaggccattcgggagtggcctcagccacgctcggcgcgtgcggtgcgcggcttcctcggcttggcggggtactaccgcaaattcgtccacaactacggcaccatcgctgcgcccctcaccgccctgctcaagaaggaaggattcgcctggaccgaggcagccacggcggcgttcgacgccctcaaagccgcggtctcctcggcgccgatcctcgccatgccggacttcaccaaggccttcaccgtggagtgcgacgcctcctcccacggctttggcgcggtcctcattcaagacggccatccgctcgccttcttcagccgtcctgtggcgccacgtcaccgcgccctcgctgcgtacgagcgcgagctcatcggcttggtgctggccgtccggcattggaggccgtatctttggggccggcacttcaccgtcaagaccgaccactacagcctgaaatatcttctggatcagcggctgtccaccattccccagcaccattgggtgggcaaactgctgggcttcgacttcacggtggagtacaagccgggcgcagcaaatactgtggcggacgcgctgtctcgtcgcgacaccaccgaggacgcttctgtcttggtgctgtctgcgccacggttcgacttcatcgagcggcttcgccaagcacaggacgtcgacccggcgctggtggcgctacaggcggagatccgctccggcacacgcgcagggccgtggtccatggccgacggcatggtcctgttcgctggccgcctgtacctgcccccagcgtcgcccctgctccaggaggattttgtgcggacctgcgaggtctgtcagcgctacaaggccgagcacctccagcctgccggtcttctccttccactgccggtgccacaaggagtgtggactgacgtcgcactggactttgtcgaagcgctgccccgtgttcgcggcaagtccgtcatactgactgtggtggacagattcagcaagtactgccacttcatccctttggcgcacccatactcggcggaatccgtcgctcaagtcttcttcgccgagatcgtccgtctccatggcgttccacaatccatggtgtcggatcgcgacccggtcttcacgtccgcgttctggagcgagctgatgcgtctggtgggtacgaagctccacatgacgacggccttccaccctcagtccgacggccagtcggaggcagccaaccgtgtcatcatcatgtacctgcggtgccttactggtgatcgcccccggcagtggctgcgctggctcccgtgggcggaatttgtcttcaacaccgcctaccagacctcgctgcgggataccccgttccgggtggtctatggccgcgaccctccctccatccggtcgtatgaaccgggggacacccgcgtggcagctgtggccaaaagcatggaggagcgctcagagttcctggaggacattcgctaccgcctggaacaagctcaggccatccagaagaagtactacgacaagtcccatcgtgcagtgtcgtttcaggttggggactgggtccttctgcgtctccgccagcgcgccccagcgtccctgtcgctggcagtctccggcaagctgaagccgcggtatttcgggccctaccgcatcgcggagatgatcaacgaggtggctgctcgcttggcattgccggccggcgcccgccttcacgacgtgttccacatcgggctgctcaagaagtggcacggcgcgcctccagacgctcccccgccgctgccgaacgtgcaccacggcgcggtggcctgtgagcccgagcgagtcatcaaagcccgcttggcccgtggggtgcgccaagttctggtccagtggaagggcacttcagcggcgtctgctacctgggaggacagggagccattcttcgcccgctaccctgctctacagctcgaggacgagctgcctctcgacggagggggagatgtcataggcagaacgcgcggctgcggcagatcaggccacggtcagtggctaggatggaaaggataa

SEQ ID NO: 11650 - DNA, 4386 bp, Oryza sativa
  Clone ID: TFbOSC420199j.C1.o34.fg
atgggtgacgacctcaaggcctccatcgaggccctctccaaggacatggcgctgatgcacgagtcgatcaaggccaacgccgcctccatcgcggccaacgccaaggcgatcgctgcgctcgccaccaccaccagttcatctacgtccggcgcccgccccggctttggcgatcagccgccagaccggccgcccaagcactggcgacccgacttcccgcactacgacggcaagagcgacccgctaatcttcatcaaccgctgcgaatccttcttcctgcaacagcgaatcatgcaagaggagaaggtttggatggcctcccacaacctcctcgagggcgcccaactttggtacatgcaggtccaagaagacgagcgcggcacgccgacgtggactcgcttcaaggagctcctcaatctccgctacgggccacctctgcggtccgctcccctgttcgagctgtcctcctgtcgccgcacgggcacagtggaggactaccaggaccggttccaggccctgctcccccgcgccggtcgcctcgacgaagaacagcgagtgcagctgttcaccggaggccttcttcctccgctcagcctccaagtccagatgcagaatccccagtcgctggcggctgccatgagcctcgcccgccagttcgagctgatcgagcagtacaccgccgttcccgccaaagctcctggtcggggtgtcctgccggcacctgcgcctcggccgcaactcgccttgccggctccagctggggctgccaagcccgcgccgcccgccgccaccgctgctgataaccggccggtcaggcgcctgaaccaggccgaacaggaggaacgtcgccgcctcggcttgtgcttcaactgcgacgaaaagtacagtcgcggccacaacaaggtttgcaaacgtctgttctttgtggacagcgtggaggacgaggacgaggaagcgccggaggacgaggtcgacgcggaggcaccggtgttttctctccatgccgtggccggcgtcgccgtgggacacccgatcctgctccgggttcagctgggcgcgaccacgctcgtcgccttggttgatacagggtcgacccacaacttcatcggcgagtcggcggccgctcgcaccgggctgtccgtccagccgcggccacggatgacggccacggtcgccaacggcgaaaaggtggcctgcccaggcgtcctccgccacgcgcccatcaccatcgagggcatgccgttccacgtcgacttgtacgtcatgcctctcgccggatatgacatcgtcctcggcacccagtggatggccaagctgggccggatgtcctgggatgtcaccacacgcgccctgacgttcgacctggagggccgtaccatctgctggcagggcgcgccaaaccaggacgggccggcagtccgcgcggccagcgcagacgactccctattgggggggctcctcgactccttcgccgacgtcttcaccgagcccacaggcctgcctccacagcgcggccgtgaccacgccatcgtcctcaagcagggcacgtcgccggtggctgtccggccctaccgttacccggcggctcataaagatgagctcgagcggcaatgcgccgccatgatctcccaaggcatcgtccgccgcagcgactcggcgttctcgtcgccggtcctcctcgtcaagaaggcggacggttcgtggcgcttctgcgtcgactacagagcgctaaatgcgcttaccgtcaaggacgcttttccgatccccgtcgtcgacgagcttctggacgagctccatggcgcgcgcttcttctccaagctcgacctgcggtccggctatcaccaagtgcgcatgcggcccgaagatatccacaagacggcgttccgcacccacgacgggctgtatgagttcttggtcatgccgttcgggctttgcaacgccccggcgacattccaagccctcatgaacgatgtgctccgctccttcttgcgccgctttgtccttgtgttttttgatgatattttgatctacagtgacacatgggctgatcatctccgtcacctccgggctgtgctgacggtgctcagggagcacaaactcttcatcaagcgcagcaagtgtgcctttggcgtcgactccgtggcataccttggccacgttatctcggctgctggtgttgccatggacccggcgaaggtccaggccattcgggagtggcctcagccacgctcggcgcgtgcggtgcgcggcttcctcggcttggcggggtactaccgcaaattcgtccacaactacggcaccatcgctgcgcccctcaccgccctgctcaagaaggaaggattcgcctggaccgaggcagccacggcggcgttcgacgccctcaaagccgcggtctcctcggcgccgatcctcgccatgccggacttcaccaaggccttcaccgtggagtgcgacgcctcctcccacggctttggcgcggtcctcattcaagacggccatccgctcgccttcttcagccgtcctgtggcgccacgtcaccgcgccctcgctgcgtacgagcgcgagctcatcggcttggtgctggccgtccggcattggaggccgtatctttggggccggcacttcaccgtcaagaccgaccactacagcctgaaatatcttctggatcagcggctgtccaccattccccagcaccattgggtgggcaaactgctgggcttcgacttcacggtggagtacaagccgggcgcagcaaatactgtggcggacgcgctgtctcgtcgcgacaccaccgaggacgcttctgtcttggtgctgtctgcgccacggttcgacttcatcgagcggcttcgccaagcacaggacgtcgacccggcgctggtggcgctacaggcggagatccgctccggcacacgcgcagggccgtggtccatggccgacggcatggtcctgttcgctggccgcctgtacctgcccccagcgtcgcccctgctccaggaggtcctgcgcgctgtccatgaggagggacatgaaggcgtccagcgcactctccaccgactccgccgggatttccactttcctaacatgaagagcgttgtgcaggattttgtgcggacctgcgaggtctgtcagcgctacaaggccgagcacctccagcctgccggtcttctccttccactgccggtgccacaaggagtgtggactgacgtcgcactggactttgtcgaagcgctgccccgtgttcgcggcaagtccgtcatactgactgtggtggacagattcagcaagtactgccacttcatccctttggcgcacccatactcggcggaatccgtcgctcaagtcttcttcgccgagatcgtccgtctccatggcgttccacaatccatggtgtcggatcgcgacccggtcttcacgtccgcgttctggagcgagctgatgcgtctggtgggtacgaagctccacatgacgacggccttccaccctcagtccgacggccagtcggaggcatccaaccgtgtcatcatcatgtacctgcggtgccttactggtgatcgcccccggcagtggctgcgctggctcccgtgggcggaatttgtcttcaacaccgcctaccagacctcgctgcggcataccccgttccgggtggtctatggccgcgaccctccctccatccggtcgtatgaaccgggggacacccgcgtggcagctgtggccaaaagcatggaggagcgctcagagttcctggaggacattcgctaccgcctggaacaagctcaggccatccagaagaagtactacgacaagtcccatcgtgcagtgtcgtttcaggttggggactgggtccttctgcgtctccgccagcgcgccccagcgtccctgtcgctggcagtctccggcaagctgaagctgcggtatttcgggccctaccgcatcgcggagatgatcaacgaggtggctgctcgcttggcattgccggccggcgcccgccttcacgacgtgttccacatcgggctgctcaagaagtggcacggcgcgcctccagacgctcccccgccgctgccgaacgtgcaccacggcgcggtggcctgtgagcccgagcgagtcatcaaagcccgcttggcccgtggggtgcgccaagttctggtccagtggaagggcacttcagcggcgtctgctacctgggaggacagggagccattcttcgcccgctaccctgctctacagctcgaggacgagctgcctctcgacggagggggagatgtcatgtgggggcgcacgtatgtgcgacgccgcagagcgcgagacgttcgccgagctgcggaacgcgcggcgcgcgcagaggcagaacgcgcggctgcggcagatcaggccacggtcagtggctag

SEQ ID NO: 11651 - DNA, 3519 bp, Oryza sativa
  Clone ID: TFbOSC404812j.C1.o11.fg
atggaatctatggaggagcgtttgatggatactctcaaggcactagcactcaaggtggatggtgtggaggacatcgccaagcgtttgacgcagatcgacctcaagctggcgcagcaaggcgagtggctagatcgggtgcagacgaaagtggatctctccatgacgtccctcggccaggttcagcaagaacagagtcaggtgtggaagttagaagtgggttggcatgattggaccatgttaaaaatggctatcgctggagaatttgagggggcacagcttggtaatgtgggcaagagacattttcagaagagagatcctgttgtttggaaacaacctgaaaagcctaagttagccactggggagttatggaaagcacagcaactcaaggaatatcgtcgagctcacgacctttgtttcaagtgtggggataagtatgtgcctggacatgtgtgtgtgaaaccagataatgctcagctaaaggccatggaagttcaggaggatcaggtgattttgtctgatgataatttggatgctgtggtggcatctgacatggtggaagatgattgcaatttatctttgcatgccatggctggtacatgttctgcttctactttacagttgcgagcaatggtgggcaatcaagttattctgattttggtggattcaggcatggactggttgaccaaacatagccctatgcagtgtgattgggttgctagaagcattcaatttccctatcaaggtgatttgataaccttgcaaggcattcagtctactcctttttctgcagttactgaggcatctgttcatcaggtggttaagtggactcaaggcaattatatttgggctatggcagtacttgaaccagatttctctaagggctccccacctgttgaactagctgttcagtcagtattggataagttttcttccgtctttactgctaccaattctttgcctcctcatcgtgtgttggaccactctattgctttgattccaaattcggtccctgttaattccagaccttataggtattctccaacacaaaaagatgagattgaaaagcaagttttggagatgttgaatgctggtttgattactcctagttgcagtccatttgcttcacctgttttgttagttaagaagcaggataattcttggaggttttgtgttgattatcggcggctgaattctttaactattaaaaataagtttcctctgccaatagttgatgagctattgaatgaattggctggcaccaagtttttctctaaactggaccttcgcagtggatatcatcaaataaggatgttagaaactgatgaatttaagactgcattcaaaactcatcatgcccattttcagtttcgggtgatgccatttgggctcactaatgctccagctacttttcagtgtttaatgaattctattttcgctccattccttcgtaaatttgtattggtattcatggatgacatcttgatctatagtaggagtttggaggataacattcaccatatagagttagtgttacaattgctgcagcaacatcaattgtgtgctaagctttctaaatgttcttttcctcaaaataagttggaatacttggggcatatcatttctgctgagggtgtggctactgatccagaaaaaactagggttatgcaggattggccacttcctagcaatgtcactgaattaaggggctttttggggttaactggttattataggaagtttgtcaaacattatggcatcctggcaaaacctttaaccatgttactccaaaagaatgctaagtttgtatggacacctcaagctcagtcagcatttgttgctcttaaagaagctatgtgttctacacctgttttagcccttcctgactttgctaagccttttgtgattgagactgatgcttgtgccacaggaattggtgttgtgttgtctcaagaaggacatcctgtggcattttatagcaaggcattgggaattgtgaatcagcggctgtctatatatgaaaaagaatttttggctataatgatggcagttgatcgttggagatcttatttacttcggggtccttttgttatcaagactgatcacaaggctctttgtcatttagatgatcagactttggacactgagttacagaaaaaggcgatgactaagcttattggattacagtacaagttccagtataaaaaaggagttgagaacaaatctgctgatgcactatccaaagagattctcaactcctatgctgtagattcatctgctcagcagttactttgtgagctagctgtctcttctccaaatgctaagggtttttctttgtctaatggtttaatcaggaaggctgcttggcaagatgtttctatggactttatagaaggattacctctgtcaaaaggtgctaatgtaatctttgtggtggtggatagatatacaaagtttgcacactttttgcctctcaggcatcccttttcagccttgcaagtggctaaggtctatctgaacaatgtggcatcattatatgggttgcctaaatctattgtctcagatcgtgataaagtctttactagcaacttttggcagactttgttcaagcgctttgagattcctttacatctgtccacaacctatcacccacaatccgatggacaaactgagcgagtgaatcaatgccttgaaatgtatctcagtccttctaattctcctaatgctgatcagttattccaggaacgtgctatgttctcttctttactgaaacatcatttgtctcgtgctcaaaatcgtatgaaacagacagctgatgctaagcgcacactgcgctcatttcagcctggtgatttggtcttactgaagttgcaaccttatgctcaaaagtctgttgtggctcgtccttttcccaaactggcgttcaagtattttggtccatttccagttgtggctaaagtgggttcagtcgcatataaactgcagctccctgatcatagtgagattcatcccgttttccatgtgtctcaattgaagcagtacattccagatgcttcaccggtgttttccactcttccttctactctgcagttggatgccactgagttgattccatctgagattttggatcgccgaatggttaagaaagacaatgctgcagtggttcaagtcctggtgcgctggggtactttgtcgccggaattggccacttgggaggattatgacgtgctgcgtgctcggtttcctttggcacttgtctggggccaagctggtgctcgtgggggggggggcaaatgtcacgtgtgccattaccggacatcacagtggcgacaaaggaaggagaacaggggaaagcgtaaagtgagaagacgtgtcttcgccaagaaagcgtattgtgtaaagagagtgaatcacacacagaaaagcaatggcatcagctcatgtgccaactactgtggcttctatttggaggtctatagactaccgattccccctaacctcgctttattaattgatgcctaa

SEQ ID NO: 11652 - DNA, 4044 bp, Oryza sativa
  Clone ID: TFbOSC401158j.C1.o5.fg
atgtcgattgctgaaggagaagttgtcaatctgaaccagaaggtggtggatctcagcacgaacctcgaccgcatcctgggatcgctaaagggtgtggaggcttggattccaagcgtcgacgctggaatgcaaggcctccggcggtcggtggaaggaatcaaggcgcgggtcatcaagctggaggcccagtcgtcgacggcgacgcctccgccaaatgggcaccgcgtggacaacaagtaccagggtgaagcgactgcggcagagtctgcccaggagcgaaccctggtcaagagtaagatccaaatccctcaatctgcagttaatttcgaagttggggagagttcagagtgggggattgggaattctcaatttggaacacaggggcctagattacctaaaactgaattccctaagtttgatggagataaccctaagttgtggaagaaaaaatctgaaaaatactttgacatgtatcaagttccttatgcaacttgggcctcctttgctacccttcacttcgtaggaaatgctgctctgtggttacaaacttatgaggaattacatgctgtagaaagttggtcggagttgtgtgtagcagttaatgggaagtttggtagggataggtatcaacaattcttagagaaacttgataacttgaaacaagagggaactatagaggagtattacagtaggttcgaggagttgatgcataaggtactggtgtataataggggttatgatgagaccttctttgtgactaagttccttgggggtttaaaaactgagattaaggcagcaattaagctgcacaggcctggtactgttgatgctgcgttgtctcttgctaaaacgcaggaagagctattgatggaggtgaatttgaaggcatatcacaagaccactataaaggagtcgttcaagaataatttcaaggtgccaagtctagctaagggcatccttggccctccacctgatgagatcaagaaaactgaagaaaggcctaaatgggaagaacaatatgactcattgaatgcagctagaagagctaggggagagtgctttaagtgtggagaaaaatttggtccaggccataagtgtccaaaggctgttcagctccatgtcttggatgaattgcttgaggtctttcagttttctgatgaacctgggcaggtggaggagagtagcagtgatgaagaactgcttttatctgaaaatgctttgtttggaactgagggcaagcgtactatatggttgcaaggactgattcagcaggtcctcattttgattgattcaggtagctcaagcagttttatggcttctcatttggtggacaggttgcatctggttcccaatagcatacctagtgctctggtgatgataatagatggtggaaaattgttttgtgatgagatggctgagcaagttgagtggtggtgccagggtaatacattctcttctaacttcaagattctcgggttgggtggctatgatttgattttgggaatggattggcttgaggctcatagtcccatgtggattcattgggggcgtaagactggtatgcataaaaagggggtgatttcacagttaatccagctatgttccattcaagaaatagctgcaaaccaggaggcaattccaagggaaattgaggcggttttgcagcactatcaaggactgtttcaagaaccaacagaactcccaccacacagaacctttgaccatgagattcctttgttagatggggccaagcctgtcaacattaagccctacaggtatgctcctaaacagaaggatgaaatagagaaacaggtcactcaaatgttgcagcatggtgttatacagcctagccatagtccttttgcttcccctgttctcttggttaaaaagaaggatggtacttggcggttctgtgtggactataggggtttgaatgacattactgtgaaaaacaagtacccaatgcctgtggttgatgaattgttggatgaattgtcaggtttaaaatggtttactaaactggatctaagatctggctatcatcagattcggttagtggaaaaagatgagtttaagactgccttcaagactcaccaaggacattataaatttcgtgtcatgccattcggattaaccaatgcaccagccacttttcaggggttgatgaacactatatttgcacatgccattcgcaagtttgtgctagtttttgtggacgacattttgatctatagcaagaccttggctgaacatgtctgccatctgaaatcagtactgacagtgcttcaacaacatcagctctacatcaaaagaagtaaatgctctttttcacaaccttctctggaatatttgggacatataattggtgctattggggttgccactgatcctcagaaggttcaagctataagggactggccagtacctaaaaatcttaagcaattgagagggtttttgggcctggcagggtattatagaaagttcatcagaaattatggggtcatcactaagcctttgatagagttacttaaaaagggtaccttctttttctggtctacactggaacatactgcctttcaagaagtgaagcagtgtcttcagcaagcaccagttttggccatgcctgacttcaaccaacaatttgttattgagactgatgctagtgacaagggtattggggcagttctcatgcaggctggccatcctattgcttttctgagtaaggctttgggacctaaagcacaagggttttctacatatgagaaggaatgtttggctattctcatggctgtggataaatggcatcaatatttgcaatatgctgagtttgctatcctaactgaccacagaagcttgactcatctgtgtgatcagaaattgtcaacacctatgcagcaaaaggccttcctgaaattgttagggttgcaatggatggaagttgtggtcgatggttatcaccatgatcctgctacaaaacagttattggttgaattaagtttacatcctgatggggtcaacaatttcacattggttaatggcattatcaaattcaagggtagaatctggctagggaaacacgtggaagcccagcaagctgtcttactctccctgcacaatagtggcgttggaggccactttggtatagctgccacttaccaacgaatcaagagcatgtttgcctggcctggactaaaaagggatgtcaaggcttatgttcagtcttgtgcaatctgtcaacaagcaaaagccatcatctctgacagggacaggatctttacaagtgctttatggcaggaactctttcgactctcggatgtcaagttgaatatgagctcgtcttaccaccctcagacggatggccaaacggagcgtttgaatcaatgtttggaagcttatttgcattgtgctgtttattcttcccccgctctgtttgcccgtaagccaactagcttcggtgtgattgatatgggtcaaagtactatcccggatgtgcaacagttgcttgtcaatcgggcgaaattgaacgagttgcttcaccatcatctggttcgagctcaacagcgcatgaaagcacaagctgacaagcatcgttcaaaacgccagtttgcccctggtgatatggtttacttgcgacttcaaccatatgttcagctaaccatggccaaacgttcttgtcacaaattgagtttcaggtactttggaccttataaagtcctggaacggattggagcagtggcttatcgattggcattgccggctgggagcttgattcacctagtggttcacatctctttacttaagaaggcagtgcaacctgatacaccagtcagttcagatctacccctgacttgttctactgatgaagttgaagtctatcctaaagccattctacgtcgtcagttgatcaagcgtggtggttcttccattccttctgttctggtacgatggtcagggcttcctgatactcttgccacctgggaaaatttggccgacttatggcgtcgttttccatctgcgctggcttgggggcaagccagtccttaa

SEQ ID NO: 11653 - DNA, 1084 bp, Oryza sativa
  Clone ID: TFbOSC414007j.C1.o20.np
gatcaaagtttacatggccagggtttaagaaggatgtttagaacaatgtgaagttttccaacaagcaaaagctgaacatggcatggctccagatttgttacgaccactccatgttcccctacaagtttgggaaatacctaagtcaggcagattttatattattctagtggtcattgataaattcacaaagtttgcctagttgattcccctatctcatcctttcacaacacttactgtagcccaagctttcatgtccaatatttatgagactttgacatgccaactatttaaattggcatatgtgaaattgaacatgagctcatcctatcatccctagacagatgggcaatcagaaatgctaaatcaatgcgttgaagcatttttgtggtgtgatgttcatgcttgcctgactaaatgatcacaatagctctctcaagctcaacattgatacaacactgatttccatagagcccttggaaaataaccatatgaaattttatttgccagaaagcacacttattttggtgaagtgaatctggggcagagcataatgcctgatgtgcaggtttggctacaggaatactcacagttgaatgtggttctacgtcatcaactgatcaaggcacaacaatggtggttcatcaagccaacaaacacagaactgagaggtggttagaattgggggatctagtatacctgaaacaccaactcttgatacaccaaccctatatgcagataactgtagcatgacgttcctatcataaactcagtttcaaatactatggcccctacagagtgttagattgggtgagagctgtggcatacaaattggagctcctagtgtgtagtcagatacatctggttgttcatttgtggttgctaaaaaaggcattgaaggttggaacgcaagtaattactgatctccctaaattatgttgatactacagctgaagtcgtgcctgaagaagtgcttcaacaccaactgatcaagagtggtagggcaatgattcctcatgtcttgatacaatggaccagactgccaatggagttggcaacctgggaaaacctgtgccagctatgacaa

SEQ ID NO: 11654 - DNA, 555 bp, Oryza sativa
  unsure (1)..(555): unsure at all n locations
  Clone ID: TFbOSC16508j.C1.o1.np
ngcgttccagttagcnatgnnatgaacaacccctgcttttggtctnnnnnnnnnnnnnnnnnnnnnnnnnnnnnnnnnnnnnnnnnnnnnntaaagctgcagccatacagacaaacagcttttggaattcgcggtgcacttaaattacgatccaagttctatggacctttcaagatcatggagaaagtaggaagagtggcatataaactgcaattaccagaagggagtaacattcatcctgtgtttcatgtaagccaattgaagaagcacattggttctagagctgtaccaatggcgaatttgccttcagttggtccggacggacagatcaaaactgaaccggtggctgtgttgaaaagaagaatgattcccaggggaggagttgcagtaacacagtggcttgttttgtggcacaatctaagtccatcagaggcaacatgggaagatgcttcgatgatacaaagtatgtttccgtcttttaatccttgaggacaaggatcagctcaaggggaaggtaatgtcaggaattggacaagctttcttcgtgagaacaat

SEQ ID NO: 11655 - DNA, 4245 bp, Oryza sativa
  Clone ID: TFbOSC30417j.C1.o2.fg
atggctcaagatgggaaactcgatctcttgttgaagatgatggaggaggccgagaaggagcgggaggagatggataggaagcgcgaggagtcggaggccctgaatcttgtggagttgcagctgttgaagcttgcgatggagtcccgcatacccttggtggagaaacaggtgagcgagttggggggttctgcgaatgatttggcgaagagggtgaattccttgcaggcaagtgtggagaaatgtcagcgggaagttcagcagaacgcgctatacaaaggggaatccagccaaggaccaactcaattcccaaatgatgatgacctcaatggaaactcaccgaatcctttcctgttcacaccccaacaaggatggcgaaatcctccgcagttcaattctgtaagcccatttactcctgagaactcgggttgtccaatctttgattctggaatggctagtattggtggcaatgtcccttctatgtcttgccctcagtttgatggagaaaatccccagatgtggagagataactgtgaaatttattttgaggtctatggggtacatcctgctaattgggttaaggttgctctgctgaatttcactggaagtgcttcgttctggttgcaatctgttaggaatgagttggtagggatttcctggttggagttatgtgatagagtgtgcccgcagacaggcagtgtgactgagtatgtggagagatttgatagtctcatgcatcagctgttggcgtatgacaatgcccttacaccaaggtacttcctaactaagtttgtggatggcttgaaggatgacattagaggggcagttatgcttcagagaccggaagaaatattggaaggaagcagaaaaccaagttacaggaaatctgatggaaccaatttcaacaaggtgttttcccgacctactcagccaactgtttggccaaaaagtcctgctcagactactggagatgacaggaagctgattgagtcagggaagataagagtcaaggggttgatacaggggactaaattactgatgcttattgactctggcagttctcattccttcttagatgagaatattgttcagacaatgcaaggagttacatcccttccacaacctgttaaggttaaggttgctagtggtgaagttctgatttgtgacaaacaattaccggattatgcttggtggcttcaggggagatgttatagaaccaactttaaattgctttccctgcctgggtatgatgccatcctggggatagactggttacaagggctgggagtcatgagaataatttgggttcaaaagtggttggaatatgagatcaatggaagtccagttaggattcaaggggtgatgcccaaggttgatgcctgtcctctaatatctggagataaactcatgggcttgtgcaaaatgggagctcttatgcatctgtttcagattaccagtgaaaccgacatacataaacctgagattcccattatgatacaagaagtgatgaatgaattcaattcagtttttgaagaaccacaaggactgccacctaggaggcgttgtgaccattccattccattaattcctgggtctaagccggtcaaccttcggccctatggatacaatccagcccagaaggatgaaattgaacagcaagtacgagatatgttaaagtctggagttattcatcctagtgttagtccgtattcatctctggcattgctagttaataagaaagatggcacctggaggctttgtgtggatcatagactgcttaatgctatcaccatcaagagcaaataccccctgcctgttattgatgaacttttagatgaattggccggcacaggttggttttctaagttggatttgagggcgggatatcatcaaatcaggttggttgctggagaggaacctaagaccgcctttcaaactcattttgggcactttgagtatcgggtgatgtcctttgggttgacaggggcacttgcaaccttccaaggagctatgaatgaaaccttggcttcggtcttaaggaagtgcgccttggtgttctttgatgacatactgatttacagtccaaccttggaagctcatgctcaagatcttagaactgtcttgcaactcttgcaggatcatcagtggaaggtgaaattgagcaagtgctcttttgctctgaaggaactcaattatttagggcatactattggagtggctggagtttccactgaccctagcaaggtacaagatattgtcaattgggctattcctactaccttaaagaagttgaggggattcttgggaatagctgggtattatcacaaattcgtgaagaattttggtgtgattagtaaaccactcacaaacctgttaagaaaaggggttgagtttgtgtggactccggaggtgcatgagtccttcgagcaatttaagaaagctttggcttcagctcctgttcttgctcttccggattttactaaaccttctgtcattgagactgatgctagtgagatcggaattggtgcagttttgtcccaggataaacaccccattgcttatatgagtaaggcattgggtcctcgtactagggggttatccacttatgaaaaagaatgcttggcaatcctattggcaattgagcattggcggtcctaccttcagtatgcagagttcactatactcactgaccacaagagcttgatgaatcttactgatcagcgcttgcatactccttggcaacaaaaggcctatacaaagttgctagggctgcagttcaaaatttgttacaagaaaggaatccacaatgaagcagctgatgcccggtccagatgtgaccataactcttctttggaggtggttgctatttcgcaacatttgaacagagcacaacagtttatgaagagccaagctgacaagaaaagaagttttagagcttttgcagtgggagattgggtctatttgaagttacagccatatgtccaaacttcagtagcagccagggctaatcacaagctgagtttcaagttctttggtccttatgaaattcaagagaagattggtgttgtagcataccgtttagtccttccggcgagcagctctattcaccctgtttttcatgtctcgcagctcaaagcagctcaaggttttaaaggggatgcttctgttcatcttcctgttcagtcttctactaaacaagttcctgtggctattctggatactagggtgcgcaagtcaggtatgtctgttattcctcaggtgcttatacattggtctgatgatgtgatcgccaatgcaacttgggaagacttggaagatcttcgtactcgtttcccaagagcactggcttgggggcaatccagttttcaaggggggaacattgtcaaggctgcgttgggtgctgatgctgacattgccaaggaggagaagatcgaagggagagggaggaagaacgtgaaagcggcgcaggtgcttaccacgatagagaggtggcagcaatgccgggtggttgacaacaagttgatggcgatggtggatggcttgatggaagacggcgcaggaagtggggaagacgacagaggtggatggcataacagtgctgcgccattcgctgagaattcgcgtgagagagagagtgaggattcacaatcttgggctttgctatcatttggtatcagagccatgtccgctcccgccagcggttcgtctcgcactcaccggcgaacaggccgccggctctcgccgtctccgccgcgcgtgagcgggcgacagctcgtcgtgcagcggattgttaaggaagatggctccgtctactatccaatactcagacgctcaaattactccgattgggcggtgttgatgcgagtcaatctccaggctcaaggtctgtgggatgctgtcgacaccggcgatgtcccgtatcaggaagattgccaggcgctttcagccatcttgcgagcggtgccggctgagatggtccggccgcttgccgagaaggacagcgccaaagacgcctgggatgcgctcaaatccatgcgagtaggcgcagatcgtgttaaggagtcccgagcacagaagctgcgccaaacttttgagtccatgcgattcaagaatggcgaacacctggaggatttcagccttcgtctccagtccttggagatgatctgtctgaagagaaggttgtttgaaaattgcttcgcgtcgttccccggaggtatcgccaaatggctctatcgattgaaaccttga

SEQ ID NO: 11656 - DNA, 4062 bp, Oryza sativa
  Clone ID: TFbOSC412872j.C1.o11.fg
atgtcttccaccgtcaccaacgtcgccgacgattggaagaagggtctcgctgaggtcctcgaccgcttggactccatccgcggcaagctctccgacctcgacaatgaacagcaggcgcaccacatcgccatccagcgtttggaacgcgctggccgcgatcgctcgccgcgccgtaacaatcgcgaccgtgacgacgaccacgacaatgacggccgccgcggtgatcgtccgccacgctaccacaagattgactttcccaaattcaacggccaaggtgacccactccatttcctcaatcgctgtgaacaattcttccagggccagcgcacgccggaggaggagaaagtttggctcgcatcctaccacctgctcgacggtgctcggcagtggtatatgcgcatcgaacgcgatttgggcacaccgacatggcgacgcttctccgacttgctcaatctccattttgggccgccgttacgccaggcgcctttgggcaaactcgccgcctgccgacgcaagactaaggtggccgcctacatcgaccgcttcctcgacttgctcgctcgcgctggccctctcacggaggagcagcaagtagacctcttcaccaccggactccaagaaccactcagcatcgacgcgtcctcttcagcggcgccgaccccgtcgcaaccggatgcagcttcctcggtgggacaagcgtccacacaggttgcaggccgcacggttcgccgcctgtcccagtccgagatggacgaacgccgacgcaaaggattgtgcttcaactgcgacgagctctacgcccgtggccacaaaaaggtttgcaaacgcctattccttcttgatttggcttatgatgatgatgatgacgaggtggaaggcgctgcaccggctgtcgaaccggagacgcttcgcatctctctgcatgcggtcaccggcgtccgtccgtccaacgccatgcatctccatgtccgcttgggcgacgccaccctccacgcgctcgtcgacacggggtcgacacacaacttcctgtcccaggaggccgcagcacgggtgcacttgccgctcgtccaacgcgctggcctgcgcgtgacagtcgccaacggcgacaaggtgccctcgccagggatgttccaggacgcgcgcatctccattgacaccgaggtgttcatcaccgacctctacgtccttccattgggcggctacgacctcgtcctcggcatgcaatggttgtcaacgctgggccagatactatgggactttggccaacttaccatgtctttttggcacaaagatcacatggttctgtggcgtggcctgcccacgggcgcttcaccggctgcgcacgtcgccaccacccgcgacctgctcgacgacctcctcaccgagttcgccgacgtcttcgccacgccatccggccttccgccaccacgccatcaagaccaccgcatcactttgctgcccgacaccgcgcccgtggcggtccgaccttaccgctactcggcgcgccacaaggacgaactggaacgccagtgccgcgacatggaggcccaaggcatcatccgccgcagctcgtctgccttctcctcgccggtcctcttggtcaagaaggccgacgggtcgtggcgcttctgcgtcgactacagggcgctcaacagccgcactgtcaaggacaaattccccataccggtggtcgacgagctcttggatgaactccacggcgcgcgattcttctccaagctggacctccgctctggttatcaccaggtacggatgcgcgacgccgacgttgagaagacggcattccgcacccacgacggcctctacgagttcttggtgatgccctttgggctgaccaacgcaccggcgacattccaatccctgatgaacgaggtacttgagcccttccttcgccggtttgtgctcgtgtttttcgacgatatattgatctacagcccgtcgtggtcatcgcacctacaacatctgcgcgccgtcttcaacacgctccgcgcccacaagctgttcgtcaagcggtcgaagtgctccttcggggacacctcggtcgcttatttgggccacgtcgtctccggccagggcgtcgccatggacgcctccaaggtgcaggcagtggtggactggcctcgcccctgctccgcgcgagctctccggggcttcctaggccttgcggggtactaccgcaagttcatcaacgatttcggcgccgtggcggctcccctgacacgcctgctcaagaaggacggcttcttgtggtcgccggaagccgaggtagcgtttggacgtctcaaaaaggcgctcaccacggcgcccgtcctcgccctgccggacttcgatcagccgttcatcgtggagtgcgacgcatcaggcacgggcttcggcgcagtgctgcatcaggatggaggacctattgcctatttcagccgcgcctttgcgccacgccaccacgccctggcggcctatgagcgggagctcatcgggttggttcaagcagtccgacactggcggccgtacctttggggtcgccggtttgtcgtcaagaccgatcacttcagcttgaagtacctgctggaccagcggctagccacgctcccgcaacaccactgggtcggcaagctattgggctttgatttcgaggtcgcctacaagccggggcggcagaacacggtggcggacgcgctgtcccgccgcgacgagccggctgcctcgctttgcgccatcaccacgccggtgtttgactggctacaggatctgcacaccgccaacgacacggaccccgcgctggtcgccctccgggaccagattctggccggcaacaggacagcaccatgggcactcaccgacggcatcgtcaccttcaagcagcggatgtacattcccccggcgtcagcccttctccagacggccctggcaatggtgcacgatgacaagcacgaaggcatccagaagaccttgcatcgtctccgccgcgagttccatacgccgggtgaccgccgtgtggtacaggaattcgtcaaggcttgcgccgtctgccagcggaacaagacggaacatctccaccccgccggcctgctcctgccactgccggtgccgtcggccgtctggtccgatgtgtccatggacttcgtggaaggatttcctcgcgtcgcaggcaagtccgtcatcctcaccgtcgtcgaccggttctccaagtacgcgcacttcatcacgctgtcgcacccatactccgccgagtctgtggcgcgcgccttctacaccgacatcgtacgtctgcacggcatcccaacatcgatcgtgtccgaccgggatccggtgttcacttcgacattctggaatgccctcttcgcggccacaggcaccaagctgcacatgtcatcggcgttcctcgacgacattcgctaccggctggagcaggcccagcagcatgcaaagaagttctacgaccgccaccatcgggagctgcaatttgtggtgggcgactgggtttggctccgtcttcgccatcgcgttccggcatcattagcaactccggtaaaaggcaagcttgggccgcgctattatggaccatacaaggtactggaaattatcaacaaggtggcttatcgcctcgctctgccggctggggcgcgcctgcatgatgtgttccatgtcggtcttctcaagccgttcgtcggcacgccgccgacgtctccaccggcgctgccctcgacactacacggagcggcgttgcctcagccagcacaagtactcaagtctcgtatggctcgtggggtgcatcagctgctcgttcgttgggacggtctgccggcatctgcaacgtcgtgggaagacttggacgatttccgtactcgctatcccgcattccagctcgcggacgagctatttgtcgaggaggggagagatgttatgtggggcattcagtatcagcgccggaaccgacgccaacagccagagcaggcgccgttggacaccaaggaagaacttggtgtcaatggttttaagaaaggagaggtcaatcctgtatgctcatttctgatatatggaaactag

SEQ ID NO: 11657 - DNA, 3357 bp, Oryza sativa
  Clone ID: TFbOSC414256j.C1.o13.fg
atggagaaggcgaccgcgacgaccaaagtggctggccggagacagaggggaatggatagctcaccggctcacgagggagatggggttccggtggggttccggcgacgcgaggcggtggccgagatggcccacacggcggcggagctagcggcggcggcggcttggcgcggcggcggccctagtggcaacggcacgcggccggagatgggcggcggcgacggagctcggcgagcgtggcgcgacggcggtagagggcgtgggagaggacgtccactagagctcatgaaacgtgtagaaattgggaggagtttgttagggcagtgtgtgcaaaatttggaggaggttttggaatctgttcgaagggaaaatcgtagagccgaggttgtgggaggagcacgcggcagtttcaaatctgggggtttctcttctgtgtcagctcgtgcaattcctggtgttggtggacgagcggatgatcggcgtagtcaggatgatcatcgcacacctgaggacaagattgcagccctacaagcctatcgtcgagcgaagggtttgtgtcacacatgtggggagaaatggagtaaggaatacaagtgtggaccaacagtgcaattgcatatagtggaagaattgttgggtatgttccctagtgaggctgctgatgggtgtgacagtgattgccgggaagatgaagttactgaatctgagggagttctctgtcaaatctccaaagaagctatactcgaatttgctgataagctttctacccagcaatatttctgtccagctattaaggtgaaagtggctgatggagggtctatttttgatgaaccacaagggttgccaccatctcgagtgtttgatcactctattccattgcttccgggtgcaaaacctgtcaatttgcatccttatcgctacaacccagcacaaaaagatgaaatcgaaaagcaagtacgtgagatgctgcaacaaggtgtaattcagcccagtgccaaccctttttcttctcttgtccttttggtactgaaaaaggatgggacatggcggttttgtatcgattaccatcatttgaatgctattattgtcaagaacagatatccccttccaattattgatgagttgttggacgaattgttgggtgcttgtgtgtttactagtttggatcttcgagcaggctttcataaaatccatatgaagctggaagatgaacacaagacagctttcaagactcacaatgggtattacgaattccgggttaagcgctcgaagtgtacctttgccagttcacaactcacatatttggggcatgtcattagtgatgcgggtgtgtccaccgaccctaagaatattgcagctgttgttcgttgggcagtacctcaaaatgtgaaggaagtgcgcggatttttgggcttagcaggatactaccgcaagtttgtgcgccattttggggtgatcagccgtccccttactgatctcctaaagaagcatgtcgtgtttgtttggactagcgagcatcaagctgcttttgatgcgttaaaggcagctttgacttcggcaccggtgcttgcacttcctgactttactcaaacttttgagattgaaactgatgcttcagaccggggagtgggagctgttttgatgcaagtggaccattggcgttcatatttacaatttggggagtttatcatccgtactgatcaaagaagccttattcatttgggggatcagcgtcttgctaccctttggcagcaaaaagcactcaccaaattgcttggactgcagtacaaactggtgtataggaaaggtgttgagaatcgggcagctgacgctctgtcgcgctgtgactctcctgagattcttcagttaagtgctttatctgtgtgtgttccctcctggttggatgaggttcgggacagttatgctagtcacccacatacatccagcttgctttctcaagtacttttgcaaccagaatcagctcctcattttagtgtaacagatggagtattacgttacaaggggcgcatttggttgggccataatgtgggactacagcagaaggttcttggagcattgcacaatgctgctgttggtgaccattctggagtgcaggtaacctatacccgattgcgcagactgtttgcttggcctggtctcaagaagtcggtgcagctctttgtggattcctgttctatgtgtaaacaagctaaggcagaacgggtgcgatacccgggacttcttcagccattacctgtcccagaacatgcctggcaagtggtgtctttggattttatcgaaggattacctctctcattgggattcaactgcattttggtggttgtggataagttttctcgctatgcacactttattgccttggctcatccgttcacagcttttgatgtggctttagcatatatgcaaaatgtgtacaagcttcatggtctgcctcaatctatgatttcagatcgtgactgtatcttcaccagtaatttatggtctgaattgttcaaattgactgatactcagttgcgcatgagttcggcatatcatcctcaaactgatggacaaacggagcgcgtgaatcagtgcttggaaacctttcttcggtgctttgtccatgcttgcccgcgtaaatggtttcggtggttggcgttggcagaattttggtacaatacaactcctcactctgctctcggtaccactccttttgaagctttatatggtcatcctcctcgccacttcggtgtacgttatattgctgaatgtgcggtacctgacttgactgaatggttgcaagagcgtcagatcatcactaatctcttgcgtcagcaccatcttcgtgcacaacaaaggactaaatctcaagcggacaagcatcgttctgatcgggtcttcgctgttggggattgggtttttctgaaggtgacggcgcgtgttggtccggtggcttaccgtttgcagccgccttacgactgtgctatccatcctgtcgttcacgtatctcagctccgcaaggcttcacctccacaatcagctgttgcagttcggcctcttcctcttgttgagtctgaagaattgattccagttcagatcatcgctcgtcgtctgtacaagcgtggcgcggctgctgtggagcaagttaaggtgcgttggatggggcaatcgtcttctgatgctacttgggaggatcttgctgtgctgaagcagaagtttccaactgtgccggcttggggacaagccggttgcccagaaggggggcatgttacagctgatgataaccctatcaagactatcagacgctcagctagagagagacggcccaacactcgtgtaactgggccggagtgggtctga

SEQ ID NO: 11658 - DNA, 6579 bp, Oryza sativa
  Clone ID: TFbOSC401612j.C1.o11.fg
atgaaacatttgaatgatgttagggttggaagtaaagtagcaaggatgtatctagtgcaggctaattgtgttggtggttacaaagggaggtacttctacgagtgtgtagaatgtgatctcggtggcaatttgctgtgctgtgatagctgtccacgaacataccacttggaatgtcttaatcctcctctcaagcgtgcaccacctggaaattggcaatgcccaagatgtcgtacaaaaaaagttagcttgaagctcttagacaatgctgatgctgacacctctaaacgtgaaagaacaaggagaatgcgcacaagcaccacatcagatagcccatccccatctccacaaaacaaagcctcttttaacacatcacgtggtgctgcatttagggatgatgaaccaggtgcaaaagacaatgaagttgagaaaaggaaaccattgatattacatttgaagaagcgttcaaccaaggaactatctacagataccacatcatcaaagtcagggttacttggaaagtcttcagaagagaaacaggagaaacacggaagtgctttgaaagtgaagaaacatctgcatcccatggaattatctccaaagaaatataagaacaagaagcaacacaatcacagagacagtaagagatccgaagcaaaaaaggtccaatatttggcatcagatgtggacagtgattcttcaatggaaccatctacttctcttgagcacagcgaatcgccgcccccaaaaagaaaatcgttggatggaagaacacctgcatcaagtaccaagaaaggaaaaaagaaagtgaaatttgttgataaaaagcaccctgagaatgctgttcatataactgaaaaggagcatggtggtgcaggagacaaaataacaactcagggggatctgcaggttgatcgcatcctaggctgtcgacttcagacaagccaaatcatttcacctgcccatgcttcatcagagcagattgatatggcccctcctagtgcatccggtgcaccagaacctagtcaagcccttttaaaaggacttcatgaagaaattcagtcttctaatagtgatactaatgtgacagaggatgcatgtgctgatgaattagcaaacgatggtggggaaaataatttggattgttctgatgctcaaaaggagagtaatgttagatcccatggacacaaggaatcacttaacgcaaaagaaatcatgaatacagcatcagcatgttccgctgatcaaatcgtcactgttaaggatgctggagcagtacagacatatgtaacagcttcagtaaatggtgaatatgagacagtaactgatattccagaagaaaagaatgacaccaaacatccagtttccaaagctgacacagaagtccacactaaacaagaacatacacctgatagtaaattgcatgggaaaatacaagaaactgaattgaaggagcacgacggaactacttatgagtttttagttaaatgggttggcaaatcgaatatccataacagctggatttctgaatctgagctgaaagcattagcaaaaaggaaactagaaaactacaaagcaaagtacggaacagatgaaatagaagaggctttgatcaaatggtgtgcccttccatatgacgaatgcacgtgggaaagattagatgaacctacaatggtgaagtatgcacatttggtcactcagttcaaaaaatttgaatcccaggctttggataaggataagggaggtagccatgcaaagccaagggaacaccaagagtttaatatgctggttgagcagccaaaagaactccagggaggcatgctcttccctcatcaactggaagcattgaactggctacgcaaatgctggtacaagtcaaaaaatgttatccttgctgatgagatgggtcttggaaagactgtgtctgcctgtgcttttctatcatccctatgttgtgaatataagattaacttgccatgtcttgtcttggttcctctttctactatgcccaactggatggctgaatttgcatcatgggcacctcatttaaatgttgtggagtatcatggttctgcacgggcaagatctattattcgtcaatatgagtggcatgagggtgatgcaagccagatgggtaaaatcaagaaatctcataagttcaatgtattgctcactacttatgaaatggtgcttgttgatgctgcatatcttcggtctgtgtcatgggaggttcttatagtcgatgagggtcatcgtctgaagaattctagcagcaaacttttcagtttactcaatacattatcatttcagcatagagttttgctgactggaactccgttacagaataacattggtgaaatgtataacttattgaacttcttacaacctgcttctttcccttctctagcttcatttgaggagaaattcaatgaccttacaacaacagagaaagtggaggagctgaagaaccttgtagctccacatatgcttcgaagactgaaaaaggatgcaatgcaaaatatccctccaaagactgaacgaatggtgcctgttgaattgacatcaatccaggctgaatactaccgtgctatgcttacaaagaactaccaagtattgcgcaatattgggaaaggtggtgctcaccagtcattgttgaacatagtaatgcaacttcggaaagtctgcaatcatccgtatcttattcctggaactgaacctgaatcaggatcaccagagttcttgcatgaaatgcgaataaaggcctcagcaaagttaactttgttgcactctatgcttaaaatcctacacaaggatggtcatcgagttcttattttttctcagatgacaaagcttcttgacatccttgaagattacctgacttgggagtttggtccgaaaacatttgaaagagtggatggttcagtatctgtggcagaacgccaggcagcaattgctcgttttaatcaggacaagagtcgttttgtattcctgctatctacgcggtcatgtgggcttggaattaatttggcaactgcagatactgttatcatatatgattctgatttcaatccacatgctgatatacaggcaatgaacagagcacacagaattggacagtcaaacagacttttagtttacaggcttgtcgtgcgtgctagtgttgaggagcgtatcttgcaccttgcgaagaaaaaattgatgcttgatcaactttttgttaacaaatcagaatcacagaaggaagtggaagatatcattcgctggggaacagaggaactcttcaggaatagcgatgttgcagttaaagataataatgaagcttctggtgctaaaaatgatgtagcagaggttgagtttaagcataaaagaaaaactggtggactaggcgatgtttatgaagacagatgtgctgatggttctgctaaatttatttgggatgaaaatgctatcacaaagcttcttgacagatccaacgttccatcaacagtagctgaaagcactgatggggacttggacaatgatatgcttggcactgtaaagtcaatagattggaacgatgagctgaatgatgaccctggtgccaccgaggacatcccaaatattgataatgatggttgcgagcaggcatctgaagcaaagcaggatgcagctaatcgtgttgaagaaaatgaatgggataaactcttacgtgtcagatgggagcagtatcaaactgaggaggaagcatctcttggtcgaggtaagcgtttaaggaaggctgtttcttacagggaaacatttgcaaccattcctaatgaagctttaagcgaggactctgatgaggaggatgaaccaaagcgagaatacactgcagctggactggctttgaaggaaaaatatgaaaaactccgagctagacaaaaggaaaggattgctcagcgccatgtgattaagaattatgctgatgacagacttgaagaattcatgaaactatatgattccagtgcaaatcccttgagaattgtagaagatcccaatcctgtgcagccatctggggctaaacgtctcggtgaatcaactgcagaaatgaagcaatcctcgaagaaaaccaagagatatcctgaaattcctcaagagctttatgccaagcttactggcaatgctgcttcatcaaaacatcacccaaaggcagcagatatctccaattcaggaactccacatcaccttttacctgttcttggcctttgtgctccaaatgctgatcagatgaactcatataaagggtcagtttgtgggccaagcacaaaggagcaaaaaagagctagtggtgaactagccaacaaaccgctgttgactcctgctgttgatcattctagcgaacaaaaacatgatggccaaccaactccttgtaagcctatgtttcctggttcctccgaggagactttgcgaaggctgaataatatcattccagacagttacttccccttccaacctattcctcctatatccgggaaggggattggtgatcatgtagaaaatcctgtatcgtccattccttcatttcaagggaaactgggtcttcctaattttagtctggaagacagtattccacttaagcatttgaagtcagtaccggatctatttcccaacttgtctttgggcactagcaatgaatatcttcgtaattgtgtcccagaattgccaaatagttcatttctaccaagctttatggcagatattgctggaacttcaaagcagaagaacaagttcatggcagatatgtctggccttcttccaggtttggcaatcaacccagttcaacaaatccattcgtccatgcctgaaaatcataagaaggtcttggacaaattaatgatgcgtgctcagtactcctcaagcaagttcttgaagaatgcctcaaataaattcctgaagaagagtttaaaaccagactattggtcagaagatgaactcgatgctttgtggattggggttcgcaggcatggaagaggaaattgggaggccatgcttagagatccaaagctgaagtttttgagccaccgatctcatgaagagctggcctcaagatggattttggaggagcagaaaattatagaggaaccaatgcctacagccaccagaagctccaactctacatcatttcctggcatatcggatgcaatgatgtctcgggcacttaatggaagtagcttttccaaactgaggatggagccgccaaagttgcagtcccacctaactgacattcagttaggttgcaatgatataccaaccagattttctcatgttgagcccactaattacatgaatttaagtgagggtggtccatcactgacaccgtggcaggatttcaaaaatagatcaggacacagtggagattttcctggcccacttgacaagtgggagaaacctgatatggggttgatcccaccatttatgccgaatccttttatgaaggaaagcattgggtcactgcccataaacagacacagcagtaattccattcagcagaatgaagttggatcaagttctcatgagagcatacttcatggtttttcggacggacaggccaaattattccatgagatgcaacggcgtgtgaagttagggaaattacccattgagatgaatctgaatcacacaaagctgtcagatcctctagctgagaactctggtgattttgaaagttcaaaaccgaacaagctaccgcactggcttcaggaggctgtgcgtgcacctccatccaagccacctgaatgtgagctaccagcaactgtttcagctattgctcagtctgtgtgcctactacttggagagcaaaaaccagcaatacctccattcccgattccaggacctcgtctctctctccccaaggacccaaggagtgctccaaagaagaggagagttcacaaagttcagcaagcttcctccctggtagatcattccaaaactacagttgggcaaggtgaccacaactctactccgtcagcaccactatccatggaagccgcacctgcctctcctgcagttattaaaagcagtgataccccctcgctcaacttgaactcaccatcttcatcatcagctggcagtcgggggcaggatgcgtcaaccccttccacttttgaagaaccagaaagaaccatggaagtttcagaacctgcttctgtcgctgctgccacttgcccgtccaggccagagcctcctgagactggtactcacagaatcgagttctccgcggtagatgacatggatactggatcttgtagatcacctgtgagggatactcctgaccctgacaatcagaagagcgaattgtctggatcaggtaatacacctactgaactttctgtattaccgttggttgatgcacctgggacgagcagcgaacctgctgtagtgcccgtatccagcgacgaggagtcaacccaagagggtgtaccaggcaaagccgtaagcaccggcgaccaggagaaacggacgccccctgatgagagcgaaaattcaggtgcggcaaatccagtttcggcagctcagacagctgacgaagataaggtggacgagatgatcacagatgagcattag

SEQ ID NO: 11659 - DNA, 4544 bp, Oryza sativa
  Clone ID: TFbOSC400800j.C1.o28.np
atgaaatccatggaggagcgcttgttggatgccatgaatgcaatggctgccaaggacgacatcgccacgcacttgatgtagattgacctcaaactcgagcagcagggcgagcggttgggtcgggtaaaaaccaaggtggatctctccttgacctcccttgaccaggtgcagcaagagcaaacttgggtctaacgggctctgaaggcggtcattgtggcaccatcaccaccgccaccgttgccgccggaaacaccacatcaagcgccaacctcgtctgaaccacaaccaccaccacctcctccattgggtaccttcacctcattactctccgggtgattgtgagcattgtgacatgggtcatcgtcagtggactcctaaaatggattttccgaagtttgatggaaatggggttaaggtgtggattgataattgtgagacttattttgctttctatcaaatcacggaagcatttctagtttcagcaacatctatgaatctcatgggtgatgccgcaaattggtatcagacatggaagttagaagtgggttggcatgattgggagatgttgaaaactgctatttctagggaatttgatgtgcacctttggtctgtgaaaatggatgagttactgttactcaaacaaactagcacagtgatagaatattgttcaaaattcagtgaacttgtttatcagattcgtctctatgacccgctcttgtgtggttctgttttggtttctcactttatgttgggactgaaggatgacttgaggtctttcgttcaggcagctcagcctactactgttacccaggattgtcttgttgctttggctcaggagggtgctcatattggacaaccaaggaagaggtttaatcaatgccgagataatgctgttggtagaggcaatgagaaacctaagttggctcgtggtgagttgtggaaagcacagcagctgaaggaatatagaagggctcagggtctgtgtttcaaatgtggtgataagtatgtttctggtcaagtctgtgtcaaacaagaggctgagttaaagttgctgtgcaggaagagccagtgatcttgtttgatgatattttggatgctgtcactgctcctgaattggtagaagaggattttaatctctccttgcatgctctagctggtacctgttcttcggctactgttcagctgagagcgctggtgggtaatcaggttattctgatttttgtggattctgggagttcccacagctttgtgaattctgatttgtgtgccaagttacagcttcctactactgcaactctacctatttcagttaaagtggccaatggagaggtactgtcttgtgatgccaagattccccaatttacttggtgggtgcagggatatcatttctcttttactatgcgtcttctacccatgggatgatatgatgtggtgctaggcatggattggttaacacaatatagtcctatgacctgtgactaggctgcaaagacaattcagttttcctatcagggggctgaaattattttgcaaggagttgcctctcctattgtaattgaagtaactgaagtctcagcaactcaggtggttaaatgggatcagggtaatgatatatgggctatggctatgcttgaacctgttgctgcactgtctagttcttcttctgaatatcctgctatacagcagctactgcagcagtatagtaccctgccccctgatagggtgctgaatcattcaattaccttgttacctaattctgtgccagttaattcatgaccttacagatattctcctgctcagaaaggtgagattgagaaacaagttttcgaaatgttgaccgctggactcattactcccagttgtagcccttttgcatctcctgtgtcgctggttaaaaagaaggacaacagctggagattttgtgtggaataccgcaggttgagttctttaacaattaagaacaaattcctttgcccatagcggaggaacttttggatgagctagctagtactaagtttttctccaaacttgatcttaaaagtggatatcaccagattagaaagttggaggctgatgagtataaaactgctttcaaaacccatcatggtcatgtccaattcagggtgatgccatttgggttaactaatgcccctgcaacctttcagtgtctcatgaattctatctttgctcccttcttgagaaaatttgttttagtgttcatggatgacatattgatatgcaacaaatctttggaggagcatggtcaccacttagagctggtgttgtagttgttacagcagcatcagttatgtgctaagttgtccacgtgttcatttgccacttctcaattggaatacatgggccacattatctttgctgaaggtgtagccacagatcctgagaaaactcaagctatggcttcttggcctattcctactaatgtcactcaactaagatggttttttgtctcactgggtattatagaaagtttgtgcaacactatggcattttggctaaacctctcaccatgttgcttcagaagaacactaagtttgtatggactcctcaagctcaggaagcttttgcagctctaaaaactgctatgtgtactacacctgtccttactctccctgacttttccaaaccttttgttctggaaatcgatgcttgtgctactggcattggagctgtgctatctcaagaagggcatcctgtggcttttacaggaaagcattgggcattgctaatcagaaattatcaatttatgagaaggaatttttggctattataatggttgtggataagtaaagatcttatttactcactagtccttttgttattaaaactgatcataaagccctttatcatttggatgatcagagtttaggtacagatttgcagaagaaggccatgactaaactgattggtctgcagtacaaatttcagtataagaagggggtggataataagtctgctgatgctttctctagagtggggcatctttttcctatttcagttgttcaacctgcttgggttcaggaggtccctaattcatatgtggtagatctttttgctaaataattattgcaataattggccattacctctcctaattctcaaggttttaccttgtcgcatgggttgataaggaaagctgataaaatctggattggagttaattctgctttgcagaccaaactaattgcagccttccactcttttgcaataggacgtcactgtgggattcaagctacataccagcgagtgaagaaattgtttgtgtggaagggtttaaagaaatccatggaagaatttgtctagcaatgtgcagtgtgtcagcaagctaaacatgagcactgttcttatcctgggttgctgcaaccattaacaattccatatggtgcatggctagatatctcaatggactttgtggagggtttgcccacttctaaggggagcagtgttatcttggtggtggttgacagatacactaaatttgctcattttctgcctcttaaacatcccttttcagctttgtaggtggctgagttatttctgaacaatatggcttctctctatggtatgcccaagtccattgtttcagatcgcgataaggtgtttacaagtaatttctgggcagactttgtttaagaggtttgaagtgccattacatctctctactgcataccatccatagtctgatggccataccgaacgtgttaaacaatgcctgtagatgtctttgaggtgtgcggtctcctcttccccacattagtggtgtgcttggctccctttagcacagttttggtataatacaaattaccactttgccttacaatgctctccttaaaaatcactgttggcactgatccttcgtatggtcttcttcctgccatgtcagttaatgcctttgcatctactgactctgattctcctgtagctgatgctttgctcagagaacgtgctatgttttcttctttgctgaagcatcatctcacctgtgctcaaaataggatgaaaaaaacagctgatctgaagcgtactcgtcgctcatttcagattggtgatctggttctcctgaaacttcaaccgtatgcccagaagtctgttgtttctcaaccttttcctaagctggtgtttaagtactttggtcctttcccaattgtggataagattggttctgtggcatatcgattgcaacttcctgatcacagtgggtttcatccagtgttccatgagtagcagctcaaacaatttgtccctgatgccaagcctgtcttttcttcgttgccctctccattgcagctggacattactgaattggttccctctgcaattttggatcaccgtatgttcaaaaaaaggtaatgccttggtggttcaagagcttgttcgttggggctctctggcaccagagtgggctacatgggaagattatgaagtggtccgtgccaggtttcctgagccaatcgcttggggacaagctcctgctcggagggggaagggggggggggggggcaaatgtcacgccagacactctgatg

SEQ ID NO: 11660 - DNA, 4868 bp, Oryza sativa
  Clone ID: TFbOSC411504j.C1.o5.np
tcaaaactcatcttcagatccaagtcgacgacatggcgaagcaaaacgagggattcgagaagactttgttggagattcaagcggcgatcggaaccatggtcgtcaagcaaggagagacacaagagatgctgctcaaactggacaaatctgtggctggatggcgacctcaagttgatgctgctatacaagggttgcacgaggagggcggcaattcgtcgaacacctcgcaggcgtcaaggatggcggaggaagggagtcaccaaactcctctgcttcctacgcccagcacgccgccgttgttttccggaacagcggcgagcgaactcggtccagatggccaccgcgtcgcaaattttcaccgggggaaggcatcgggggtagttcatactctcgggccacctccggtcaagggtacgtaccaaattcccactgaattttctgttcctcatgggattgagtttggcgcaaattcgagtcggggaaatcgggatttgcatggggagcaagggttcaatcatagactaccaaagttggattttcctcagtttgatggctcggatccacagggttggaggttgcgttgtgagcattattttggggtttatggaactcatccaaatttgtgggtttgggtagccaccatttacttcatggggagggcagcgtcttggctacgttcatctcgtgctcatgaagtttttgtcgattggggtcgattctgtgaagcggtgaaccgaaaattcgatagaaatcaacatcggcaactgattcgacagcttgatcagattaaacaaaccggttcagtgagcgagttttatgaatggtttgatgatctgatgaatcagttgttgacgtatgatcctatgtataacactttgaatttggttcaccagttcatagaagggttgcgttttgacattcgcaaagctgttttgttacattgccccaaggatttggagtctgctctggttttggctctattacaggaggagttgtctgagcggaatcaagagcaaaggaaatttggggatggatcgcagaagtttaaaaatgcatatccattaccattgccaccaaccaaggctctgaaatctgaggagaagaagggtggagagctcaatcggggtactaatctttctgacaaggttagtgcacttcgatcgtttcgtcgtgcacaaggtttgtgttacttatgtgccgaaaagtggtcgccgacacataaatgttcaggaacagttcagcttcacgctgttcaggagctctttgcactatttcctgacaacgtaaatgaggatcaggctggcatatcttctgaagatagtgattcttcattgttagctatgtcagttcatgctgttcagggtactgattctcagtctaccattcggttacaaggcaaaattcaggggttgaatatactgatgcttgtggattctggtagttcggctagctttgtcagtgatcaattggctgaccgtcttactggagttcagttcttagctcatcctctgtctgttaaggtggccaatggacaggtgttgcattgtcagaaagaaatgccttctgctgaatggtttgttagtggtcagaagttcttgaccacatttaaagtggtggctttgggaggttatgatgcaatattaggcatggattggttaactaagtatagtccaatgcacattgattggcagcttaagtctattcacttgatagttatgggtcatgaagttttgttgcgtggggtgcagtccaatacgtctgattgtgctttgatttctagtcagcatttacagcatctgcacagtatcgactcattatcctcaattccagatgctgtccagtctttggtacaggaattctctcatttatttgaggaaccaagtggattacctcctgctcgagattatgaccatacaattcctttgattcctggggctgtgccagttaatgtgagaccttaccgttatacacctgctcaaaaggatgagatcgaaaaacaagttaaggatatgttacaaaaaggaattattcagccaagtgctagtcctttttcttctcctgttttgttagtcaaaaagaaagatggcacgtggaggttttgtgtggattatcgccatcttaatgctatcactgtcaaaaacaagtatcctcttccaataattgatgagttaatggatgaattggcgggagcttgctggttttctaagcttgatttgcgtttagggtatcatcaaattcggatggcagttggtgaggaggctaagacagcttttaaaactcacaatggtcattttgaattcaaggtgcttcccttcggacttacgagtgctccagctaccttccagggggtgatgaatacagttttagctgatcaattgcgtcaaaatgtcttggtctttgttgatgacattttggtatacagtcgcactttggaggagcacaagaatcatctgcgtcaggtgtttgagactctgagtaagcatcagttacgagtcaaattatccaaatgttcttttgcacagactcaactgtcttatctagggcacattattagtgctgatggagtttcaacagatccagaaaagattcaggtggttcggcaatggccagttcctgtatctgttaaagatgtgtgcagcttcctaggttaggcagggtattatcgcaagtttgtccgacattttggcatcattagtaagccatttactgagctattgcgtaaagggcagccttttatctggactcaacaccatcaaaaagcttttgacactttgaaacagagtctgatatcagcaccggtgttggtcatgcccgatttccagaaaatgtttgtggtggagactgatgcttctgaccgaggaattggtgctgtgcttatgcaagatcagcatccggtggcatttttgagtaaggctttaggacctcggactcaagttctttccacttatgagaaggaaagtctggctattattcttgctgttgatcattggcgctcgtatttacaacacgaggaatttttaattcgcactgatcaccgcagtctggcctttcttgataaccaacgattaaccacctcttggcaacataaagcaatgactaagttgttgggtcttcgttatcgaattgtttacaagaaaggattagagaatggagctgcagatgctttatctcgtagatcttctgatggtcttccaattttgagtgcattatctgttggtctaccggattggttacaggatgttgtttcgggttataaatctgatcccgaagctcttcagcttttgcattcttttaaggaaggtacacctcattctgctcattttgagttgcaaaatggtattctttatttcaagaaacgtgtttgggtgggcaataatcggcagtttcagcagcaagttctagcaaatttgcacactgctgctctagggggccattctggaattcaagtaacttatcagcgcgttaagcagctgtttgcttggccaggtttaaggcaaactgtgcaggattttgtgcacagttgtgtagtctgtcaacaagctaaacctgaacatgtgccttatccagggttactacaaccagttcaaatacctgaacatgcttggcaagtcatatcaatggattttattgaaggattgccccgttcagcctcttataatagcattttggtgattgtggataagttcactaagtttgctcattttttgcctttatcccatccattcactgctgtgtctgtggcacaattattcatggacagaattcattcaatacatggactaccgctggccatcatttctgatcgtgatcgagtgttcaccagtatttttttggaaggaattgtttcggcgttctggcactcaattacgaatgagctcttcttatcatccacaaacggatgggcaaacggagcgcgtgaatcaatgtttggaaatgtttctgcgctgttttgttcatgcttgtccatctaggtggagtcagtggttatctcttgctcaattttggtacaacacttcatttcattctgccttgatgttgactccttttgaagcaatgtttggtcataaacctcgtcattttgggctctcagtggattcggttggggtgcctagtgcattggatagttggatgcaggatcgtcataacatgcaaagtttgattcatcatcatttggttcgagctcaacaaagaatgaagagtcaggctgattctaagcgtactgatcgtgtgtttgcggttgctgattgggtttttatgaagcttcagccttatgtgcagcaatttgtcatgactcgtgctaatcagaagctggctttcaagttctatgggccctttcagatccttcagcgtgtgggttctgttgcctataagttgcaattacctgctaccagtttgattcatccagtggtgcatgtgtctcaattgaagaaagcagtagctgcttctgaagttgttcaatcaacattaccacgattggatcctgattctgggcatctggctactccagtagaggttctgcaacagcggctacgtcgtcgtggtgataagatgattgttcaagctttagttcgttggtctggtacttcgtcttccaccacttcttgggaagatctggaggagttaaggcatcgctttccttctgccacagcttggagtcaagctgtgtttcaaggaagggggaatgttacatccggcaccggcacacctgatgatgaacaggaacaagtgtccaagatcgctggctctgttcagagtacggcccagcaacggcatgttcgtgtaactaggcccaacccgaactctcgggtcgctctcccctttcgccggccttgttgaccaacggcccgacgcagtagaacggcggcaac

SEQ ID NO: 11661 - DNA, 1630 bp, Oryza sativa
  Clone ID: TFbOSC411151j.C1.o1.fg
caaaaatcagtctgaacatctggagcatataaagttggtgatgcaagcattggcagcaaaccaactggtggtgaggctgaagaagtgtgattttgggctggacagggtgaactacctgggacacattatctcagaagatggagtgtccacagatcccaaaaagatctgtgcgatcaaaaataggaaagctcctagaaatgtgactgaagtacaagatattaagaggagttatgaagaggatgttttggcacacaagattttaagcctgattgatactgatggtgatccagaacgaaactataagtgtgaatctggattgttgaaattcaagggcaggatctatgttggggaaacaactgagattagacaactgctgctggaagtctaccacacctcatgttttggaggacattctaggatcagggcaacatatcatagaattaagcagctgttttattggcctagtctgaagaggcaagtagagcattatatcagggagtgccccacttgtcaggttactaaggcagaacatgttcacattccagggttacttaatcctctagaaatacctgatatggcatgggctcatatttccatggactttattgagggactaccaaaatctcaggggaaggatgttatcttggtggtggttgacaggttaacaaaatatacacatttcttagcattgtctcatccttatactgtggagcaggtggtacagatatttatggataacatacataaactgcatggaatgcctatcgccatagttactgatagagatcgggtatttaccagtacatttttccaggagatttttaaaatacataaggttaagctcagatttagcactgcacatcaccctcagacagatgggcaaacagagagggtaaatcaatgccttgaatcttatttgcgcagcatgacctttcaggaaccacagaaatggttttcttggcttgcattggcagaatggtggtataacactacatatcatacatccatccaaatgactccatttcaagctctgtatgggtatccccctccacaaattagtgagttttctattccctgcaatatttctgaagaagccagagtaactttagaagataaagcaatgatcctgcagaagttgaagggcagtatgggagaggcccagagaaggatgaagttttatgctgacaaggggagaactgaaagaaccttagaagtgggggatatggtgtatttgaaactacaaccatacagacaagtggctatgggaatcaggggctcattgaagctcaggtccaaattttatggaccattcaaggtcattgagaagatgggttcagtagcttacaagttgcagttgccggagggagctgggattcatcctgtttttcatgtaagccagctgaagaaacatttggggcctagagctataccaatgcccaatttacctgcagtaggacctgatggccaaatcaagactgaaccagctgctatcttacaaagaagaatggttcccaggcataatgaacctgtgatacagtggctgattctttgggagaatttaactcctgcagacgctacctgggaggacgcatcatacattcaagctgtgtttccaaattttcaaccttga

SEQ ID NO: 11662 - DNA, 3483 bp, Oryza sativa
  Clone ID: TFbOSC414256j.C1.o10.fg
atggcggatccgagagtgaagcggttggaaatgggtgaaattaaaggacttctgagcagtatctgtgcgagtatgtcgagtcaaggacctggatttgggggaacggctggagctagtactagtggcattgcaaggggggcagcagggttggcagcttcagcagcagcaacggtgagcaatactgcaacagtggctggaagttcttcagtaccaccgggtttcagtccccgacctaacaccactggacttcagaccggggctggtgcgacgccactgacttcgggagctcagggtgccatgacttctgtaggaaatgtgaacttccaaattgaaccaaacactgtgaacccatcttttggcccagttttcaccactgctactagaactcatgtgttaccagagagaagaaatttcaattttcctgagagagagtcacaagaggatgtggggatgaaccattatgggattgacactaatcagccttggagatatccaactaggcaaccagggggtactgctgtaggcacaagagcagggatgccaaacccgggaggaggtatgtactggcaggaaccacctagatatttgcatggtgtcataccaaacccttatactgaaatgtcattgaggagtcagaggttggaattgacattgttcaatggggaggatgctgtagggtggttgcaacaatgtgaaaagttttttgagatgactggcacccctgtggatcagtgggttaatttagcatctggacacttagtgggaagagcagggaaatggtttagaaatttggccataccctggtactgtctaaattggcagcaattttatctaatggttttagatcgttttactgaagctaatgcccatgaagctgtggaactactgcagaatgcaaaacagactggtagtgtaatgcagtacattgacaaattcgaagactgtgtttctttagtgaaaagggatcatccttacttgacggagtcttacattttgagttgttttattgggggattgagggctgacattaagcatgatgtatgtgggcaaaagccccagaacttgttggcaggatattggtatgctaaggtgtatgagaaggcaagtattgctaagagactaagctaccaatctgaatttaatagaaacaaacctcaattccagcctgcccagtctagtggtaccagatttgtcaaccagaaaaacacaactcaaggggtggagaaagaaaagaaaacttgctgctatcatggtgaggaagaaggatgggaattggaggatgtgtgtggattatcggcaattgaatgccaaaaccgtcaagaacaagttccctatgcctatcatagaagattgttagatgaattgaatggtgccaaggtgttcacaaagctggatctacggtcgggttaccatcaaatcagaatggtggaaggtgatatccctaagacagcattcaaaactcatatggggcattttgaatatttggtgatgccattcaggttgacaaacgcaccagctacatttcaagctctcatgaatcaaatttttggcaaacttttgaggaagtgtgttttggtcttctttgacgacatactaatttatagcagagatctgagggaacatgaacagcacttgcgcatagtgctaaacatactgaggtcacataaattgtttgccaagcgaagcaaatgcacttttgctgtaggaagtatagaatatctggggcatatagtgtccggagaaggtgttgcaactaagcctagtaaaattcaggatgtggtggattggccagtacccaaaaatgtctcaaaattaagaggattcttgggattaactggatactataggagatttgtgaaggggtatggaaccatatgcagaccacttcatgatctgttgaagaaaaacagctaccaatggggtgtagaacagcaaaaagcttttgacaatcttaaagaagttatgacttcctgtccagttttggctttacccaatttcaatcaaccttttgtcctagagacagatgcatgtggtattggaattggggctgtggtcatcagaactgatcagcaaagtttgaagttcatggcaacccagagattaacagaaggaattcagcacaaactattgctgaaattaatggagttcgattacagtattgagtacaagaagggaaaagaaaacaaggcagctgatgcattgtctaggagggatactgatggagacaagtgcttggcaatcactctggtatatccagcttgggtggaggatgtgaagaacaactacatgggcgatgagaaatatgcaaagttagtaactggagaggaactgaatgaaggagcagaggggttcactttacaatctgggttactgaggtataaaaacagaatttatgtgggacaatcaactgatatcagacaaaggctgcttcaatcctttcacaattccacctttggagggcattccggaatgaaggtgacataccataaacttaagaagattttttattggcctaaaatgaagaaggatgtggatagacaggtgactgaatgcccaacctgtcaaatagctaaacctgaacatattcatgtacctggattgttggaccctttacaaattcctgagatggcatggacacacatttcaatggattttatagaagggttgccaaaatctcatggaaaagatgttattctagtagtagtggacaggttaacaaagtatgctcattttgttgccatgtctcatccttttgacactcaagatgtgatacaagttttcatggaaaatgagcctaaagaatggtacaaatggttgcctactgcagaatggtggtataatacttcttatcacacatcattgcaagtcacttcatatgaggccatgtatggagtaactccaccacatattggggaaagggcgatacctggaaatgtttcagaagaggcaagagcaactgtacagcagagggaggatatgttggcaagattaaaagaaaacttggccaaagctcaaaccagaatcaaaaagcttgttgacagactcaggagtgaaagacaattcgagttaggggatatggtctacctaaagatgcaaccatatcgacagaatgcttttgggctgagaggatcattgaaactcagagcaaagttttatggtcccttcagagtgttggaaaagattgggaaggttgcttataagttgcagttgccagaagaagctaacatacaccctgtgtttcacgttagtcagctgaagaaacatgtgggaaggcaggcaatcccgctaccaaatcttccactggtgggtgctgatggtactgtcaagactgaaccacttgcagtattagcaaggagagtaattccaagacaaaatgaaccagtggttcaatggttaattcactgggagaatttaacacctgaagatgcaacttgggaaaatgcaacattcatccaggccacttttccacactttagaccttga

SEQ ID NO: 11663 - DNA, 4440 bp, Oryza sativa
  Clone ID: TFbOSC900307j.C1.o21.fg
atggtgaccaagacccgatcccaagaatccatggatggtgtggaggagttgactgagatgagagtggagatagccacaatcaagaaggatcttggggcgttgaaggggctgaagaacgaaatggctgaagtcaagaagctgcttaaggtgatgtgtgctagcttgggtgaaggagatcctgaaaagaggccagaaacgggagaagcttcagaaagggtaagtggagctcctcatgatgtgaatgccactactgctttggctgatataattgatggttctggtccaatgcttactggtactgctcctatcatgagtcaagggggaggatttttcattgagccaaatgttactcagcctagaatgtccaactgcatggcctcgatgccttttgtagctggaagtaatgcggtgtatgctgaagcaatcatcaaaggccctaggctagaaatttcattgtttgaaggagatgatgtgattggctggctgaagcaatgcgaaaagttctatgaattaaccggaacacctcatgaacaatgggtaaatttggctttggctcatttgagtggaagagctgcttggtggttcagaggtgtgggaattccgtggcaactaatctcatggccccaacttgcagccatgatgtgtgaccgattttgtgaagctagtgaccatgaggcagtggagcaattacagaatgtaaagcaggctaacttatcagtaacacaatatattgataagttcgaggaatgtgttgatttggtccggagggaacacccatacttgcaagaacaatacctcaacagttgtttcattgggggattaagaggggatatcaaacatgatgtaagtggccaaaaacctcagggattattgcaatcttactggtatgctaagaattatgagagagcagcaaatgctaagagagcaatttacaatttcaacagaaatagaaaccaacagcagtttgctggtaatcaggggagaccaatggggccaagaaaccagctgagaggagaggtggataagaaggaagaaaagaagtgttggttctgtaaagaaccatggtttcctcgacatcagtgcaaagttaaacaagcattacatgctttgttggtggaggatgaggaacaaggggaagacagtgagggcaatgcagaggaggttattcaggaggaagaaccacctgttgagcaagagaaacctgtccaagagggagccaaagtggagctaatgtgcatatctcagaatgctttgcaagggacaactagaccagacacttttttagtgatgatcttgataaatggaaggagagcagtgggtctagtggacagtggaagtacaggaacctttatggaccaagagtttgctctcaagagtaagtgccctatacatcagactctggccaagaagatagttgttgctggaagaggagagttactgtcagaagaccaagtgcctgaaatcaaataccaaatacaaggagaagactttagcaatggttttaatttaattccactaaaggggtatgagataattctgggggctgactggatatttactcacagtccaatcactttggacctgaaacagcgggagttggtaatcacaaaggagaaacagaagattatactgcaagacttcactaaacctggcaaaagagccagggtaggagaaaagaagatgggtaagttgatcagaaaaggggctgtgggatgtgtaatccagatccatactatttctgtagaaaaggaaaatgagaagcatgttatccctcctgaaatccaagaaattttactgaaatttccacaggttctgaaagaacctcagggcctacctccaaggaggaagtgtgatcacaccattaacttgaagactgggtcagatccacccaacctcagaccttacagggttccccactaccagaaggaatccatggaaaatatcatagcagagttaatacaatcccaagagatccagatcagtgatagcccctattcttcaccagctgtcatggtcaggaagaaggatgggtcgtggagactttgtgttgattatagacagctgaatgggcaaactatcaagaacaaattcccaatgccgatcatagaagatttactggatgaactacatgggtccagggtgttctccaaattggatctgcgttcggggtatcatcaaatccgaatgcatccagatgatgtgcataaaacagccttcaggactcacttgggccactatgagtataatgtgatgccgtttggattgaccaatgcaccagccaccttccaagctttgatgaatcaggtgttagccccttatctcagaaaattcgtgcttgtgttttttgatgatattctcatatatagcaaaaacaaggaggagcacctagaacatattaaactagtaatgcaggctctgttagataaccacttggtgatcaaactgaagaagtgtgaattcggtttggatagaattgcatacttggggcacattatttccagtgaaggggtagctacagaccccgagaaggtagaagggattcggaggaggaaaatacctaacaacattactgaattgagagagttcttggggatggctggttattacaggagattcatcaagggatatggtgtgatatgcaggcccttacatgatatgttaaggaaagatgcattccaatggggcccagaacaaacaacagcatttgaagaactgaagctgagattgagtaccagcccagtgctgacaatgccagatttctcacaaccatttgtgatcgaggcagatgcctgcaacacaggaataggggctgtgctaatgcagacagggaaacccattgcataccttagtaaagcattagggcccaaggcagcagcacagtcaatttatgaaaaggaggctatggctattttagaagcacttaagaaatggagacactacattctggggaacaaactagtaatcaagacagaccagcagagtctaaagtatatgatgaaccaaagattggtagagggcattcaacacaaattattattgaagatgatggagtatgattactcaattgaatataaggctgggaaggagaatttagtggctgatgccctgtccagggggaaaatttcagaagcagtccctgctgaatcatgtcaagctataacagtggtgattcctgagtgggtgacagacatcaaaaggagctatgaaggggatgtattggcacataaaatcattagcttaattgggactgatatggatccggagcaattgtataaagaagaatctgggttgctcaaatacaagggaagaatatatgtgggaagtgtgacaaaaattgaacatgtgcacatccctgggctactcagtccacttgaagtaccggatatggcttggtctcacatcactatggacttcattgaggggctgcctaaatcaaagggaaaggatgtcatattggttgtagttgacagactcacaaagtatgctcatttcattgctctgtctcacccctatactgtagaacaagtagtggaggcatttatggataacatacacaaattacatgggatgccactggtcatagtcactgatagagataggatatttactagtaacctgtttcaggagctgttcaaagccagaagggtcaacctgaggttcagcacggcctatcacccacaaacagatgggcaaagtgagagggtgaatcagtgcttggaatcctatctcaggaacatgactttcaaggaacctcagaactggtactcttggctagcactggctgaatggtggtacaataccacatatcacacagcaattcagatgaccccattcaaggcactttatgggtacactcccccacagatcaatgaattctccgttccctgcaatgtttctgctgaggcaagagtttctttggaagagaaggaggctataattcaaaacctcaagagtagtatggatgctgctcagaagagaatgaagcactatgcggacaggaacaggactgagagggaattgcaggtgggagatatggtatatctcaaattgcaaccatacaggcagaatgccttgggtgtgagaggatccttgaagctaaggtccaagttctatggaccatttcgggtggaacaaaagattggtcaagtggcatacaaacttcagctacctgaaggagctaatatccaccctgtgttccatgtgagccaattgaagaagcatctggggcgccatgctgttccaatgcctaatttaccactggtaggacccgacgggcagataaaggcagaacctgtagcaattctgcaacgtcgaatgattccaaggagaggagaaccagtggtacaatggctggtgttgtggcgcaatctatcgccagctgatgctacatgggaggatgctacattcatcagggctacattcccaaattttgaaccttga

SEQ ID NO: 11664 - DNA, 4044 bp, Oryza sativa
  Clone ID: TFbOSC401048j.C1.o10.fg
atggccggcgctaacgacgacgtttggcgccaacgcttcgacgacatgatgcgccggctggaggagctcagcggcctgatcaccgacatcgaccagcagcaacgtacccagaccttggccatcaaccgcttggagaatggcgcccgcgctccctcttctcgcttcgacgacctgagcgacgtcggcgatcgcaatgggggccgctttgcccatcacaacgtcggccgcggcgaccgctacggtcgcggcggcgatggctttcatgggcatggacgtccgggcggccaccgcttcgacggcgatggcgatcgtcctccacgctaccacaagttggactttcccaagttcgacggccgcggcgatccgctccccttcctcaaccgctgtgaacaattcttccggggccaacgcacgccggaggacaacaaagtctggctcgcctcctaccatctgctcgacggcgcgcaacagtggtacactcgccttgaacgtgaccatgaaccgccttcgtggcatcgcttctcggagttgctcaacatgcgctacggtccacctctgcactcgacgcctctgggcgagctggcagcctgccggcgaacgaccacggtggatgactacgccgagcgtttccttgacctgctcacgcgcaccggctacctctccgaggatcaacagttgggggaggacgacaccgacaacgactccgccaccgaccaagcagacgcggccgccacactccggatttctctgcatgcggccaccggagttcgcgcgtccgacgccatgcacatcacggcccacctcggcgacaccgacctctacaccctcatcgactccggcttgatgcacacgttcctgtctcaggatacagcggcacgtgtcggtcgggctcctcagccccgcatgggcctcaacgtcacggtggcgaacggcgacaaggtggcgtgccccggcgtcttccccgacatgcctttacagatcgccggcgaggaattcgccacggacgtttacgtcctgactctgggtggctatgacctcgatttcacggtgctgacaatgtccttctggcaccgcgtcacgctccacgggttgccgggacaccagcgaccccgtgctctggcgtgcgctccagcggcactactggactccctcctggaggaattcgcggacgtcttcaccgagcctacaggattgccgccggcccgagaccgctcacatcgcatccagttgctgcccgggacagccccggtggcggtacgcccgtaccgctaccccgtccgccacaaagacgaactggaacgccagtgcagggtgatggaggaaaatggattgattcaccggagcacgtcggcgttctcatcgccggtgctgctggtgaagaaggcagatgggtcatggcgcttttgcgtcaattaccgggctctcaacgagcgcacagtcaaagacaaataccccatccccgtcgtcgacgagctcctcgatgaactgcacggcgccgccatcttctccaagctcgatctgcggtccggctaccatcaagtccggatgcaccctgacgacatcgacaagacggcgttccgtacacacgatgggctctacgagtttctcgtcataccgttcggcctcacaaacgcactggccacgttccaatcactcatgaacgacgtgctccggccgtttctccgccgcttcgtcttggtcttcttcgacgacatcctcgtctacagcccaacgtggacgtcgcacctgcagcacctgcgcaccgtcttcaccgcgctctgggcagcccagctcttcgtcaagcacaccaagtgttcgttcggcgacccaagcgtagcgtacctcggccacatcatttcgcagcacggcttcgccatggacgccgccaagattcaagcggtagctgagtggccgcgcccccgttcgcccaaggaactccgtggcttcctcggtctggccagctactaccgcaagttcattcaagacttcggttccgtggcggctccactcacgcagctcctccgcaaggacagtttcgcatgggcgccggcgaccgatgatgcgttccagcgcctcaagctcgccctcacaaccacgccggtcctcagccttcccgacttcaaccgcccattcgtggtcgaatgcgacgcatccggtaccggcttcggagcagttcttcaccaaggcgaagaccccatcgcctacttcagtcggcccatcgccacacgccatcacgcgctcgccgcgtacgagcgtgagctcatcagcttggtgcaagcagtgcgacactggcggccgtacctgtgggggcggcaattcatcgtcaagacggatcactacagcctcaaattccttcttgaccaacgcttatccacgatcccgcaacatcattgggtaagcaaattgttggggtttgattttgtggttgaatataagccaggcaaacagaacgcggcggcggatgctctgtcttgccgcgccgcaccagacagccaggccttcgtactctccacgccgacgttcgatctcctcaaagacatccgcacggcgggggacaccgatccggcactacaagccctccgcgacgagatcaactccggcacgcgcacaacaccatgggcggtgatcgacggcctcgtcacctacaagcgccgcatctacattccgccgggctcaccatgggtgtcagtcgtcgtcgccgcggcgcatgatgacggacacgagggcatccaaaaaacacttcatcgactccgccgcgacttccacacgcccgacgaccggcgtgtcgtccacgatcacatccaaggctgcctcacctgccagcgcaacaagacggaccacctccatcccgcgggcctcctgcttccactcccggtaccatctgccatttggtccgatgtcgcgatggacttcgtcgagggccttccacgcgttggcggcaagtcggtcatcctcaccgtcgtcgatcgattctccaagtacgcccacctcatcgccctcgcacattcgtacacggcggagacggtggcgcgtgcgttcttcgtcgacatcgtgcgcttacacggggtgccggagtccatcgtttcagaccgggaccccgtcttcacgtcggcgttctggacagccctcttcaccgccacctgcaccaagctccaccgcagtacggcgttccatccacagtcggacggccagtcgaaggccgtgaacaaggccattgccatgtgtctccgctgcatgaccggagatcgctcccgccagtggctgcgctggctgccgtgggcagagtacatctacaacacctccttccacgccgcccttcgtgacacgccgttcaagttggtctatggccgcgatcctccctcaatccgggcatacgacgcaagcgagctacgggtggcagcggtggcacagtccattgaggagcgcgacgcattcctcgctgatgttcgtctccgcctggaacaagcacaacagtatgccaagcgctactatgatcagaagcaccgggaggtgtcgttcgaggtgggggcgtgggtgtggctccgcgttcgccaccgcgttcctgcgtccctcccggaggctgtcaagggcaagcttcgtcctcgcttctacgggccataccgcgtcgtcgccgtcatcaacgaggtggcgtatcgcctcgcattgccgccggggacacggcttcatgatgtgttccatgtcggactgctcaagccgttcgtgggtgtgtcgccatcggcaccactggctttgccacccattcagcatggagcggcccaacctgttcctcgccaagtgttgcgcgcccgtttggctcgaggggtgcgccagcttctggttcaatgggaaggactgccggcatcggccacatcttgggaggacttggacgactttcgcaaccgatatccctcgttccagctcgcggacgagctactgatcgagggggggagagatgttatgtggggaattcccttccgccggcgcaagcagcaagctgggcttggtgccggacgagctatagggccgggcggcacggctgtttag

SEQ ID NO: 11665 - DNA, 3960 bp, Oryza sativa
  Clone ID: TFbOSC401057j.C1.o37.fg
atggccggcgctaacgacgacgtttggcgccaacgcttcgacgacatgatgcgccggctggaggagctcagcggcctgatcaccgacatcgaccagcagcaacgtacccagaccttggccatcaaccgcttggagaatggcgcccgcgctccctcttctcgcttcgacgacctgagcgacgtcggcgatcgcaatgggggccgctttgcccatcacaacgtcggccgcggcgaccgctacggaaccgatgagtttagatgtgcagatgcagcatccgacgacgctagaagaggccatgagtcttgctcgttcgttcgaacgccgcgaactcgcagcccggccaccccgcccgccacgacacgccggccgcggcatactaccacttcctccggcggccaacccccaggcgccggctccagagccggccaccgccgcctaaccggcaggcacgccaccgcgatcaaccgcaccgtccgccgcctgtcaccggaggagatggatgagcgccgacgacaaggtctctgcttcaactgtgacgagccctattcgcgcggccacaaccgattgtgccgccgattgttcttcctggagttgggggaggacgacaccgacaacgactccgccaccgaccaagcagacgcggccgccacactccggatttctctgcatgcggccaccggagttcgcgcgtccgacgccatgcacatcacggcccacctcggcgacaccgacctctacaccctcatcgactccggcttgatgcacacgttcctgtctcaggatacagcggcacgtgtcggtcgggctcctcagccccgcatgggcctcaacgtcacggtggcgaacggcgacaaggtggcgtgccccggcgtcttccccgacatgcctttacagatcgccggcgaggaattcgccacggacgtttacgtcctgactctgggtggctatgacctcgatttcacggtgctgacaatgtccttctggcaccgcgtcacgctccacgggttgccgggacaccagcgaccccgtgctctggcgtgcgctccagcggcactactggactccctcctggaggaattcgcggacgtcttcaccgagcctacaggattgccgccggcccgagaccgctcacatcgcatccagttgctgcccgggacagccccggtggcggtacgcccgtaccgctaccccgtccgccacaaagacgaactggaacgccagtgcagggtgatggaggaaaatggattgattcaccggagcacgtcggcgttctcatcgccggtgctgctggtgaagaaggcagatgggtcatggcgcttttgcgtcaattaccgggctctcaacgagcgcacagtcaaagacaaataccccatccccgtcgtcgacgagctcctcgatgaactgcacggcgccgccatcttctccaagctcgatctgcggtccggctaccatcaagtccggatgcaccctgacgacatcgacaagacggcgttccgtacacacgatgggctctacgagtttctcgtcataccgttcggcctcacaaacgcactggccacgttccaatcactcatgaacgacgtgctccggccgtttctccgccgcttcgtcttggtcttcttcgacgacatcctcgtctacagcccaacgtggacgtcgcacctgcagcacctgcgcaccgtcttcaccgcgctctgggcagcccagctcttcgtcaagcacaccaagtgttcgttcggcgacccaagcgtagcgtacctcggccacatcatttcgcagcacggcttcgccatggacgccgccaagattcaagcggtagctgagtggccgcgcccccgttcgcccaaggaactccgtggcttcctcggtctggccagctactaccgcaagttcattcaagacttcggttccgtggcggctccactcacgcagctcctccgcaaggacagtttcgcatgggcgccggcgaccgatgatgcgttccagcgcctcaagctcgccctcacaaccacgccggtcctcagccttcccgacttcaaccgcccattcgtggtcgaatgcgacgcatccggtaccggcttcggagcagttcttcaccaaggcgaagaccccatcgcctacttcagtcggcccatcgccacacgccatcacgcgctcgccgcgtacgagcgtgagctcatcagcttggtgcaagcagtgcgacactggcggccgtacctgtgggggcggcaattcatcgtcaagacggatcactacagcctcaaattccttcttgaccaacgcttatccacgatcccgcaacatcattgggtaagcaaattgttggggtttgattttgtggttgaatataagccaggcaaacagaacgcggcggcggatgctctgtcttgccgcgccgcaccagacagccaggccttcgtactctccacgccgacgttcgatctcctcaaagacatccgcacggcgggggacaccgatccggcactacaagccctccgcgacgagatcaactccggcacgcgcacaacaccatgggcggtgatcgacggcctcgtcacctacaagcgccgcatctacattccgccgggctcaccatgggtgtcagtcgtcgtcgccgcggcgcatgatgacggacacgagggcatccaaaaaacacttcatcgactccgccgcgacttccacacgcccgacgaccggcgtgtcgtccacgatcacatccaaggctgcctcacctgccagcgcaacaagacggaccacctccatcccgcgggcctcctgcttccactcccggtaccatctgccatttggtccgatgtcgcgatggacttcgtcgagggccttccacgcgttggcggcaagtcggtcatcctcaccgtcgtcgatcgattctccaagtacgcccacctcatcgccctcgcacattcgtacacggcggagacggtggcgcgtgcgttcttcgtcgacatcgtgcgcttacacggggtgccggagtccatcgtttcagaccgggaccccgtcttcacgtcggcgttctggacagccctcttcaccgccacctgcaccaagctccaccgcagtacggcgttccatccacagtcggacggccagtcgaaggccgtgaacaaggccattgccatgtgtctccgctgcatgaccggagatcgctcccgccagtggctgcgctggctgccgtgggcagagtacatctacaacacctccttccacgccgcccttcgtgacacgccgttcaagttggtctatggccgcgatcctccctcaatccgggcatacgacgcaagcgagctacgggtggcagcggtggcacagtccattgaggagcgcgacgcattcctcgctgatgttcgtctccgcctggaacaagcacaacagtatgccaagcgctactatgatcagaagcaccgggaggtgtcgttcgaggtgggggcgtgggtgtggctccgcgttcgccaccgcgttcctgcgtccctcccggaggctgtcaagggcaagcttcgtcctcgcttctacgggccataccgcgtcgtcgccgtcatcaacgaggtggcgtatcgcctcgcattgccgccggggacacggcttcatgatgtgttccatgtcggactgctcaagccgttcgtgggtgtgtcgccatcggcaccactggctttgccacccattcagcatggagcggcccaacctgttcctcgccaagtgttgcgcgcccgtttggctcgaggggtgcgccagcttctggttcaatgggaaggactgccggcatcggccacatcttgggaggacttggacgactttcgcaaccgatatccctcgttccagctcgcggacgagctactgatcgagggggggagagatgttatgtggggaattcccttccgccggcgcaagcagcaagctgggcttggtgccggacgagctatagggccgggcggcacggctgtttag

SEQ ID NO: 11666 - DNA, 7893 bp, Oryza sativa
  Clone ID: TFbOSC400891j.C1.o34.fg
atgtggaagactcagcccggaggaacatccagagatggaaggggtggaggcagtacggccagggcaaacgcaggcaccgggtacccaacccgttcgcgtacttctggaaatccacaattctctgcacccacaaacggcgcgaaccagagggctatggcctctctccgctctcctctgcgtggagggccagacatgccgacctccaggagatgttccccaaggctttccggcacacaacaagacgaagtagccgaggtagcacgcgtcggaatgttaaaaagggctagtaacaatgcttcaaattcttcaacatcaagagctcccaccagatcttctagcaccaccaccgctagttctaaggatgttgcagaagagcatagcagcggggttggaagcactagcagtttatcaaagaagcggaaaagaatgaccgcaaaatcctacagatcacttttcaagcgatccaaaaaagcaagctccacagagcgggcaaggaaaatacttccaatgggaatgtggcagagagcaacactggtacatcaacatatatctatcgaaacatgcccacaaaacaaagttgctgagagtagacttgaagttgaaggtagagatcggcctactgggcattcaaggcaaaattctatatcgtcattgcaaagtgccccaatccctcctattcattacgaggagcccgagagtggacatggagatggtgaaccccttagcattcaaaaagaagtagcttcaagtcagttcaaggtgaccgcatctgatgaaatggagggcaattccaacatatgcgttgcttgtggtaccccaggagatcttaatcgggtttgtgattcaggtcctgtgatggagaaggctgcaaaagaagctaccatgtttcttgtctggatcattggctggaatatttgtctcctgaggttgctgtttggaatacactctgttgctgatggaattgagtctctgtggaatgtcaaggagggaatgcagaatggcaagcagtaccttgtgaagtataagaatctggcacatgtccataatcgctgggttccggaaggtgttatcaatgacacccctggaggttgtgatcttctgtccttgtttaataagagggatcataaagaaaagacaaattggaagaaggaatggactgagccacaccacctgttgaggaaaaggccacttatgcccccaaaagaagctgatgattttttttgttcaagtcgtgctaacattgagcattgtaatgttgaatggttagtgaaatggagggatcttggctatgaacatgcaacatgggaactggaaactgcatgctttttgcgtactcctcaggctgatgaacttaaaaggaagtatgagaaccgccgtaaagctgctaagcaatcatctattcccgtagaaacaaaggttaagcataagacatttcagaaactccagagattaccagacgagtggcctcctggttttgacaacgatcatttgttttctatcaatcaacttcttgagttctggtgcaaatctcatggtgctgtccttgttgatgataaggaatacgtaacaaaaaccatcttgttcacgttgactgtattacctgatgtctgccaacctttactgatcgtcacgactcctgcttctctttctgcatgggagattcagttcaatcacttggcaccatttatcaatgttgttgtgtatgatgggcagaaagatactctcaaattaattcaagacctggagttctatgacaacagacgctgcatgatgttacaagttctcttatcccatcctgatgctatcctagaggatattgaaactatagagcgcattcgctgggaagctgttatagttgattattatgaaaactctgcattcaaatattttgaacaactcaagaaaatttctactgattttagaatggtgcttttgggctccccaatcaaggataatgttcctgagtacatgaacctgctagcttttcttaattcagaagataaaggttatagtgactatgtcaatgctgatgatgcgcttgtgatgtcaaaagcaagattcacacatcatattgcatatgagcgtaaaacagattcttcaaaatttttggagtactgggttccatcttgcatttcacaaccgcagttagagatgtactgttccatattgctttcaaagtcatccgtcctccggtcagagatggaaactgatagcgttggagctcttcatgatatttatctgtctctcaaaaagtgctgcgatcacccttacatcgttaatgaatttctgcgaagctcacttagcaacaatagcaatgtaactgaaaatatagatacggtggtgcatgcaagtggcaagctactggttctcgacaaaatgcttaacgagatcaagaagaagagtttaagggtcattcttcttttccagtctgatagagcaggtggaaacaaaatgggaaatattttggaagatcttatgcatcacagatttggcccagaatcatatgaacgtgttgaatatcgtgcagtattgtcaaggaaacaggcagcaattgataagttcaacaacaagactaatggtagatttgtctttctgattgaaaatcgtgcgtgcctcccaagcattaagctttcatctattgatgccatcatcatatatggttctgacaacaacccactaaacgacttgaaggctcttcaaaagatcaagatagagtcacaatttgagcgtgtgagcatttttcgcttgtacactccttttacagttgaggagaagagtcttgttcttgcgaggcagggcattgttattgataacaacatacaagatctaaggactagtttaaaacattccttactcagatggggtgctgcatttctcttcagtagacttgatgaggtccagcaagatgaccatgcaagtaaaagttctgaaatggagagacactttattgatgaagtaatcgttgagttcttaacaaagttatccacaactgttgaagacagcactgaagtacacaggaagtccataagcaaagctaatatgagtggggaactatattcaagaaatattactctgatgggtgaaaaggagggaatctctgtgcttgaggataatccagctgagttctggttaaatttattggatggaagatcccctcatgtgagctgtatatctgagccactgcaatcaagagttacaaagtcccagaccatggatgaggtcaatgctccggctgaagaaatcaatgaagccagaaagaagcatagaaaggttggtgagattatgggttcatcttcaaaagttgtatctgacaaaagtaacgatgatgcattgcctgatatttgtactacatctggccctgctcttcaaccagttgatgtcacgcagcaaaaatcagttcaatctgaagggtcggaaagcctgatgagtacacccaagaatcttcatgcccaaatgaagcaagagttgtcgaaattaattaaggtgttacaactaccgaatacaatacagtttaatggagcgaaaatagcaggacaagttctcattgaagtagacaatgttacgttgctggttgagcagttctttgaatatcttttgaataatcatgtagttgttcaggagccaaagtacatatttcatgcgttgaacatagctttgtgttggcgagttgcctctattcataactttaaggtggatcataaagagtcacttgcccttgctgaaaaaaggttaaaatacgagtgcaatgaggagctggcaaggttggtctatgacagcctaaagagaaaatttccaaagaaagcaggtgcaactggcagcaattgtcaatcaacatcagtagaaaagaccaaaccttcacagcaggagacctctaatatcttgagaaatgaccacattttccctaagcagagaatggatcttcatgataatttcatgaatggtgcacttcaagaaggctcatttgttgctgcacaaatggtttcagaagagcaggaactgatagctgttccaggaactcacatggaatgccatttttcaactgatgaacttcctgacattgtggagaaaagaatcaacttaattgacaatgttttctctgtaagagaataccgtatctttgataaacaacagtctcagatttcagagttagagaaatacacacaaaataaaactgccagactgaaaacagtgtgcaatttagttctggaacatatttgtagaagtcatgctgatgtagagacccgaaatgacacaataaaacaaactgttcagtggttcactatgctgatgtatgcatttctggagcacatgagactccagcacagcaaacttgagtcactgcaatctaatacatgggctgaagagcgacagctgaaggaaaaactttgtttggaagcaaaatcaggccaattagatcacacctttgatcagcagattgctctaccagattcaaactttgttatgcaagaattcatccatttgaaggaacaaagtagcaattcccatgtcagtggaagcgctgtttcagattgtcagcagctttgtcatgatagattgaaaatggtaaatacactggtaaggaatgtagttccatcagaacccatttctgcacagacagtgagaaatggttctgttgaagtggtcatggtcgctggccaaccagcaccagaagtagttgattttccagaaaacaacacctgctatagtcctgatggcattggcttacaaaaagctaaatcaccgagtattaggccttcaaatgatgattcaattaatcaggaatcttcggccagtgaatatacaagtactgagaatgttgagagggacaatgccaatcctagtacattgccgggagttgcaacttctcctgccattggaatttatgccaacttggagtcaacaatggttgcttctacacaaaacctcacgattttcccagcttctaaggaagtggctactcaatctaatttatcaaccttgcctggctcacagactgttgagacttcacagcagccacctgcagaagcaaaactgactgaaaatttgggagtaacagcttgggatgtgcaacctgaaatgcaaacaacgacctcaacattggattctccatctgcaaggatgtgcccagataataataatcaaacagttcatcaaccagatacatcaactagcccattgcaggaaggttctacttcctgtcatttaacctcagttgatgctactgctggagttacagcaaaagttgatgacactgctgctgcagatccacttgactcagagacacaatcttatactgctgcacacaaaccagctgccttgctggtgtctacggaagttgaaacccagactgatcaatcaagtatgcttgaacggcagagtataagtgtaccactcgtacaaagttcactatcttcacaaaatccacctgcagaagcagaaccagcaagtaccctgagcagggagacagcccgagatgtgcagcctgaaaggcaacaatcagcctcagtgctggagacttcactccaaaggatgcaccctgatgacgacagtcaaacaaaacatcagctggaaacagttctgtcacagagaggtgaaacctgtggccatttaggagatgctcgagagatagttgatgctaatgatagtaacactgtttgtgatgttcgagcccatttggaatctccaatctttgctactccacaaagcctggttatatgtcaaggtttgagtgaggttggaagtcagggaaatatatcaaatatgtcttcccaacagagcacagatctgtctgcccaacaaaatctagcaccttcaccacttccacctgcagaagcagaacgaacaggtttgcttaccacacagccagctcagaatttccaacctgaattgcaaccatcaacctcattgtttgatgcttcacttgaaagtaacaacataagtcaaacagattgtcaatcagatcgagcagttgttttcttgcaggaaggtgcaacaactcaacaacatttacttgataccggagttgtagttgatgacattgttgccgaagagccttcacactcagaatctccaacttacatcattcacgaaacagctgccttggtagtttcgacagaagttgaaactcagacttgtcaatcaaatatacctatacaacaaaatacaagccaccctgcccaacaaagtccagaaacttcacgacattcaattgcaagtcctgtaggtttagaggcaactcaggaatttcagcctgaaatgcagccatcaacctcaggtcaggatcaatctgaagagctggaacaagaaggtatgtcgagctcagcaattcaggatttacagccagaaatgcaacctccaaactcagtgcagggtcagtatccaggagcagtattgtgcattgctgcagctgaagatttgcagcctttaatgcaatcatcaaccccagtgccaaatcaacttgcagaggcaaatcaagaaggtatgttgagtgctgcagcagctcagaatttgcaatgtgagacacagagattaacctcaacacaggatgctccatttgaaaggactgatctgtctggtattcctgtgccacgaagtattactactgcccatcaaagtgtagtgccttcatgggatctgcagacaggagtagaaccaacgggtgctttgtgcatggaaacaacacatgaaaggcagtctgaactaccatcaggttcaatgcaagagcgatctgcagaaacaagagcaaacttagtgcagcgatcttgcacgacagaaacttgtgatttgcagccccaactggatctatcatccacaatacagactgtccaacttgaaggaatacgctctgaagacatgaatcagataggtgttcagtccaactctgcactaagttctgaacagcccacccagcctcttccagtggcaccattagtgtttaattatcaaagatttagtgacgaacctctcaaaaatgagctggaaagattaaaacataccagcaatgttcttagtaaagttcatgaacaaaagagaaaacaactcctagtggagtataaccaagaaatggagaagctaaaacagaaatatgactcattacttcaaaaggaagattctttttacgctcagaaggaggcagaacttgatactatctacaggaaagtctttataaaccaatcactggctgagaattttcgaaggaaattcctaccattatctgcagctcaagggggatccacgagacccacaattgggcagctggttcagtcttctcaggaaccatctgcaaggattgtagcagagcaagtcacagcatcaccagttaccttgtcatcagcagttcgaccacaggtgcttcattcatcaggaccatatgtgcaaccttcactggtggttcaaccatcatcacaggctacccaaccgcagtcaatcttacctggcaatatgtatagagcaatgtcatcatcaccttttagtagtacaccaatgcctatgccacatggcacctacagagctgctggggcacaaccgcatgctccctctcctcatctccagcagcttaggatgccgtcaccttatgccacgagtcatggaaatcagcaccaacgaccatctatcctagcatccctactgccatttgtgctcccatctagttcaaatcctagcctcacggcacccctgtcattgaacacggttgttcacaggacctcaggtccactgaatgcaggtgctggaagccagcacgctggatctcaaatttcaggtgtcaatccctcaggttcttctgcatcagcatcactgaatacatggctaacagctaggcttgcgctgactagtgaggccagagggacggtctccagcacagaggttgtgtgcctttctgacgatgaatcgtag

SEQ ID NO: 11667 - DNA, 6216 bp, Oryza sativa
  Clone ID: TFbOSC900030j.C1.o7.fg
atgtccgacgctcggtctcggcgttcggtcgcctcaagcactcggcgtcagcaggacgccgagctcgccacaacagaagagcgcaggcgagcaacggctcagaccactgcagcagcagcgagggcggccagactggcggcagcggagttggcagcaaccagggtggaggcggagacggaggcggcggaagatgtggcacgtgcggcgaaggtagaggttgagactttgcgcagcagcatcaacggctccatcgccggtgacatcaccgccgacagggagcttgaggagctggcaagaggaagggcacgggaacgggcagagcggtgggcagcagcccacctccacggcggcggcccaagggaccgcgcgcccgccgacgggaacccagacgggcgcgggcgtgccggcggcagcgcggctctctctcccctgaccggcgccatggtcaccacggcgtccagacggtggtcagggactttggtcccggcgaagcggactgccaaggaggcctgggacgccatcgctgcggcacgcatcggcagcgaccgcgcccgcaagtccacactgcaggcactccgcaaggagtgggagaacctggccttcaagccaggtgaggatgttgatgactttgctctccgtctcaacactctcttgcagaaaatggtgcagtacggcgacgacacctacgacgaggagagagctgtcgagaagctctttcgctgcgtcccagagaagtacaggcagatcgctcgctcgatcgaatctctgctggacctctccacgatgtcgatcgaggaggcgttaggtcgcctcaaggtcgtcgatggtgatgagccacagcctctctcggggcccatcaccattggcgggaagctccatctcactcgggagcagtgggaggcctctcagggtgacgggaggaagggggagtcatcttccccgacaggcggctgtaagccgcgcaaggcgtggggaggtgtccaactacggctgctcaccggagtctactacatccccgcgctgaggaattctatcatcagcgtgggacagctggatgagaatggctcacgcgtgttggtcgaggacggactcatgaggatttgggatcgccgtcgtcgccttcttgccaagataaccagaggcactaatcgactctacatcctcagcgcgcaggtcgcacaaccagtttgcctcgccgctcgtcgggacgacgaggcgtggcagtggcacgagcgcttcgggcacctccactttgaggccctgaagcggctcagtgccaaggagatggtgcgaggcatgccgtgccttgaccacgtggagcagctctgcgacgtctgcgtggtaacgaagcagcgacagctcccctttccccagcaaacgagcttccgagccaaggagcagctcgagctcgtgcacggggacttgtgtggcccagtgacaccggccacaccaggaggacgacgttacttcctgctgctcgtcgacgacctctcccgctacatgtgggtgatggtcctcggcagcaagggagaggctgcggatgccatcaggcgcacgcaggccgctgcagaggcggagtgcggccccaagctgcgcgtgctgcgcaccgacaacggcggcgaattcacggcggctgaattcgcgtcgcactgcgctgatgagggcattcagcgccactacaccgcaccgtacagcccgcagcagaacggcgtcgtcgagcggtgcaaccagacggttgtggggatggctcgggctctcctcaagcagagggggatgccggccatcttctggggggaggcggtggtgacagccgtctacatcctcaaccgctcgcctatcaaggccctcgatggcaggacaccgtacgaggcttggcatgggcgcaagccggcggtctcccacctacgggtcttcggctgcctcgcgttcgccaaggagcttggccacattggcaagctcgacgacaggagcaccccaggggtattcatcggctacgcggagggctcgaaggcctaccgcatcctcgacccggagacacagcgtgtgcgcacagcgcgcgacgtggtgttcgacgaagggcgagggtgggtatgggacaaggcggtggatgatggttcgactccgacatacgacgacttcaccatcgagtacgtccacttcgagagagctgggggagtaggcagctcttcttcaccgagcgtgtctaccccagtccccgagcctccaccgactccaacaccaacacaccctcgggccacgacttcaactacgacgagctcttcgtcgacaccaccccagccggtgtccccacgcgctccagcaccaacagccactcctccgggcacgtctactccgacgccagctcgtgttgagcgcagcccggtggagttcgctactccgttctcccacgacgaggagcgcatcgacgcgtaccacgacggcgagcagctacggtaccgtacgatgcaggatcttctcggcgaccagccggtgccgggactggtgcctcgcgacctggaggcgcagttgcaccttgcgtgcgacgacggtgagcctcggtcttttgcagaggccgagaaacatgcggcatggcgtgccgcgatgcggtcggagatggacgcggttcaggagaaccgcacctgggagcttgctgacctccctcgtggtcaccgcgcgatcacccttaagtgggtgttcaagctgaagagggatgaagccggagccatcgtcaagcacaaggctcgcttggtggcacgtggcttcgtgcagcaggaggggatcgactacgacgatgccttcgctcccgttgcacggatggagtccgtgcgactcctccttgcgctagctgctcaggaaggctggggtgtccatcacatggacgtcaagtcggcatttctgaacggcgacttgaaggaggaggtctacgtgcaccagccgccgggattcgtgctccccggcaaggagggcaaggtgctacgcctgcacaaggccctctacggcttgcggcaggcaccgagggcgtggaatgccaagttggattccacgctcaaggggatgggcttcgagcaaagcccgcacgaggcggccatctaccggcggggcaatggaggaaatgccttgctggtgggtgtctacgtcaacgacttggtgatcactagcaccaaggatgcggaggtggcggcgttcaaggaggagatgaaggccaccttacagatgagtgatctggggcctctctcctacctggggatcgaagtgcaccaggacgactccgggatcacgcttcgacagaccgcctacgccaagcgcgtcgttgagctggctgggctcaccgattgcaacccagctctcactccgatggaggagagactgaagctgagccgcgacagcacggcggaggaggtggatgctacacagtaccggcgccttgtggggagccttcgctacctcacccacacacggccggacttggccttctccgtcggctacgtcagtcggttcatgcagcgaccgacgacggagcaccagcaggctgtgaagaggatcatccgctacgttgcggggactctcgaccacggtctctactacccgaggtgtcctggcaaggcacacttcgtcgggtacagcgacagcgaccacgccggcgacatcgacactagcaagagcacgagcgggattctcttcttccttgacgagtgcctcgttagctggcagtcggtcaagcagcaggtggtggccctgtccagctgcgaggccgagttcatggcggcatccgccgcttcgacccaggcgctctggcttgctcgactgcttggtgatctcctcagcagagacactggagcggtagagctcagggtggatagcaagtccgctctggccctggcaaagaaccccgttttccacgaacggagcaagcacatccgggtgaggctcagcaacatgcaaagaggttctacgaccaccaccatcgggagctgcaatttgcggtgggcaactgggtttggctccgtctcattagcaactccggtgaagggcaagctcgggccacgctactatggactggagatcatcaacaaggtggcatatcacctcgctctgccagccggggcgcgtttgcatgatgtgttccacgtcggccttctcaagccgttcgtgggctcgccgccgactacgccgccagcgctaccttcgacccagcacggtgcagtgttgcctgcgctagcccaagtgctcaagtctcgtgtttctcatggtgtgcgtcagctgctcgtccgttgggatggtttgtcggcgtctgcaacgtcttgggaggatttggatgatttccgcactcagtatactgtgttccagctcgaggacgagctgtttgtcgaggaggggagagatgttatgtggggcattccataccgacgtcgaaaccggcagggcactcttttatcaaactctttttctgttcctgatgtttcttgtgtgcctgatctgaccatgcagcatatgtccgctggtcaacttgctgatcgtaactatcgtgtgattcttgaccctaatttttgttatattcaggatcgttgcacaggtcagttggttggtactggccctcggcgccgtgattcacagcgtctctgggagcttgactggattcatcttccttccactgcgtccgccagtcttgttggctctgtttttgctgcatcgtccacctcgtccttcgctcagtggcatcatcgtctgggtcatatttgtggctctcgcttgcccactatgattcgccgtggtctttcagggcatgtttcaggtcatgagtctttacatcagtgccagggatgtcggttaggcaagcagatacaacttccctatcattctagagaatatctttcgggagctctacggcatgttctctatgagtatggcactcttgctcagttttcttgtcctggtgctcatgctcagaatggcgttgttgagcgcaagcatcgtcatcttcttgagactgctcgtgctcttttgctcggttcttgtgttcctcctcatttttgggctgaggctgtctttactgccaactatttggttaatattcagccttcatcagctcttcatggagggattccttatgagcatctatgtagcaaattgcctgattatttcggccttcgtctttttggctatgtgtgctatgtgcttcttgcacctcacaccacttctgcatctttagttgacccactctccttcttgtttttacctgatgcctctattgccagtacacgcccggagtcgcagcttgctatggctgaggagattgctgctcttgagcgcactggcatgtgggatcttgttcctcttcctgcgcatgtttgtcctattacttgtaaatgggtctataagcaagagcatggtcgtgactatgacgagacctttgcgcatgttgctcatatgactactgttcgcactctctttgctgtggcctctatccgtgagtggtccatctctcatcttgatgtcaagaatgcctttcttaatggtgagttgcatgaggaggtgtatatgcgtcctccacctggttattctattcctgaggttgagactcccatggagcttaatgttcacctttgtgccacctatggtgagcctctctctgatcctactcactatcatcatattcttcactatactcgcgtgcttcgtgttctgcgttatcttcgtgggactatagttcatcgtttgttctttccacgctctagctctttgcaactccaggcatattgtgatgctacctgggccagtgattcctctgatcgtcgatctctttccgccttttgtgtttttcttggtggttctcttatttcttggaaaactaagaagcaaacagcagtttctcattcgagtgcagaggctgagttgcatgctatggctcttgtgatagcggaggttacttggttacggtggttgcttgaggattttggtgtttctgtttctatgccgactcctcttttgtctgatagtaccgatgctatcagcatggctcgtgatccggtgaagcatgaacttagtaaacatgttggtgttgatgccttttatacacgagcgcaggtacaggatggtgttgttgctcctcgttatgtgccctcagagattcagttggctgatttatttacaaaggcacagactggagcccagcataggttttatctctccaaactcagtgttcttgatccaccctga

SEQ ID NO: 11668 - DNA, 4722 bp, Oryza sativa
  Clone ID: TFbOSC401439j.C1.o13.fg
atgcctagagggccccgagtggaggatccagtactggaggaggtacagccatgggagacagcggtggatgagcttaggctaagcatgatggatttgcaaaggaaggtggaagaagaccacaagctggtccaggagcagcttcagaaccaggcggttcaggctcaggtatacaaggatgaggttatgcaaaacttgttgtcaattcaacagatgttaggtgggacaactagttgcatggggcaggaaatcaagggcacaccgaaaacacctggctttgcacaatctgtcgtaggagggggaaaagcagtggacactaatgcagcaagtaccagcagacatcctcttttcgattatagaaaccttagttgcccaatgaccacccaagccatagaaaccacagacctaccaccaactgtttttactcccaaacctgtctccacccctccatctgaatggaatacctcggtttacttcactacaccaacagttccaccaccaattccaccagtaccaccacctccacctaaccaaaacaatttacctcaaaaccaaaattacaatccttacaatatgaactaccagtatacaccattctattaccctccctaccctccctataacacaccttggaaccttccacagtacaactacccaccaccatcccatacaccacctaaccaaccgtttcttccccaaaattgggatcgtcgatttgggccctaccacgatcctaatggccgagaaagaacccagtatgctgagaatgctcatagacgatcaaagcatgttgatttccccattttcgatggtgaatgccctgaatcttggataaggaaggctgaaaagtattttgctttgaatcaaactcctgaagaagaaaaagtcctagtggctgaaatctatatcacaggtcgtgctgatcagtggatctcgagttctgatgttctcactgaacaactaacttggcctgaatttaagtccatgatttgccaacgctttgctgctaagtccaacattgaagtcattgatacttttcgaaatctgaaacagtatggttctgttgatgtttatatcgacaaatttgaagaagttatggctctagtgaaacgaaataggcccaacctaactgagcagtactttttggattactttatctctggccttaaggatcatatcaaaagaccactgaaatctttacacattcagtccttggttgatgcttatgaacatgcaagaaattatgatgtgcctcctcgaagcagtcccactgtggcagtatctcagagtaaggagatgcctaaattaccggttaaaccggcattgaaggatgacaagccatcaccttttacagcaccaaagtcgtttggcagatgcttcaagtgccaagagccttgggtacctggacatggtcgagtttgtaaggccactaaacaaatttatttggtaaccttagatgatgatggagaagaaatgcctgataatgctgcggcccagtttactacaccaccaggtagtcctgctcatgaggctactacccatacagacttgtctttgcatgctctcgagggaaccaattctgttgctacaacttttactatccatgtgtgcattgggaagatgtctgctactgctttgattgatagtggcagcacctcaactttcatttctcccaaatttgtcagtaaggctggcttggagattgttaacaatgaccctattcctgttaaggtagcaaatggaggcactttatatactggtgctaggtgtgttgatgtaccttatatgattcagcagcaccaattcatatctacattcagacttcttaatctgaaaggctatgatatcgtccttgggtgcgattggatttatcaccatagtccattgacactcaacctgaagaccagggaattaaccattcataaagatggactgctggaattgacattacctgacatcaaaccagtggcactccctcctcaacgtgactgtgatcacacaattcccttgataccaggagctaaaccagtaaatgtccgaccttatagactgccatatcagaagaaaaatgctcttgaggagttggttcagcagttgcttacctcccaaaccattcagcccagcatgagtccatattcttctccagctatattggttaaaaagaaagatggcacatggcgtttgtgtgttgactatagacaacttaatgcttccacaattaagaacaaataccccattcctgtcattgaggatctcttggatgagttgcagggagctcaaattttttccaaaatcgatctcaggtctgggtaccaccaaattcgcatgcatgcagctgatgttcataaaacagcttttagcactcatttgggccattttgaatacttggtgatgccttttggattaactaatgcgccagccacatttcaagcactcatgaacaagatattagcaccctatctccgcaaattcgtgttagttttctttgatgatattctcatatatagcaagtcagccaccgaacatgcgcagcatttgagcctagtactacagttactgagacatcaccagttattcgccaaaccaagtaaatgtgtctttgggcaagatcaagtggaatatttggggtatattattagctcctcaggagttgctactgaccctgttaaggtgcaagcagttcaaaactggcctactcctacttctatcactgaactaaggggttttctaggtttagctggctactaccgaagattcattaaaaactttggtatcatctgccggcctatgtttgatgctctgaaaaagaacaacttccattggcaagaagttcagcaacaagccttcgatgccattaagcttcagttagctcaagcacctgttttggccatgccagatttctcccttccatttattttggaagccgatgctagtggacatgggatcggagcagttttaatgcaaaatggtcgaccacttgcttatctcagcaaagcaataggacccaaagctgctgccctctccacctatgataaggaagccctagctatcttggaagctctaaagaaatggaaacattactttttaggcacttctctcattatcagaacagatcaagctagcttgaaatacattaatgagcagcgaatcactgaaggtgtccagcacaaattacttatcaagttgttaagctatgactataaaattgaatacaaaaagggccaagagaacaaagctgcagatgcgctgtccagaatgcagcagcttaatgctttaactactactgtcattgttccccagtggataactgaagtggctgctagttacagtactgacccaaaatgccacgaattggaatctcacctgcacattgcaccgcaatctcaccctccttatactttgaaaggaggcattctcagatacaaagatcatattgtagttggggccggcaacacactacgagagcaattattagtttcttttcatgactcagctctaggaggtcattctggtgaaagagcaacttatcagaggatgaaacaactgttctattggcctggtatgaaacttgctgtcactcaatttgtcaaagcttgccctgtctgccaaaagaacaagactgaacataacatgccagctgggttacttcaacctctccctcttcctgaaatggcttggtctcacattacaatggattttgtcgaaggcttacccaagtctgaaggcaaggatgtgatctgggttattgttgataggttcaccaaatatgcacacttcattcctcttagccatcctttcactgccgaccaaattcttactcaattcttggagcacttttacaaattacatggcttgccgacagtgattgtgagtgacagagatcgcatcttcactagttccacctggaaagaagtttttgaaaaggctggcgtcaaactccacttcagcagcgcttatcacccgcaaactgatggtcaatcggagcgagttaatcaatgcttggaaaattatcttcgctgcatgacatcgtccaaacccaggaaatggaaagctcttctacctcatgctgaatggtggtacaatacaaccttccatacatctctgggcatgtcaccatatcaggccctacatggcattaaaccacccctgttggctgaattactcctacctggttccttattggaaggtgaacgtaacaaacaggaagccaaagctgctctgttggagacaataaaatctcatcttgtcaaggctcaagcccgtatgaaatactttgccgatcaacatcgccaagaacgcacacttgaagttggcgatatggtctaccttaaaatgcaaccatatcgacataattcactgggtcttcattcttccttgaaacttcactccaggtactatgggccattcagagttctggagcgcattggttcagttgcttacaagcttttgctacctgttactagccaaatacatcatgtcttccatgtcagccagttaaagaaacatctgggctctcgtgctgtccctgaacaaggtcttcctttgattgatgctgagggcaggattctctctaccccattggcagtgctcgatcgtcgccttatacctagaaacaatgaaccagtggtgcagtggaaaattcattgggctaacctaccagaatcagctgcaacctgggaggatgctgcgtttattaccaaagtatttccttctttcactccatga

SEQ ID NO: 11669 - DNA, 4530 bp, Oryza sativa
  Clone ID: TFbOSC900392j.C1.o8.fg
atggcgctgttgccgccgctggcacctccaactgagacggcgcagtttccggaaggagcaggaatggcggcgtggttttcggaagcggcagggacggtttggagttgtggtctagagatggcgccttttccggcagcagcgagagcggtggcgctgtctcggtcgctaccctcgagagagatggacgagaaagtggagatttttgttgtggatctgacagaggtatcagagcagtacgaattcttggctcttgatttcatcagatctgaaccaggcggtggtagacacttctgcaagaggaaacaagggagggaactagttcctgaacttttcttgcagaaaaattggatggttactaagacccgatccaacgagacgattctggatatggaggagctaaatgagttcagggtggatatggcgaatctcaagaaggaggggttgctgttggaactctgcaagcagaagaatgtggaggaggttgacggtgacacagatgcagcagttgctgctgttgcggctgaaaaggctaacaaaactgttagttcagatactgggggtgcaggaccaagcaatcccactgctgggaatcctcctgaggtacgttttgccattgaacacaacaccatttctgttgagggagttggtagttcaagggggcctcaggatgcagcggctgtaatgaatggttgggtgtttgacactagtatgggcactcatcggcctaatgtgtttggaaatgggagtcagcaggggtttgaccgtgtgggaggaatacctagaaggtttcaggggaattctgggggcagagcactcaagtggtataggggaattggtcttccttggcaggtgatcacttggccacaatggtgtgctatggtttgcaccagtttttctgcagcagatgtgcatgaggcaatggaactttttcaaaatgtgaaacaacatggacaaattgtggaacattatattgacaaatttgaagaatacatggatttggtgagaagggaccatccatacttgcaggagcaatacctcaacagctgttttattggggggttgagaagtgacatcaagcatgatgaagcatggtttcctggacatcaatgcaaggtgaagaaggcactaaatgcactacttttggaggaggaggaatatgaaggaactgaggaagtaggcagggaaaagaaggcacaggagaaagtcttggaagaaactgaacatgcacctgaagaaattgatcaggaggaactgatgtatgtgtcacagaatgctatgcaaggggctaccagaccggacacgttctcggtgattatacaaatcaatggaagaagggcagtagggctggtagacagtggaagtccaagcactttcatggatcaggagtatgctatacgtaatgattgtcctctggtatctactgattctaagaaagttgttgtggcagggggtggagagctcaaatcagaagtacaagtccctgacattctgtaccaaattcagggtgaaactttctccaacaaatttaacttgatacctttgaaggggtatgacattatattgggagctgattggatttacaaatatagcccaatcactcttgatttgaagaaaagggaattgggtataactaagggagaaaaggtgatcaccttacaagatttcactaatactgggaaacatctgttagttgatagcagtaaggtggacaaaattatcaggaaaggtggtctgggatatttgtttcaaatcacccaagtggcagaagagagtgatgtggaagaaagcatcagcattcctgatgatattcaagatatattgcaaagatttcctactgttttggaaaaaccaaaaggccttccacctcagagagggtgtgatcatgttattactttgaaggatggagctataccccctaacctcaggccctatcgtgtacctcatcatcaaaaggaagccatggagaaaattattgctgaactgattgaatccaaggagattcaggttagcaatagtccctactcatcaccagctgtaatggtgagaaagaaagacggttcctggagattgtgtgttgactatagacagttaaatgcacaaacagtgaagaacaaatttccaatgcctataattgaagacttgttggacgaattgaatggagctaaaattttcactaagttggacctcatgtcagggtatcatcagattaggatgtcgagacctgacattcccaagactgcatttagaacccatttgggacactatgagtatcaagtcatgccctttggtctcactaatgcccctgccacatttcaatcacttatgaaccaagtgttagcaccattctttaggaaattcgtattggttttctttgatgatatacttatctatagcaaagacagggaagagcataaagaacatatcaggctggtactgcaagtgctgaaggcaaacaatctggtgatcaaacccaagaagtgtgcttttggtctgtccagtgtgtcttatttgggacatattatatcacaaaatggtgtagccactgatccaggcaaagttgagaagattgtcagctggcccattcctaagaatgtgacagatctcaggaaattcctgggtatgactggatattatagaaggtttatacaagggtatgtgttaatttgcagaccattacatgacatgctgaaaaaagaaggctttcaatggggagagaaacaaactgaggctttcaagtttcttaaacagaaaatgtgtagcagtcctgtcctgaccttgcctgacttttccaaagaatttacaattgaggctgatgcatgtggtactggaataggagctgtacttatgcagggtgacagacccatagctttttacagcaaatctcttggtcctaaagctgcagctcaatcaatttatgaaaaagaagccatggcaatattggaggctttgaagaagtggaggcattacttcctgggcagtaagctggttatcaaaactgaccaacaaagcttgaagcacatgatgaaccaaaggctggttgagggaattcagcacaagctgctgttaaaactgatggaatatgactatataattgagtataaggctggcaaagacaatgtggtggcagatgctctgtcaagacttccccaagatcagcttcaaactgaaatatgtaatgcaattacagtggttatacctaaatggatcattgatgttcaaaatagctatgaaggtgatgtgcaggctcacaaaattttgagtatgattggaaccaatagtgatcctgatcaacactacagttttgaaaatggaattttaagattcaagggaagaatatatgtcggtgaagagacctctatcagaactaacttaattagagattaccattgttctgcttttgggggtcattcagggatgagggcaacacatcatagaatcaaagctttgttttattggccaggtctcaagaagacagtggagatgttcatcagggagtgccctgtctgtcagatcactaaggtcgaacatatacatatacctggtctattaaatcctctagaggttctagacatggcatggacacatatcactatggattttatagaagggctgcctaagtcgaaatggaaagatgccatactagtggtggtggatcggttgacaaaatatgctcattttctggctttgtcacacccatacagtgtggaacaggtggtggagatatttatgaacaatatacaccgactgcatgggatgcctatggcaattatcatagatagagacaggatttttaccagccaactatttcaagaaatatttaaaagcatgaaggttcagctaagattcagtacttcataccacccacaaacagatgggcaaactgaaagagtcaatcagtgccttgaatcctatttgaggaacatgacatttcaggagccacatcaatggtattcttggctatccttggcaggatggtggtacaacaccacctatcatacatcccttcagatgacaccattccaagctctttatgggtatccacctccacaaatcaatgaattttcaatttcttgcaatgtgtctgctgaggcaaggacagaaaggagtctgaatgttggggacatggtgtacattaaactgcagccctacagacaaactgcatttggtatcaggggatcactgaagctgagatctaagttttatggaccatttaaggtactggagaagataggtcaagtggcctataaattacagctaccagaggatgccagtatacaccctgtgtttcatgtaagtcagttgaagaagcacttgggtcaaagagcagtgcctatgtctaatctgccttctatgggtcctgatggacagatcaaaacacaacctgtagctgtattgcagaggaggatgattcccagaaatggagtagcagtaactcaatggttgatactgtgggaaaatttgggaccagcagatgccacatgggaggatgctgctgtgattcaaagcatgtatccaacatttcatccttga

SEQ ID NO: 11670 - DNA, 1263 bp, Oryza sativa
  Clone ID: TFbOSC405185j.C1.o13.gm
atggaggaggatgaggaagaggatgacgagctcctcatggagatgaccagcgatgatgagctcctcttcctcaacggcatccacgttcggttggatttggagcgaacgctcaccacggcgcccatcaagctcagcgctccgttatgccaatcgctcgagtcgatggaggggaaattgttggagaagttggagttactcactcagaagatggaggctatggacgacaagatgacgaaacacggagggcggctcgatcaggccgtcgtcaaggtggatctcgctctggaggcggttgggaagctgcagcaagatcagcttcaggcggcgcggctgcaaaagagtttggcgtcttccgatcaaggtgttcaagagtctgattcccagactgaattatgtgctatttcttaccctcaaatattgaaatggcagaagggttgtgatatttgggctgctgttttgcttgaacctactgacaatgcagattctcagtccatttcagaagtagtagctccattactgtctgagtttgctgatgtttttcaagagcccaagtgtttacctcctcatcgcacttttgatcatgctatcttcttgtaccctgatgatgctcctgtcaacagtaaaccttacaggtattctcctttacaaaaggatgagattgaatgccaagtcaaggacatgattgattctggtctgaaatcagatgtggctaactttgttaagcagtgtcagatttgtcagcaggccaagtctgaacactgcaagctccctggcttgttaacaccattaccaattcctaaggaagcctgggtggacatatcaatggattttatcgaaggtcttcccaagtctgatggattcactgtcattcttgtggtgttgattaagtggtcttctttaccggcgcatcaggctacctgggaggattatgaagtgctcaagacccgctttccatcagcaccagcttggggacaagctgtttctccggcgggcggcaggctcgagaccatatcatgtcaaccaagattggttgatgtcccactcccaaacaatgcattgtctgctgttcaagctacaacatccgaagtgtcaaaactgatcatcccaaccaaccaatccttgcagctccatgatccaccctctccaaacgaaaggaccaagaagacgctgctggacagtcaaaaaagctgtcgcatgcggcacatcccttgtgtaatgaggatggccaagttagcgcaccaggacttcaggggcagcacctag

SEQ ID NO: 11671 - DNA, 5103 bp, Oryza sativa
  Clone ID: TFbOSC401078j.C1.o4.fg
atggcattcttcagcaactctggaagcagggctgattcaggagggtacaacctgaatgagaaggctgaggatgaagctgcctatgagtcagttggggacagggatgtcgacttgaactctaggcaatggaacttaaatgagaaggctgaggatgcctatcatagtgatgaggagcaatatgatggtggccggtcaggtccgaactcctcggagaataaatctgtgcagaatgcccggaaaataaatgggccttctggcccatggggtacaaactttttgaaggattgtggacccacacagacggctaaggaagagcaattgaccagtaacaggggaatggaatatgggtcggcggctagttcacatgacgacatggatgctagtggagaggatgatgagctgaaccgagggcatggggaggtgcctgctgaggaaatgctctctgatgactactatgagcaggatggagaggagcagagtgattcattgcttcgtggtgggatgcgccgcccaagctgttctacttctggggctgcagcagaatctgtctcctctagacaaaagaagaagccgacaaaatacaatgcttatgaggatgaagatgatgacgagtacaatgatgagaatgatgatgaagacgatgatgacgcagacgaagatgatccagacgatgtggattttgagccagaaagtgatactgaaaaggctgccgataaggataagtttgtggatagtgagaactccgacgaagaagaagatgatgagcttgagctctcagatgatgatgaagatgattttgttgagaataagaggcaatgtaagcgacttaaggttggtggaactaaaacctccaagggaagaaagcttcctgtacaggttcaacgcaaacgaggggtgtcttttacagatgaagattcttcaggaaaagactctgatgctcccagtgatactgatatcagtcaccgagcaaaaaaacccgacaagttgcatcagaaaactgtaggccgcaaggatgttttctcaaatgttgattctcatgaggttcgaacttctggaaggaggaggacagctagaaatatttcatatgctgaaagtgaagaaagtgatgatagtgaggaaaagttagctaagcaacaaaaggtcttgaaggaggacccagaagaggaagaaggggaaacaattgaaagaatcctttggcatcaacctaagggtgttgctgaagaggcactgaggaatggccaatcaactcaacctactgtgattagcttcacatcagatgtggatcaatcatgggatgatgtagaattctatataaaatggaagggccaatcattcttacattgccagtggaagacattatctgagctccaaaacgttagtggatttaaaaaggttctaaattacatgaaaagagttactgacgagctgaggtacaagcgatcgttatcacgtgaggaggttgaggtgcatgatgtgggcaaggaaatggagctggatcttattaaacagtacagccaggttgaacgcatatttgctgatagggttagcaaagttgatggcgatgacctggtgccagaatatttagtcaaatggcaaggacttccttatgcagaatcaacctgggaaaaagatacagatattgaatttgctcaggatgctattgatgagtacaaggcccgtgaagctgcaacatctatactcgggaaaacagttgatttccaaaggaaaaaaagcaaagctagtttgcggaggcttgacgaccaaccagaatggctaaaaggaggcaaactacgtgattaccagcttgaaggcctaaacttccttgttaatgggtggagaaatgacactaatgttattcttgctgatgagatgggtctgggaaaaactattcaatctgtctccatgctgggtttccttcataatgctcaagaaattaatggtccgtttcttgtggttgttccactgtcaacattgtcaaactgggcgaaagaatttcggaaatggctacctgacatgaatgttgtggtttatgtgggaaatcgtgctagcagagagatctgccagcagcatgaattttttacaaataagaagggtggtcgacatgtaaaattccatacattgataactacttatgaggtcatacttaaggacaaagctgccctttccaagatcaaatggaactatcttatggtcgatgaagctcatcgattaaagaattgtgaagcatcgctgtatacgactcttttggaattcagcactaagaataagcttctcatcaccgggaccccattgcaaaacagcgttgaagagctctgggcgttacttcatttccttgatccatctaaattcaacagcaaggatatatttgttgagagatacaaaaatttgagttccttcaatgaaactgagcttgcaaatcttcacaaggaattgaggcctcatattctaagacgagttataaaagatgtggagaaatctttacctccgaaaattgagcggattcttcgtgttgatatgtctcctctacagaagcagtattacaaatggattttggagcggaatttccagaatctcaacaaaggagttcgtgggaatcaggtctcgcttttaaatatcgttgttgagttgaaaaagtgctgcaaccacccatttttatttgaaagtgctgatcatggttatggtggagatagcattggtgatcgcaataaagttgaacgcattgttatgagtagtgggaaattagtgttattggacaagctgttgatggttaggatgttggacatccttgctgagtatctatccctccgaggattccagtttcagaggcttgatggcagtacgagagcagatcttcgtcaccaggccatggagcattttaatgctcctggaagtgatgacttctgttttcttctgtctacacgtgctggtgggcttggtattaatcttgcaacagcagataccgtgatcatttttgattcagactggaatccgcaaaatgatttacaggttcttgatcacctagtgattcagaagctaaatgctgagggcaggctcgagaagaaagaatcaaaaaaaggtggttccatgtttgacaagaatgaactttcagcgatattgagatttggagcagaagagttattcaaagaagataagactgatgaagagaccaagaagaagcttgaaagcatggacattgatgaaattctcgagagagctgagaaagttgaaacaaagggtggtgaaggggaggaaggaaatgaacttcttagtgcattcaaggcatgttctgtgcactaccatatgacctgtgattcagacatcatgcttaaattctatacttctgttgccaacttttctagtggtgaggatgatgccacattctggagcagattaattcaaccagatgcttcagatatggttgaggagactttagcacctcgtgctgcaagaaataagaagagctatgttgaagatcaccaacttgataagaatagcaacaggaaaaggcgaggaatcgatgcacaagaaaagccaaggaggcgttctagcagaacaatggacacagctgtgtcattaccactcatagatggttcagcacatcaagtacgagaatggtcatttggaaatttgtcaaagaaagatgctacccgatttgttcgagcggttaaaaaatttggaaacccaagccaaattgggttaatcgtggatgatgttggtggtgcaatagcaaagtcttcggttgatcaacagcttgagctgtttactctactcattgagggttgtcaagatgctgttaaaaataatatggatgccaagggcacagtgttggatttttttggtgtagcagttaaggcgcatgagttgatagcccgtgtggaagagctacagttcctggcaaggcgcattgcacgttacaaagatccagttagacaataccggatccaggcaccttacaaaaagccacagtggtcagcaagctgtggttggactgaaactgatgatgcaagattgatggttggaattcattggtatggctatggaaattgggagaagatacgattagatccaaaacttagcttgacagcgaaaattgcaccagcaacccttggtgaacgagagacgtttttaccgcgtgcaccgaacttggataatcgtgctagtgctcttctacaaaaggaatttgccaatcttcgtggtaagagctcgaaagccaagggaggtcctcgtcaagcaattgataatgaaagcaatggtggagctcgttcattaagaggccggcaaaaagacacaaaaataaaagaagataataattcaattaaagatgactttaagaaacgcaaggtggtggaacctgaagcaagggaagaaggtgaaatttcagaatctgaagcagagactaaatatcgtcaggacaaggaagaaaagtggctggaatggtgttctgaagttttggatgacgagcaggagatattaaagcggctggataggcttcagaatactagtgtaaatctgccaaaggaaaaggttctttcaagaattcggaaatacctccagataattggtaataaaattggagagatcgttgatcaacatagtgaatcatataagcaatcacgtatggcaatgaggttgtggaactatgtggcaaacttttcaagtatgtccggggagcaattgcacgacctctatttaaaacttagtcaggaccaaatggaagctggagtaggtccgtcacatggtgggaattttgcatcagtccctcccaacagggggcctaaatcaaatcagctccatccttccagaaaccaaaggtcaacaaggtctgtccagtacgtctctgagtctttcaacaatggtgaaaacactgggaattctgaagcctggaagcgacggagaagatctgagcctgataatcaatttgataaccaacctttgtatcaggctcctccaatcatgacaaatggaaacaggttacaggaatctagcagttctgctggtattcttggttgggctccggttgaaatgagacgatacggcaatgaaagaccaaaaagaggtgttcatcccagtcgttttccacccgggcatgggcctttgctgtag

SEQ ID NO: 11672 - DNA, 3303 bp, Oryza sativa
  Clone ID: TFbOSC400825j.C1.o42.fg
atgagcagcctggtggagcggctgcgggtgcggtcggagaagcggccgctgtacacgctcgatgagtccgacgatgacctcccgccgcgcggcgggggcgggaaggggagggatcggcacagcgacggccccaccgagcggatcgagcgggaggacgcggttagccctcttacggaaatggaaaagatattagactgtgaagaaacaaaacctgatgcttctgaagagactagttcttctgagtccggatcaaagaagaaacctgtcaaacgatatcttataaaatggaaaggaatatcacaccttcactgcacttgggtttcagaaagtgaatatttggaaactgccaagatatacccccggctgaaaactagactcaataacttccataagcaaatggattcaacggataagtctgatgatgactattctgcaattagacctgagtggactactgttgacaggatccttgctaccagaaaaagctctactggtgaaagggagtactatgtgaaatggaaggaactaacatacgacgaatgtacttgggaaaatgactccgacattgcagtctttcagcctcagattgaacgcttcaatgagattcagtccaggaggaagaagtctactgacaagtgcaagagtgtcactcgtgagatacgtcaatataaggagagcccgaagtttctctctggtgggacactacatccctaccagcttgaagggttaaacttcttacgctattcttggtaccataataaacgtgtaatacttggggacgagatgggtcttggtaaaacgatacagagtattgcctttttgggctctctatttgtggacaagcttggtcctcatctggtcgttgcacccctttcaaccttgcgaaattgggagcgtgaatttgcaacttgggcacctcaaatgaatgttgtaatgtattttggatctgcagcttctcgtgaaattattaggaagtatgaattttactaccccaaagagaaacctaagaagcttaagaaaaagaaatcatctccatctaatgaagacaagaaacaatcaagaataaaatttgatgtccttttgacatcttatgagatgatcaatatggattctactgttctaaaaaccatagaatgggaatgcatgattgtggatgaggggcatcgtttgaagaacaaagattccaagttgttcggtcaacttaaagagtatcatactaagcatcgtgttctcttaacgggaaccccagttcagaacaacctggatgaacttttcatgcttatgcacttccttgagggtgacagttttggtagtatagctgatctccaagaggaattcaaggacataaaccaggacaaacaagttgagaagctccatggaatgctgaagccgcatcttcttcggcgattcaagaaagatgttatgaaagaacttcctccgaaaaaggagctgattttacgtgttgagcttacaagcaaacaaaaagagtactataaagcaattctcaccaagaattatgaagtgttaactcgtcgtagtggtggacatgtttcacttattaatgttgtaatggaactacgcaaactttgttgccatgcattcatgacagatgaacccgaagagcctgccaattcagaagaagctttaagattttctgatgtcattaacattttaattccactaccagctttttattactttcaaacacatattgatgcagaggtactggagttctctgatatctcttgctgttatcttttcatttcacgtcttaacaaacacaatgccatatttgaagttgttgacatctggaggcttttagaatcttctggaaaaatggagctgcttgacaagatgatggtgaaactgaaagagcagggtcacagggttcttatttattcacagttccagcacatgttggacttacttgaggattatttaagctaccggaaatggagttatgagcgtattgatggaaaaataggtggtgctgagaggcagatacgaattgatcgcttcaatgctaaaaattctactaggttttgctttcttctttcaaccagagctggtggtcttggtataaatctggcaactgccgatactgtaattatttatgacagtgattggaatcctcatgctgatttacaagctatggcgagagcccatcgcttagggcagacaagcaaggttatgatatataggcttgttagtcgtggtacaattgaggagcggatgatgcaacttacaaagaaaaaaatggtattggagcacttagttgttgggcgtctcacgaaaggcactaatattgtccaggaggagttggatgatattattcggcatggctcaaaggaactttttgacgatgaaaatgatgaagccggaaaatcttgccaaatccattatgatgatgctgcgattgatagattattggaccgtgaccaagctgacggggaagagcctgtggaagatgaagaagaagacgaatttctaaaaggattcaaggttgctaactttgagtacatagatgaagctaaggctttagctgcaaaagaggaggaggcacgcaaaaaggccgaagctgaagctgcaaactctgacagagcaaatttttgggataaattattgaaggacagatacgatgtacaaaaagttgaagagcatactactatgggaaaaggaaaaaggagccgcaaacagatggctgctgctgatgaggacgacattaccggcctgcatgacatgagttctgaagatgatgattactcttatgatgatgatgtgtcagataacgacacaagtttacaatcaggccttgctgggaggaggggcccatattccaagaaaaaacaacgtagtaatgttgattcacttccattcatggagggcgaaggacgggctttgagagtttatgggttcaaccaaattcagcgaacacaattccttcaaacgcttatgagatatggttttcagaactacgattggaaggaatttactcctcgattgaaggggaaaagtgttgaggaaatccagagatatgctgaacttgtcatgatccatcttcttgaggacatcaatgactcaggatattatgcagatggcgtgccaaaggaaatgcgcacagatgagacattggtcaggctagccaacatatcacttgtggaagagaaggtggctgccatggaacaaggaaaaataacaaaactctttcccagctatttgttatatgaatttcctagcttagttggtggaagagtatggaaagcggaacaggatctactgttgctgaaagcattaataaattga

SEQ ID NO: 11673 - DNA, 4095 bp, Oryza sativa
  Clone ID: TFbOSC412868j.C1.o3.fg
atgagcagcctggtggagcggctgcgggtgcggtcggagaagcggccgctgtacacgctcgatgagtccgacgatgacctcccgccgcgcggcgggggcgggaaggggagggatcggcacagcgacggccccaccgagcggatcgagcgggaggacgcggttagccctcttacggaaatggaaaagatattagactgtgaagaaacaaaacctgatgcttctgaagagactagttcttctgagtccggatcaaagaagaaacctgtcaaacgatatcttataaaatggaaaggaatatcacaccttcactgcacttgggtttcagaaagtgaatatttggaaactgccaagatatacccccggctgaaaactagactcaataacttccataagcaaatggattcaacggataagtctgatgatgactattctgcaattagacctgagtggactactgttgacaggatccttgctaccagaaaaagctctactggtgaaagggagtactatgtgaaatggaaggaactaacatacgacgaatgtacttgggaaaatgactccgacattgcagtctttcagcctcagattgaacgcttcaatgagattcagtccaggaggaagaagtctactgacaagtgcaagagtgtcactcgtgagatacgtcaatataaggagagcccgaagtttctctctggtgggacactacatccctaccagcttgaagggttaaacttcttacgctattcttggtaccataataaacgtgtaatacttggggacgagatgggtcttggtaaaacgatacagagtattgcctttttgggctctctatttgtggacaagcttggtcctcatctggtcgttgcacccctttcaaccttgcgaaattgggagcgtgaatttgcaacttgggcacctcaaatgaatgttgtaatgtattttggatctgcagcttctcgtgaaattattaggaagtatgaattttactaccccaaagagaaacctaagaagcttaagaaaaagaaatcatctccatctaatgaagacaagaaacaatcaagaataaaatttgatgtccttttgacatcttatgagatgatcaatatggattctactgttctaaaaaccatagaatgggaatgcatgattgtggatgaggggcatcgtttgaagaacaaagattccaagttgttcggtcaacttaaagagtatcatactaagcatcgtgttctcttaacgggaaccccagttcagaacaacctggatgaacttttcatgcttatgcacttccttgagggtgacagttttggtagtatagctgatctccaagaggaattcaaggacataaaccaggacaaacaagttgagaagctccatggaatgctgaagccgcatcttcttcggcgattcaagaaagatgttatgaaagaacttcctccgaaaaaggagctgattttacgtgttgagcttacaagcaaacaaaaagagtactataaagcaattctcaccaagaattatgaagtgttaactcgtcgtagtggtggacatgtttcacttattaatgttgtaatggaactacgcaaactttgttgccatgcattcatgacagatgaacccgaagagcctgccaattcagaagaagctttaagattttctgatgtcattaacattttaattccactaccagctttttattactttcaaacacatattgatgcagaggtactggagttctctgatatctcttgctgttatcttttcatttcacgtcttaacaaacacaatgccatatttgaagttgttgacatctggaggcttttagaatcttctggaaaaatggagctgcttgacaagatgatggtgaaactgaaagagcagggtcacagggttcttatttattcacagttccagcacatgttggacttacttgaggattatttaagctaccggaaatggagttatgagcgtattgatggaaaaataggtggtgctgagaggcagatacgaattgatcgcttcaatgctaaaaattctactaggttttgctttcttctttcaaccagagctggtggtcttggtataaatctggcaactgccgatactgtaattatttatgacagtgattggaatcctcatgctgatttacaagctatggcgagagcccatcgcttagggcagacaagcaaggttatgatatataggcttgttagtcgtggtacaattgaggagcggatgatgcaacttacaaagaaaaaaatggtattggagcacttagttgttgggcgtctcacgaaaggcactaatattgtccaggaggagttggatgatattattcggcatggctcaaaggaactttttgacgatgaaaatgatgaagccggaaaatcttgccaaatccattatgatgatgctgcgattgatagattattggaccgtgaccaagctgacggggaagagcctgtggaagatgaagaagaagacgaatttctaaaaggattcaaggttgctaactttgagtacatagatgaagctaaggctttagctgcaaaagaggaggaggcacgcaaaaaggccgaagctgaagctgcaaactctgacagagcaaatttttgggataaattattgaaggacagatacgatgtacaaaaagttgaagagcatactactatgggaaaaggaaaaaggagccgcaaacagatggctgctgctgatgaggacgacattaccggcctgcatgacatgagttctgaagatgatgattactcttatgatgatgatgtgtcagataacgacacaagtttacaatcaggccttgctgggaggaggggcccatattccaagaaaaaacaacgtagtaatgttgattcacttccattcatggagggcgaaggacgggctttgagagtttatgggttcaaccaaattcagcgaacacaattccttcaaacgcttatgagatatggttttcagaactacgattggaaggaatttactcctcgattgaaggggaaaagtgttgaggaaatccagagatatgctgaacttgtcatgatccatcttcttgaggacatcaatgactcaggatattatgcagatggcgtgccaaaggaaatgcgcacagatgagacattggtcaggctagccaacatatcacttgtggaagagaaggtggctgccatggaacaaggaaaaataacaaaactctttcccagctatttgttatatgaatttcctagcttagttggtggaagagtatggaaagcggaacaggatctactgttgctgaaagcattaataaagcatgggtatgcaaggtggcaatatatatcagatgacagagataatgggatttttgaggctgcacgacaagagctgaggcttcctactgctaatgaactgattagttctcactcaaacaatgagacaaacggaaatctggaaagcacacaagaaggccagtcgaacccaacgagcatgatccattacagggatacacagagaaagatagttgagtttattagaaagagataccatcttttggagagatgtttgaatcttgaatacgctgtgattaaaacaaaaacccctgttcctgatgatctcgctgaacaagattttcctggtggtcatagaccggccgttccagactacagtgaaatgctgagagaattgcctgtccttgaacctatttccaaagaagtggcgcctgaaggcacaactgatcagtcacaagtttcccatctttacaacaagatgtgctttgtccttgaagacagtgctgttcctgcactcaactcgcatttcggtgacaaggcagcttcctccggtttagccaatagcctccataagtttgaagctgtatgcgaagacgttagtcgcatcttgagatcccatgaaaatggtaccactcccaaagaggaagttatgctagatgcaagctccaaagagaccacgtctccaaaagatccagcaaccgaggtgccttcgtcagcttccaaagaagctacgcctccagtacaagatccagtcatagaggcagtgaaggaggagccacccactgttaaggcggaggacaaaatggaaatcgatagttaa

SEQ ID NO: 11674 - DNA, 480 bp, Oryza sativa
  Clone ID: TFbOSC423269j.C1.o6.gm
atgccgcggggaatatctcgcctcaacgacggcgacgtcgtcgagttctccgtcggatccggcaacgacggccgcaccaaggccgtggacgtcaccgcgccggggggcggggcgctcaccggcggatcccgtcccagcggcggcggggaccgcggctacggcgggggcggaggcggcggccgctacggcggtgaccgcggctacggcggcggtggcggcggctacggcgggggcgaccgcggctacggaggcggcggcgggtacggcggcggcggcggcggaggcagccgcgcgtgctacaagtgcggcgaggagggccacatggccagggactgctcccagggaggaggcggcggtggtggctacggtggtggtggcggcggctaccgcggcggtggtggtggcggcggcggcggcgggtgctacaactgcggcgagaccggccacatcgctcgcgagtgccccagcaagacctactag

SEQ ID NO: 11675 - DNA, 726 bp, Oryza sativa
  Clone ID: TFbOSC102138j.C1.o12.fg
atggcggcggcggcgaggcatcgggggacggtgaagtggttcaacgacaccaaggggttcggcttcatctcccccgacgacggcagcgaggatctcttcgtccaccagtcctccatcaaggccgacggcttccgctccctcgccgagggcgagcaggtcgagttcgccatctccgagagcgaggacggccgcaccaaggccgtcgacgtcaccggccccgacggatccttcgtcaagggcggcgccggcggcggcggcggtggcgggggaggcttcggatcgcgcggtgggggcggatctggcggtggcggccgcagctatggcggtagctggggcggggggaggagatccggcggtggtggacccggtgggggctgcttcaagtgtggggagtctggccacatggccagggactgcttcaacggcggcggtgtcggcgttggtggaggcggtggcggcggcggcggcgctggtggtggctgcttcaagtgcggcgagatgggccacatggctagggactgcttcaacagcggtggtggtggaggtggtggtggtggcggcggcggcggcggcgcctgctacaactgcggcgagaccggccacctcgcgagggactgctacaacggcggcggtggaggcggaggcgggcgattcggcggtggaggcgaccgctcctgctacaactgcggcgaggctggacacatcgcccgcgactgccacaagtga

SEQ ID NO: 11676 - DNA, 633 bp, Oryza sativa
  Clone ID: TFbOSC401232j.C1.o22.gm
atgcgcggcgcagcgctgaatgctgggtgtactgcctgtctgctgccgtcggtggatggagcaggtcgctcgtcgctgctgttgctgcagggcggtggcagcggctggccagcgaagcggggcggcgagcggcttctagggctcggcggtgagggcaagatggtgtcggagagggtgaaggggacggtgaagggttttgacgccaccaatgggttcggcttcatcactcccgacgacgacggcgaggacctcttcatccaccagtcctccctcaagttcgacgactatcggagcctcaatgacagcgatgtcatcgagttatccgtcggatccggcaacgacggccgcaataaggccgtggacgtcaccgcgctaggcggcgacacgcacaccggcggattccgtcccagctgcgccgttggagctcgacgccctctgccctccaccgctgctcccctctcctcggccctcaacagcgtgcgctgtgccgtcatccgttcgccaccaccgtcgttgtataccattggccgtgccgttgttgttgtccaccatcagccgctcgttgtcgtcctcaccactagtgctgaaagaagatttggggaagaagtgttggatcggatgcgagggggctaa

SEQ ID NO: 11677 - DNA, 360 bp, Oryza sativa
  Clone ID: TFbOSC411506j.C1.o5.hg
atgaaggggttcgacgccaccaatgggttcggcttcatcactcccgacaacggcggtgaggacctcttcgtccaccggtcctccctcaagttcgacagctatcggagcctcaatgacggtgatgtcatcgagttatccatcggatccggcgacgacggccgcactaaggccgtggacatcaccgcgctaggcggcggcgcgcacaccggtggatcccgtcccagctgcggccagatccctacggctgcaagccgccgtctctcgacgtcccctcgttgtctcctggcccttgatgtgttgctgcttcctgctccgcgtcgatcgccaccactcgtcatcccctcgtcgtctcccggctag

SEQ ID NO: 11678 - DNA, 594 bp, Oryza sativa
  Clone ID: TFbOSC401879j.C1.o14.fg
atggcgtcggagagggtgaaggggacggtgaagtggttcgacgccaccaaggggttcggcttcatcacccccgacgacggcggcgaggatctcttcgtccaccaatcctcgctcaagtccgacggctaccgcagcctcaacgacggcgacgtcgtcgagttctccgtcggatccggcaacgacggccgcaccaaggccgtggacgtcaccgcgccggggggcggggcgctcaccggcggatcccgtcccagcggcggcggggaccgcggctacggcgggggcggaggcggcggccgctacggcggtgaccgcggctacggcggcggtggcggcggctacggcgggggcgaccgcggctacggaggcggcggcgggtacggcggcggcggcggcggaggcagccgcgcgtgctacaagtgcggcgaggagggccacatggccagggactgctcccagggaggaggcggcggtggtggctacggtggtggtggcggcggctaccgcggcggtggtggtggcggcggcggcggcgggtgctacaactgcggcgagaccggccacatcgctcgcgagtgccccagcaagacctactag

SEQ ID NO: 11679 - DNA, 822 bp, Oryza sativa
  Clone ID: TFbOSC401093j.C1.o13.fg
atgtcgtcgccgttcctgggctcttcttcctcttccgcttcgtcgcccctctcttacctgaccccgcctaggcctcctcctcctcctcctccccttctcatggtacgtcacggattagctcgatggttgactgatcttgacgatgagctgatggtgttcgacgacgatcttggcgtgcaggggcagggatacgccgctgctgccaatggcggaattggcggcggcggcgtcgaggcggtgaacgcggcggcggcgccgaggcagggtggcaggcacgccgggcacccgccgctgccgaggccgccgccgaggcagtgcccgcggtgcggctcggcgaacaccaagttctgctactacaacaactacagccgcacgcagccgcggtacctctgcaaggcgtgccgccgccactggacggagggcggcacgctccgcgacgtccccgtcggcggcggccgcaagaacagcaagcgcgccgccggcggaggcaaggccggcgccacagcctcgacggcggcttctgcccatgtcgtcgcgccggcggcggcgccgccgacgtcgtcgtcgttccccgatctcctgaggcagatgctgatggcgccggctaccgccggtggcggaggcggctacagcatcgacctgaccgcgtggcagcaaatggcggcgttcgcggctccacctcaggccgccaccggcgatgtcggcggcgcggtcggagcggcgtcgacggcggcgccggacgcgaactgcggcggcggcggcgtgcagtactggaacgggtggctgcaagatgacatgcccggtctagatggttcatgttaa

SEQ ID NO: 11680 - DNA, 1542 bp, Oryza sativa
  Clone ID: TFbOSC400138j.C1.o15.fg
atgacaacgaggaggacaagaaaggagagaaaacaaatgggagggggtggtaagtgcaaaagagggaaaagaggaaagattgcagccaagcgaagaaggggccaggtgcggtgttgcagcagcagcagcagcagcggaggcgcaagaagacgagctagagagagagaatcagaggagagcttgggtgagatgggtgagtgcagaggaggaggaggaggaggagatgggctgatcaagctgttcgggaagacgatcccggtgcagccggatgccaagtttttgattcttggctctgcgtctcttggggaattttcggatgttcagcagcatagtggcagtagcagcagctcaaccgaatccgacgtccaagaaaccgccgctgtcgccgtcgccgacccctccccgcggtcggaggtcgtcgacggcgagagcccgccgcagccgggcggcgaggcggcgagccatcagcagcagcagaaggagatgaagctgaagaagccggacaagatcctgccatgcccgcggtgcagcagcatggacaccaagttctgctacttcaacaactacaacgtcaaccagcctcgccacttctgcaagcactgccagcgctactggaccgccggcggcgccatgcgcaacgtccccgtcggcgccggccgccgcaagaacaagaacgccaccgccgccgcccacttcctccaccgcgtccgcgcctgcgccgccgccgccgccatgcccgcggcgccccacgacgccaccaacgccaccgtgctcagcttcggcggcggcggaggcggacacgacgcgccgccggtcaccctggacctcgccgacaagatgacgcgcctcggcaaggaggggctcgtcgcccatgcccggaacgccgacgccgccgccgcgtgcagcgaggtgtcgagcaacagggacgacgagcagatcggcaacactgtagcaaaacctgcaaacgggttgcagcagcatcctcctcctcctcatcatcatcatcattcagccatgaacggtggcggcatctggccctactacacctcggggatcgcgatcccgatatacccggcggcgccggcgtactggggctgcatgattccacctcctggagcttggagcctcccatggccggccacagtccagtctcaggccatctcatcatcatcaccacctacaagtgctacaccttcagtctcctccttcacactaggcaagcatcccagagagggtggtgatcatgaggcaagagatcaccatggcaatggtaaagtgtgggtgccgaagacgatccggatcgacaacgccgacgaggttgcccggagctcaatccggtcactcttcgccttcagaggcggcgacaaggcggatgataacaacgacgacgatggcaccggcgtgcacaagctcgccaccacggtgttcgagccaaagagggacagcaagacggcgaaacatccggcgatcacgagcttgccgctcttgcacaccaaccccgtcgcgcttacccgatccgcgaccttccaggagggatcttga

SEQ ID NO: 11681 - DNA, 957 bp, Oryza sativa
  Clone ID: TFbOSC401827j.C1.o1.fg
atggccgccgccgggatccttccggtgagtggtggcggcggcgcctcctcggcgcggccggtgtcgatggcggagcgcgccaggatggcgaagatcccgcagccggagccggggctcaagtgtccgcgctgcgactccaccaacaccaagttctgctacttcaacaactactccctcacccagccccgccacttctgcaaggcttgccgccgctactggacccgcggcggcgccctccgcaacgtccccgtcggcggcggcttccgccgcaacaagcgcggaaccaagccctctaactccaagaagcccgccgccgccgtcgccggcggcgtcatggcgccgccgcatgcgcagctgcagctccctttcgggtttgatggcggcggcggcggtggccatggtagtatcatcggtggtggtggtggtggtggcgcgtcaaggttagggtttccggagctcagctcgctgcacgcggctgccgccgtcgactaccagctcggcggcggcggcggcggcgacggcctcgggctcgaacggcagcgcctcccgcacttcccgttcttagcccgatccaacgccgcagtccatccaccgccgctgatgtccaccgccgccggggtatcgtatccatttggcgacgtcgcggcgggcggccttggcggcgacatgccggccaacgccgccagcgtcgccggctccgccgggctcatcacgcagatggcctcggtgaagatggacgacatcgacaaccacccaccaccgtctgcggcaacgacgacggcgagctcgccgattgagttcctcggtctccgtggaagcttgcagttctggggaggcggcggcggccaccgtggcggtggtgatggtgccggcggcagtgctgctcccggcggcggcggcggcgggtggtccgacctgccggcgtttgacttgtcaacgtctggaaatatactgtga

SEQ ID NO: 11682 - DNA, 1317 bp, Oryza sativa
  Clone ID: TFbOSC401231j.C1.o3.fg
atgaggatcagtgaagaaaagccatgcacagatcaggagttagatgctgatcagatgaatagttctagctttaatagttccagcgagtgtgagaatcaaacacctagcaatgatgaaatgactggatcagagtccaaatctgaggcagctcaaacagagggtggtggatcgagtgaagagaaggtcctgaagaagccagacaagatcctgccttgtcctcgttgcaacagcatggatacaaagttctgctactacaacaactacaacattaaccagccaagacatttttgcaagagttgtcagagatattggacggcaggtggaagcatgaggaacctccctgttggtgctggtaggcgcaagagtaagagctccactgcaaattaccgcagtatattaatcacgggcagcaatctagctgctcctgctggagatgctcccctctatcaactctctataaaaggagatcaaacagcaacggcagttaaatttgcacctgattccccactctgtaattccatggcctctgtgctgaaaattggagagcagagtaagaatgccaagcctacctcaacagcacaacccagaaatggagaaacccagacctgcccggcttcaggaacaacttcagatagtccccggaatgaaccagttaatggagcagttagtgggcatcaaaatggaattgttgggcatagtggagtccctcccatgcatcccataccatgcttccctggtcctccttttgtgtacccatggagtccagcatggaatggcattcctgccatggcaccaccggtatgcacagcaccagctgaaccagcaaattcttcagacaatggaagcacagctagtgttcagtggagcatgccaccagtgatgccggtaccaggatactttccggtaattccatcttcagtttggcccttcatttctccctggccaaatggtgcatggagctcgccatggattcaacctaattgcagcgtgtcagcttcatctcctacaagcactagtacatgttcagacaacggctctcctgtcctaggaaagcactccagggactccaaaccgcaaggagatgacaaggcagagaaaaacttgtggattccgaaaacgcttcggatcgatgatcctgacgaagctgcaaagagctcaatctggacaacccttggcattgaacctggtgaccgtagcatgttcagatcattccagtcgaaacctgaaagcagggagcagatatccggtgctgcacgagtcctgcaggcgaatccagcagctctatctcgatctcaatctttccaggagacaacgtga

SEQ ID NO: 11683 - DNA, 1167 bp, Oryza sativa
  Clone ID: TFbOSC401894j.C1.o43.fg
atggaggagatgctgatggcagcgaacgcggccgccggcgcgaatccgaatccggcggcgacggcgccgtcgtcggtgactgggggcgcactgaggggcggcggcggcggcggcgcgccgccggtggcaggtggcgcgggggcgggtagcacggagcggcgggcgcggccgcagaaggagaaggcgctcaactgcccgcggtgcaactcgacgaacaccaagttctgctactacaacaactacagcctccagcagccgcgctacttctgcaagacgtgccggcgctactggacggagggcggctcgctccgcaacgtccccgtcggcggcggctcgcgcaagaacaagcgctcgtcgtcgtcggcggcatcggcgtcgcccgcgtccgcctccacggcgaattccgtcgtcacgagcgcgtccatgtccatgtccatggccagcacgggcggcggggcgtccaagaacccgaagctggtccacgagggcgcgcaggacttgaacctggcgttcccgcaccacggcgggctgcaggcgccgggggagttcccggcgttcccgagcctggagagcagcagcgtgtgcaaccccggtggcccaatggggaccaacggccggggcggcggcgcgctctccgcgatggagctgctccgaagcaccggctgctacatgccgctgcaggtgccgatgcagatgccagcggagtacgccacgccggggttcgcgctcggtgagttccgcgcgccgccgccgccgccacagtcgtcccagagcttgctcgggttctcgttggacgcgcacggctcggtgggcgggccatccgccgcggggttcggctccagcgcggggttgcaaggcgtgccggagagcacgggcaggttgctgttcccgttcgaggacttgaagccgacggtcagctctggcactggcggtggaggcgcaagcggcggcggcgccggcgtagacggcggccatcagtttgatcacggcaaggagcagcaggccggtggcggaggcggcggcccaggcgggcacgacacgccggggttctggaacggcatgatcggcggcggcagtggcacttcttggggcattgtgaagcgaaggatgaagggaaggactcggttggggaggaagaaagaaaaatggacccccatcaccatgcat

SEQ ID NO: 11684 - DNA, 387 bp, Oryza sativa
  Clone ID: TFbOSC414619j.C1.o1.fg
atgcaggagttccaccccgtccccgggctggccggccggctgttcggcggcgcggcggcggcggcggctgtggcggcggtggaggaggtgcggtgcccgcggtgcgactcgtcgaacaccaagttctgctactacaacaactacaacctctcccagccccgccacttctgcaaggcgtgccgccgctactggaccaagggcggcctcctccgcaacgtccccgtcggcggcggctgcctcaagcccaaacgcccggcgccgccagagtttttctttcttcaccgggggggggggattagtctcttacttgccactcagactgattgcgtactttctgcttgtttgactgtatctggggacagttcacgattcgcattcgtgatgttg

SEQ ID NO: 11685 - DNA, 648 bp, Oryza sativa
  Clone ID: TFbOSC400431j.C1.o37.fg
atggaggtggcggaggggaggacggtggcggcggcggcggcaggtggtggaggattgggaggaggggcgaggacggaggcggaggggttggcgtgcccgaggtgcgagtccaccaacaccaagttctgctactacaacaactacaacctggcgcagccgcgccacttctgcaaggcgtgccgccgctactggacgcgcggcggcgcgctccgcaacgtccccgtcggcggcggcacccgcaacaaggtcgccccggcgccgtgcaccggccgccgcaagcgcgccgcccacgccgcgcacgccgcggcgccgccgccgacgacgacggcgtcgtccgcgccgctgccgctcatgccgccggcggtggcgtacgagctgccgttcctgccgccgccgccgccgctgccgctggcggccgtggaccccgaccgccgcctgctcgacctcggcggcagcttcacctcgctgctcgcgccggcccagctgcacaacggccacttcaccaccggcttcctgctgggcaccatgtcgtcggcgccgccgccgccgccgccgccggccacttctacaccgtctcccgcgccggccgcacacccgccggtgtcggacagcatctgggccatggggtggccgcacctctccatctag

SEQ ID NO: 11686 - DNA, 831 bp, Oryza sativa
  Clone ID: TFbOSC413680j.C1.o1.fg
atgcaggagcagcagccggagaccggccgccggccggcgcagcagttcgccaccgtcgacctgcgccgtcccaagggctacgcggcggctcccgcgacgccacagcctggttcggctgcgactgctgctgccgccgctggcccggctgcgacggcggcagcggcggcggcgggggagggtgacccgtgcccgcggtgcgagtcgcgggacaccaaattttgctactacaacaactacaacacctcccagccccggcacttctgcaagtgttgccgccgctactggaccaagggtggcacgctccgcaacgtccccgtcggcggcggcacgcgcaagaagtcctcgtcttcgtcgtcgtcgtcttcctcgtcatccgccgccgccgcagcacccgccgccaagcgccagaagacgtcgaagaagcgccgcgtcacgactcccgagcccctcgccgccaccacccccgtcctcaccgaagccgccgctgactccgccgccaagacgacgaccgaagctacgtcggagaagaagacgacgacttccacaacgacgacgacaccgccggcgcctgacaccacgagcgagatcaccacggagctcgtcgtcccggccgtggaggaggactcgttcacggacctcctgcagccggactccgccgccgtcaccctcggcctcgacttctccgactacccgtccatcaccaagagtctggccgacccggacctgcacttcgagtggccgccgccggcgttcgacatggcgtcctactggccggccggcgccgggttcgccgacccggacccgaccgccgtgttcctcaacctcccatga

SEQ ID NO: 11687 - DNA, 1296 bp, Oryza sativa
  Clone ID: TFbOSC415629j.C1.o30.gm
atgatcttcccccctgccttcctggattcctcgagctggaatgataacaacaacaacaaccacaaccagcagcagcagcagcaacatgctcacggccaccaccagcatcatcaggtcgccgccggttgtggaggcggcggcggcggcggcgacggcaatagccatgagcttctgcagcagcagtcaatgattccgggcacgcttgccgatggcggcggcggaggcggcgcggtggggccggcgaagccgatgtcgatgtcggagagggcgcggctggcgaggatcccgctgccggagccggggctcaagtgcccgcgctgcgactccaccaacaccaagttctgctacttcaacaactactccctctcccagccccgccacttctgccgcgcctgccgccgctactggacccgcggcggcgcgctccgcaacgtccccgtcggcggcggctaccgccgccacgccaagcgcgccaagcccaagccggcgtccgcggcgggctccgcctcagccgccaccaccaccgccggctcgacgccagcggggtcgacgacgacgacgacgacgtcctccacctgcgccacgcccaacgcgcccgccctcccggcgatgctgggcggcaacctctccatcctgccgccgctgctccgcctcgccgacttcgacgccatgagcctcggctccaccttctctggcatggcggcggccgccggcaagccaccgcccgtcgacgcggccggctgctactccgtcggcgccgccaccggcctcgagcaatggagactacagcagatgcagagcttcccgttcttccacgccatggatcaccaggcggcgatggcggcgccaccgccggcaatggcaatgccggggatgttccagctaggcctagacggcgacggccatggcagcggcggcggcgaagacggtggagagctccaccatgcgatgccatcatcgaagagagaaggctacccaaggggcatgtatggcgatcatcacctcgctggaggatacacctcctactccagtgcaaccacagtcttcgtcgttgtgttggtgatggtgtgtgcatggaagtttgagaagtgcactgagaaagaggaagaagatgagctgaagaaggaagtgcatgctctggttcagtggtggaaccggctgggccaaaaggaggaggagtcgcagacaggccgcagcgtcgcgtcgacggaggtgctgggtgtcggcgacccgcctccgcaggtcggcagcggcgcggcggcggacctgcgaggcagcgcgagcgcgagggagtga

SEQ ID NO: 11688 - DNA, 528 bp, Oryza sativa
  Clone ID: TFbOSC401137j.C1.o11.fg
atggcgaacctcccctccaccgccgccgccgccgccgcagacgcctccgggttcaagctcttcgggaaggtgatccagcccgacggacagcggggcgtggaagagagcgcggcggcgcaggcgccacctcatccgcatccgcctgcgccgccggtgatggaggcggcggcggcggcggcggggacgtcgcagactctgcaggcggcgggcggtggcggtggcggaggagggggaggagggggagagccgctgccgtgcccgcggtgcgggagcagggagaccaagttctgctacttcaacaactacaacgtgcggcagccgcgccacctctgccgctcctgccgccgctactggacggccggcggcgcgctccgccgcgtcgcctcggcgtccccgggaaggcgcaggccccgccccagcgccgcccgatcggccgccgccgccgccgcctccgcctccgcggcgtctccccccgccgccgtccccgccgcctccgagggggcggagagcgttgactcgcggtcgtag

SEQ ID NO: 11689 - DNA, 1044 bp, Oryza sativa
  Clone ID: TFbOSC17105j.C1.o4.fg
atggcgccggcggccggggacgacgcggtggtgccgcgaaagggagctggaggtggggggacgacgacgccgccgccgccgccaccggcgcagcagcagcagcagcagccgctcccgccgccgccgccgcaggagcaggggttgcggtgcccgcggtgcgactcgccgaacaccaagttctgctactacaacaactacagcctcagccagccgcgccacttctgcaagacgtgccggaggtactggaccaagggcggcgcgctccgcaacgtcccagtcggcggcggctgccgcaagaacaagcgatcccgctccgcggcggcggcatcgcgcctctcgctcaacctgccgacggtggagggtatcggcggtgcagcggccgaccccgctgcggcggctgctgccaggctggggtttcttggcggtggaacaacgatgatgatgtcgtcgtcgacgtcgccgctcggtggcgccgccgccgcggtggccgacttccagcagggcggcgccgtcgggatgctgccgctgccgcggctccaatcccccgccggcggcggcgtcgggcatcatcagtacgtgccgttcggggagtggccctcgggggacattgccggcggcaacgcggtgaacggcgccgccggccacggcgcgcagcagaggctcgccaccatgttcctcggcccgccgggctccgcctccgccgccgccgccgccgcccaggccaacgacggtggcggcaacggcgcccaagccacagcgtcagggcatgctgccggaggaggcggtggcgccttcatgcacatggctggtagtgttcccagcatggaggcggccatgccgtcggcgacgtcgtggttcatggacagctgctcctacgggctcccttccccaccgccgcctgccactgccgccgtggccgccaccaccagcagtaacctcaacagcggcggccggagtagcggcggcgatgataacgccacctccaactgcggcagcgcgatcccggcgtggggcgacatctcgacgttcgcgatgctgccctag

SEQ ID NO: 11690 - DNA, 1116 bp, Oryza sativa
  Clone ID: TFbOSC900120j.C1.o17.fg
atggcgccggcggccggggacgacgcggtggtgccgcgaaagggagctggaggtggggggacgacgacgccgccgccgccgccaccggcgcagcagcagcagcagcagccgctcccgccgccgccgccgcaggagcaggggttgcggtgcccgcggtgcgactcgccgaacaccaagttctgctactacaacaactacagcctcagccagccgcgccacttctgcaagacgtgccggaggtactggaccaagggcggcgcgctccgcaacgtcccagtcggcggcggctgccgcaagaacaagcgatcccgctccgcggcggcggcatcgcgcctctcgctcaacctgccgacggtggagggtatcggcggtgcagcggccgaccccgctgcggcggctgctgccaggctggggtttcttggcggtggaacaacgatgatgatgtcgtcgtcgacgtcgccgctcggtggcgccgccgccgcggtggccgacttccagcagggcggcgccgtcgggatgctgccgctgccgcggctccaatcccccgccggcggcggcgtcgggcatcatcagtacgtgccgttcggggagtggccctcgggggacattgccggcggcaacgcggtgaacggcggcggcggccacggcgcggtgagcagcaccatcgcgtcgtccatcgagtcgctcagcttcatcaaccaggacctgcactggaagctgcagcagcagaggctcgccaccatgttcctcggcccgccgggctccgcctccgccgccgccgccgccgcccaggccaacgacggtggcggcaacggcgcccaagccacagcgtcagggcatgctgccggaggaggcggtggcgccttcatgcacatggctggtagtgttcccagcatggaggcggccatgccgtcggcgacgtcgtggttcatggacagctgctcctacgggctcccttccccaccgccgcctgccactgccgccgtggccgccaccaccagcagtaacctcaacagcggcggccggagtagcggcggcgatgataacgccacctccaactgcggcagcgcgatcccggcgtggggcgacatctcgacgttcgcgatgctgccctag

SEQ ID NO: 11691 - DNA, 621 bp, Oryza sativa
  Clone ID: TFbOSC900263j.C1.o6.fg
atggctcctgcggttgcctcctccccgtcactcgtgctctccgccgccgccgccaccgcctccaacaagcgcccggccgattccgatgcctcgccgccgcaccagggagatcgcacggggcagcaggagaagaagcagcagcagctggagtgcccgcgctgccgatccaccaacaccaagttctgctactacaacaactacagcacgtcgcagccgcgccacttctgccgcgcctgccgccgctactggacgcacgggggcacgctccgcgacgtgccggtgggcggcgcctctcgccgcggcggcggcggcaagcgccgcagggtctccgccgacgccgacccttcctcggcgtcgccgccgccacccacgacttccaccacggacgcgtacgccgacctcccagccggcttcccgttcctcagtgacggcgccttcctgccgcagttcggcctcgccggcgttgcgccggccgcgttctcttgggcatcggctgtccctgacttgtacaactgcgggatcgcgccgtgggacgatggaacggcggtcaccggcgcggcgtgggacaacttcgccgacatcgccggccttgatctcagctggccgccgccgggtaactga

SEQ ID NO: 11692 - DNA, 1080 bp, Oryza sativa
  Clone ID: TFbOSC400755j.C1.o13.fg
atggctggagcggggggtgcggctacggctgcagcgggaggaggaggtgggggaggggtggcggcggggaggagtggaggtggtggtggtggtggcgcggcggcggcggcgggggcgggggcgccggacccgagggcggaggcgctgcggtgcccgcggtgcgactcggcgaacaccaagttctgctactacaacaactactcgctgtcgcagccgcggcacttctgcaaggcgtgcaagcgctactggacgcgcggcggcacgctgcggaacgtccccgtcggcggcgggtgccggaagaacaagcggtcgaggagcggcggcgcggcgcctggtggcggcgtggggaggggcgggcctggaggcggggcggcggcggccgtctcgtcggctggcggcggtgcagctgggacttcgcccgcgtcgtcgctggcgctgccgcagccagggtcgctgccgtcgctgtcgtcggcgctggggctcaccgggggaacctcgctggcgtcgctgctgctcgggagcggcggctccgggggtgaccacctcgggctcttccaggccatgcagtcggtggtgtccgacgcggccgcgttcgagatgcaccagcagcatcagtcgcaggtggatcacctgctcggcctcggctacggcgccgcgggggcgcagatccaggcggccaagccgtggctgcatgacggcggcgccaccggtggcctcctcgacggcttctacgcgccgctcctgtccggctccatcgtgccggggctcgaggagctccaagtcaaggcggaggccaccaccggcgaccaccagcagaagtcatcggcggcggcggccggtgagcagagctgggacctgccgacgccgtcgtcgtccaacgtcgaggcgagcatcatcgcgtcggacgcgctcatggccgccgcggccgcgtcgatgaacccggcggtcagcgccgccgccgcctccacggcgccgtccgcgcagtcgctcctctactggggcaacggcggcattggcgccgccgccgcggcatggccggacctcgccaactgcggatcctccatagcgacgctcttctag

SEQ ID NO: 11693 - DNA, 1068 bp, Oryza sativa
  Clone ID: TFbOSC408710j.C1.o17.fg
atgccgccgcatcacggcggcctcatggcgcctcggcctgacatggtagcagcggccgtcgcggcgagcggcggcggcggtggcggcggcggcccgaccggcggcacggcggtgcggccgggctcgatgacggaacgggctcggctggcgaagatcccgcagccggagccggggctcaagtgcccgcgctgcgagtccaccaacaccaagttctgctacttcaacaactactcgctctcgcagccgcgccacttctgcaagacgtgccgccgctactggacgcgcggcggagcgctccgcaacgtccccgtcggcggcgggtgccgccgcaacaagcgcaccaagtcgtccaagtcgtcctcgtcgacgtcggccgccggctcggcctccgccaccggcggcacgtcgtcgtccacatcgtcgaccgccacgggtggcagcagcagcgccgcggcggccgcggcgatgatgccgccgcaggcgcagctgccgttcctggcctcgttgcaccacccgctcggcggcggcgatcactacagctccggtgcgtccaggctagggtttcccggattgagctcgctggatcccgtcgactaccagctcggcggcggcgccgccgccgccgccgccatcgggctagagcagtggcgcctcccgcagatacagcaattccccttcttgagccgcaacgacgccatgccgccgccaatgtccggcatttacccgttcgacgcggaggccgccgccgacgccgccggcttcgccggccagttgctggccggcaccaaggtgcccggctcgtcgggcctgatcacgcagctcgcatccgtcaagatggaggacagcaacgctcagtccgcggcgatgaacagctcgccgagggagttcttgggcctccccggcaacctccaattctggggcggtggcaacggcgcgggacccggcggcaatggagacggcgccaccggcggcagcggcgccggtgtcgctccgggaggcggcggcagcggcggcggatgggctgatctctccggattcaactcgtcgtcgtcggggaacatactgtga

SEQ ID NO: 11694 - DNA, 1212 bp, Oryza sativa
  Clone ID: TFbOSC401232j.C1.o3.fg
atggtgttcccttcagtgcctgcctacctagatccacctaattggaataaccagcaagggcagccgcccaggccggcgaacgtaggcggcggcgatgcacagcacctgccggtcgggccgaccgcagctgcggcggcgccgggcgagatcggggggctgccaacaagcagctcgtcggccagcgcggcggcggccgcggcgcagcaggcgcggccgaactcaatggcggagcgcgcgcggctggcgcgggcgccgcagccggagccggcgctcaagtgcccgcgctgcgactccaccaacaccaagttctgctactacaacaactactccctctcccagccccgccacttctgcaagacctgccgccgctactggacgcgcggcggctcgctccgcaacgtccccgtcggcggcgggtgccgccggaacaagcgctcgggcaagtcctcctccgccgccgccgccggcgcgtcgtcctcctcctccaagccgtcctcgtcggcggccaggcagctgcccggcggtggcgcgtccccgatgccgtccgccgcggcgtccacgcagccaggaggcgccgccgccggcgcgatcatcccgccgtcgggcctcagctccatgtctcaccacctcccgttcttgggggcgatgcacccgccggggcccaacctagggctaaccttctccgccggattccagcctctcggcggcatgcaccaccacgtggacacggcggaccagttcccggtggcaagcggcggcggcgccaccattggcgcgtcactcgagcagtggagagtgcagcagcagcagcagcagcagccacaacagcatcagttcccgttcctcggaggagcactcgagcttccgccgccgccgccgatgtaccaactgggactggaagctactcgagcagcaggcaccggagcaacggcggcggcggcgttcacgttagggcagaccagtgctacagccaccacgtcaaggcaggaaggttcaatgaaactggaagatagcaaagggctggagatgagcctgcagaggcagtacatggcggctctacgccaaggagatggtgtctggggtaacaacaacggcggcaatggcggcagcgacggtggcggcaatggcggcggtggcagctggacaatgaacttccctggattccattcgtcatcaggcggcggcggcgatgatggcggcggagtgttgtag

SEQ ID NO: 11695 - DNA, 1482 bp, Oryza sativa
  Clone ID: TFbOSC400397j.C1.o44.fg
atggccgcgcttaggcagggcgacgaccccgccatcaagctcttcggccgcaccatccccctcctcctcgacccccccgccgccgccgccgccgccgccgacgaggaaaattctgttctagaaaattctgttctatcctttcttgatttcttggcaacatttggggtcatgcctaatttaggaaatggtgtaaaaaccaataatgacttacctttagtctcagacaagcttttgattgtcaaaggtattcctttttgtcccaacaatagtaagaaaaatgatttacaaggcatcagcagaccggatggaagaatagaaatcgattccatgactgaggatgttaagactgagcctgatggatctgtccctgagaagatactcaagaagccagataagattctgccatgtccacgctgcaatagcatggaaacaaagttctgctacttcaacaactacaatgttcaccagcccaggcacttctgcaggaactgccaaagatattggaccgctggtggagctatgaggaatgtcccagttggtgctggaagacgcagaaataagcatgtgtcaaaatactgtcaggcgatgatgacgtgcaataatactgtagctcctggagatgtttctgatgtggttcaccatcaggttattacacatggatcttctctccttccagcaacactgaaggaaaatgaaacacctacagaattcatatcagaagtaccaccatgtaagtcttcagcttcaatccttgatattggagagccgaatgatactgaccttgttcccttggcctctggtgataacaaggaagaaaaatcatgtgcatcttctgtggtagtatccagctgttcagagaatctgatgccagataatgcaattatgaaagagccaaacaacaggtcaggatgttgtaatggtgtggcattgcctttccctactggacctgctttggtgctcccctggagtcttggatggaacagtgttgctctcatgccagctacccagtgctcgatgcagcccgttcttgggttaaaagatgggataccctgcccgccttcatggccaccgcaactgatggtgccggccccaggaatctgtactcctgttgttccaatccctcttgtgccacctctgtggagctgcttccctggctggcctaatggaatgtggaatgcacaatgccctggaggaagcagttctctggtgttgggaaagcattcaagagaagaaagcttgcaggaagaagagaagacgagaaattacttatgggtacctaaaactcttaggattgatgatccagctgaggctgcaaagagttcaatctgggcgacccttggcatcaagcctgacgataaaggcatattcaagtctttccagccaaatgttgcgaaaaatggcacggcaccagaatcgcctcaggctctgcaggccaatccagcagcattttcgcgttctcaatcgtttcaagagacgacttga

SEQ ID NO: 11696 - DNA, 1323 bp, Oryza sativa
  Clone ID: TFbOSC401896j.C1.o16.fg
atgggggagtgcaaggtgggaggaggaggcggaggcggagactgcttgatcaagctgttcgggaagaccatccccgtgccagagcccggcgcctgcgccgccggcgatgttgataaggaccttcaacacagtggcagcagcacgactgaaccgaaaactcaagagaacaccgttcaagactccacaagtccacctccgcagccagaggtcgtcgacaccgaggactcttcagctgataagaactcatcagagaatcagcagcagcagggcgatacggccaaccagaaggagaagctgaagaagcctgacaagatcctgccgtgcccccggtgtagcagcatggacaccaagttctgctactacaacaactacaacatcaaccagccgcgccacttctgcaagaactgccagaggtactggacagcgggtggtgccatgcgcaacgtgcctgtgggtgcaggccgacgcaagagcaagagcgtatcggccgcttcccatttcctccagagggtcagggctgctctgcccggtgatcctcctctctatgccccagtgaagactaatggcaccgttctcagcttcggctccgacctgtccaccttagacctcacagaacaaatgaagcatctaaaagataagtttatcccaacaaccggtatcaagaacaccgacgagatgccagtcggtttgtgtgctgaaggattgtcgaaaacagaagaatcgaaccaaacgaacctaaaggagaaagtttcagcagatagatctccaaatgttgcacaacacccatgcatgaacggaggagccatgtggccatttggcgtggcaccaccacctgcttattacacttcaagcattgcaattccattctatccagctgcagcagctgctgttgctgcatactggggctgcatggttccaggagcttggaacgctccatggccaccgcagtcccaatcccaatcggtttcatcatcaagtgctgcttctccagtatccacaatgaccaactgcttcagattaggaaagcaccctagagatggtgatgaggaactggatagcaagggtaatggcaaggtgtgggtgccgaagacggttcggatcgacgatgtcgacgaggtggccaggagctctatctggtcgcttattgggatcaagggtgacaaggtgggagcagatcatggcagaggatgcaagcttgcaaaggtttttgagtcaaaggatgaggcaaaggcatcaactcacacagcgatcagcagcttgccattcatgcaggggaacccggctgccctaacacgctcggtgaccttccaagagggatcttga

SEQ ID NO: 11697 - DNA, 618 bp, Oryza sativa
  Clone ID: TFbOSC401539j.C1.o71.fg
atggccccggcggccggcgggttcaagctgttcggcaaggtcatcatgcagtgcggcgtttccgaggggacacaggacaaggcgcagggcttcgtcgtggcccgggagaaggttgaaccggaggaggaggaggaggaggagcagcgtgtcccggctgctgctacgtcggggcagcgcgcgtcgatcaagcgggaggccgcggaccgcgacgaggagcaacggcaagggggcggggacgcggcggggcagccgacgcagcggcggttgcaggactcggccgaggcgcgtgcggccgccgcggcgccgctgccgtgcccgcggtgccggagccgtgacaccaagttctgctacttcaacaactacaacgtcaaccagccgcgccacttctgcaaggcctgccaccgctactggacggccggcggcgcgctccgcaacgtccccgtcggcgccggccgccgcaagaaccgtcccctgggccccctcgcggtcgcccaccataaccaccaccaccgcgcggccgccggcttcgtcctcggcttccccaacccgtcctccccaacctccccgtcgccggtctacaccgaccggtggccggtcaccccggaccgcccgttttga

SEQ ID NO: 11698 - DNA, 963 bp, Oryza sativa
  Clone ID: TFbOSC409189j.C1.o1.fg
atggctaagctagcttcatgcatgactgcatcgatctattcaacagctataaatccgaggaacaaactaaacagaaataataagggcatcgtccccgaggagcacgggatggggtcgtcgtcgccgtcggcggagctgatcgcgtgcccgcgggcgccgatgcaggcggcggcggcggcggccgaccgccggcttcgcccccagcacgaccagccgctcaagtgcccgcggtgcgagtcgacgcacaccaagttctgctactacaataactacagcctctcgcagccgcgctacttctgcaagacgtgccgccgctactggaccaagggcggctcgctccggaacgtccccgtcggcggcggctgccgcaagaacaagcgcgcgccgcccaagaaggccgccgcccacgcccagcccgcggtggcggtggcggcggcgctgcaaggccgccacatggagaccggactccacctgtccttctccgggatgcagcatcatcttgcgccgccgccgccggcggcggccaccgcggccgacccgctctgcagccttggactatttgactggaagcagtacgaccccgtcttcgccggctccggtggcggcggctcccccgtggcggcgctggagagcgctggtggctcggaggcgcagttcatgggtgctggcatgatgggcattggcggcggcggcgtcgcggagtaccatgcgctgagcgcgctccggttcgcggcagggctcggcgatcacctggcgctgccgttcggcgcggtgcgggcggagcacgacgccgtcgaggtgaagccggtggcggcggagaggctgctgtcgctcgagtggtgcggcgaggcgagccgcacggcggcgccggagagctccattagctcgctgggcgggctgggactgtggagcggcatgatcggcggcgggcaccatcaccatggctcctccgctgccatctga

SEQ ID NO: 11699 - DNA, 1098 bp, Oryza sativa
  Clone ID: TFbOSC400070j.C1.o16.fg
atggcgaacaaacagtgggccgcaggcagcgtcgtggctcgcgcacgtccgtgcgtgcgtgtgcgcacgctgcgcggcaggcgcgccggggacggccgtgcgcctgacgcatgcagatcagatacgttagttaagaatgtttgccacgatagcgtgacaggcagcgagcattccaaaatggaaaaccaaagtggttggttctacgtgaccatctcgaaagaaagccaaaagcgtcgacggaaacgagaggcgcaggagttccagtccatcccggggctcgccgggcggctgttcggcggcgcggcggcggctgacatccggcgcgcgcaggcgcagcagggcccggcgtcgcggtgcggcgggataccgtcgccggaggcggtgaagtgcccgcggtgcgagtcgaccaacaccaagttctgctactacaacaactacaacctctcgcagccgcgccacttctgcaagagctgccgccggtactggaccaagggcggcgtcctccgcaacgtccccgtcggcggcggctgccgcaagaccaagcgtagcggcagctcgtccgctgcgtcctcggccccgtcgacgccgacggcggcaactgacaacgccaagaaccagcggcgcgcctcggcgtcgtccccacgatccagtagcggcggtagcggcaacacgagccccacggccgccgcggcgacgaccccgacgacaccggccacgccgtcgtcgaacaccatcgccgtcataaaccacgcgacgacgacgacgacgacgacgaaccccttcccgacagacgtgccacctccggcgccgattttcgccgaccaagcggcagcgctcgcgtcactgttcgcccctcctccgccgccgcctctcccggtgttcagcttcgcagcgcaggcgaagaccgaggacgggattgcctccgttctactcgccggacagacgacggcgcccactgccgccaccgttgccgacatgacgccgttcacgtcgctggacgcggggatcttcgagctcggcgacgtgccgccggcggcgtactggaacgccgggagctgctggacggacgtcccggacccgaatgtctacctaccctag

SEQ ID NO: 11700 - DNA, 1320 bp, Oryza sativa
  Clone ID: TFbOSC423196j.C1.o8.fg
atggcgtcgggatcgctcctgctgcctcccgcctgcctccagcatccgcttccggcggcggcggcggcgtcaggcggcgtgggagggagtagcagggagcagtgcccgcggtgcgcgtcgcacgacaccaagttctgctactacaacaactacaacacgtcgcagccgcgccacttctgccgcgcctgccgccgctactggacgctcggcggctccctccgcaacgtccccatcggcggctccacccgcaagcgcccccgcccccccgtgcgccgcccgcccgtccacttcaccgccgccgccgccgccgccgccgccgctgcaccgcctcatcaccatcatcatcatcacggsgggccgctcacgccgccgccggcgacctcttcttcctcgcagcaggcgggcctgctcggctcgctgttcgcgctcggcgcggcgccgctgctggagggccgcgtcggcgtcggcttcgacctcggcctcggcctgcccggcccgggccaccaccatgccgtcgccggcggcggcggacctgctgcagcggtggcgacgtcgtcgtcgtcgtcggcggcggcgcctctgctctggcccaccgggctgttggacagcagcagcaataatgccgagacatggaggatggcgsccggcggcatgtggccggagttcactgcggcggcggcgcagaacatcaggctggtgattgacatcggcgacacaacgatccaggtccctctcaatggccccaccgtcgtgcagaacatcggccgtcaggctgccgccgccgtcgccggagattcgtcagccggtggtgttagtgagaaaaccggtggtgctggtggcggcggcggcgaggagtggatgcaagaacaggatggcttgttgtgcatgcgcgggcggcgctgcggccgccggggtggatgcctgccgaggccgcgtgactggttcgcggcgctgctcgccgccgacccggcggcggccgccgtcacgagggaccaggccgggaaggcgatgctgtacctgatcgtcaacacctgcaccttcgccacgtcgctcgccgtgctccctgatgctgttcgccgtcggcggcggctgcgcgtcgaggagggtcaccgcgtggctgatcaccaacatgatgacggccgtcgcgctgttcgccgcggcgacgttcgcgctctgcgccgccgacgactaccggctcatggaccgttcgtcggcaccgtcgtggccgcagtcaccgtcgtggtcgtcaggtgcaatcttgctctgccgtttcggggaggcgacgccggccatggttgtagctgggtttcaagattgtaa

SEQ ID NO: 11701 - DNA, 404 bp, Oryza sativa
  Clone ID: TFbOSC400755j.C1.o28.gp
gtcggacaccaccgactgcatggcctggaagagcccgaggtggtcacccccggagccgccgctcccgagcagcagcgacgccagcgaggttcccccggtgagccccagcgccgacgacagcgacggcagcgaccctggctgcggcagcgccagcgacgacgcgggcgaagtcccagctgcaccgccgccagccgacgagacggccgccgccgccccgcctccaggcccgcccctccccacgccgccaccaggcgccgcgccgccgctcctcgaccgcttgttcttccggcacccgccgccgacggggacgttccgcagcgtgccgccgcgcgtccagtagcgcttgcacgccttgcagaagtgccgcggctgcgacagcgagtagttgttgtagtagcagaact

SEQ ID NO: 11702 - DNA, 963 bp, Oryza sativa
  Clone ID: TFbOSC400259j.C1.o105.fg
atgctgccgtacgcgccgcggccgccgtcgctgctggtggatcgccggtacaagcagggcgccgaggcggcgcccaactgcccgcgctgcgactcgcccaacaccaagttctgctactacaacaactacagcctcagccagccgcgctacttctgcaagggatgccgccggtactggaccaagggcggctcgctccgcaacgtccccgtcggcggcggctgccgcaagaaccgccgcgggaagtcctcgtcgtcggcgcggtcggcggccgacgccgtctcgagcggccgcgacgcggcgttcggccaccggttccccggcccggtccggcctgacatggtcctggaaggcatggtcgggaacccggcgaaccccggccaggcgatgcccgacgtcgccgccgcggcggacggctcgaccatcgacctcgcaatgctgtacgccaagtttctgaaccacccgccgaccgacgccgggctcggcgccgtcacgccggagtcgggagggcacgtcgacgaggcgttcgacacgttcagcgcgtccagcgatctgagccccggcatcctggcggcggcgtcggcgcagttcgacccgaaccaggacgggttcggcgagtggtccagtccagcgagcggcaacgacccgacgagtactgcaaccaccgcaaccacctccatgctgtgcacggacgcgagcgtgcaagccgcgctcggcgagctcaacttcgccatggatcagagctgcttcgactcgctaggtttgcccacggacgtcgccggcgccggcagcctgtcgtcgtggtgctcgatcgtgccgagcttgtcgacatgggaggagcccaagtacgactcgttggattcgtttcccgacgacgccatgagcctccatgagtgcatgatcggcgctcctgatcatgattggagcgtggattgccaaggattggaggctctttacatgccataa

SEQ ID NO: 11703 - DNA, 1050 bp, Oryza sativa
  Clone ID: TFbOSC405553j.C1.o2.fg
atggaccagctcaagggcgccagcgctctgaaccacgcctccctgccggtggtgctgcagcctatcgtgtccaacccgtcgcccacgtcgtcgtcgtcgacgtcgtcgcgctcgtcggcgcaggcgacgcagcagaggtcgtcgtcggcgacctcgtcgccgcacgggcaggggcagggtggcggcgcggcggagcaggcgccgctgcggtgcccgcggtgcaactcgtcgaacaccaagttctgctactacaacaactacaacctcacccagccgcgccacttctgcaagacgtgccgccggtactggaccaagggcggcgcgctccgcaacgtccccatcggcggcgggtgccgcaagccgcgccccatgccggcgccggtcgccaagccgcccatgtcttgcaaggccgcgccgccgctcggcctcggcggcgggccagtgtcctgggcctccgggcagcaggccgccaccgcgcacctcatggcgctgctcaacagcgccaggggagtgcagggccacggcggcagcaatgtccaccggcttcttgggctggacaccatgggtcacctccagatcctgccaggcgctcccaatggcgccggcgccggcacggcggcgtcgctctggccacagtccgcgccgcggccggtcactccaccgccgccgcacatggactcccagctcggcatggggacgctgggccaccacgacgtgctgtcgagcctcggcctcaagctgccctcgtcggcgtcgtcctcgccggcggcgagctactacagcgaccagctgcacgcggtggtgagcaacgcggggcgcccccaggcgccgtacgacgtcgccaccgcgtccctcccttgcaccaccgcggtgacctcactcccgtcggcgctgtcgagcgtctccgccgccgcgccgaccagcaacacggtcgggatggacctgccacccgtgtcgctcgccgcgccggagatgcagtactggaatggcccggcggcgatgtcggtgccgtggccggacttgcccactcccaacggcgcgttcccatga

SEQ ID NO: 11704 - DNA, 504 bp, Oryza sativa
  Clone ID: TFbOSC900050j.C1.o4.fg
atgccgcggcacttctgcaagtcgtgccgccgctactggaccaagggcggctccctccgcaacgtccccgtcggcggcggctcccgcaagagctcgacttcctcctcctccgccgccgccgccgccgcctcatcgtcgtcgtcgccttcttcgccagccaagagccccaagcgctccaagaactccaagcgccgccgcgtctctccgccccctcctcagcccgtgcctgcgccgccgccgcccaccaccgccgacgctgccgacgtagccgcaccgacggcaccagaagccacaaccaagaaagccccggaagacctcaccgcggcggcagcgacacagccggcggtggcgctcgggctcggcgtcgccgacggcggcggcggcgggaaggagcacctggacacgagcccgttcgagtggccgtcgggctgcgacctcgggccgtactggccaaccggcgtgttcgccgacaccgatccatcactgttccttaacctgccatga

SEQ ID NO: 11705 - DNA, 1416 bp, Oryza sativa
  Clone ID: TFbOSC401036j.C1.o10.fg
atggcgagcggcggcgcattatccccggtggaggagaagcccacggtggtgaagacgaccaaggcggagcagcacgaggaggaggcggcggtggcggtgaaaagcgcggcggagatgatgaagaagagcagcccgtgctgcccccggtgcaactccatcaagaccaagttctgctactacaacaactacagcatggcgcagccgcgctacttctgccgcgagtgccgccgctactggacccagggcggctccctccgcaacgtccccgtcggcggcggctgccgcaagagcaagcgctcgtcggcctcgtcggcgtcggcgtcggcggcgtctcctcctgctcctgcggtgggcgccgcgccaccggtggtgccggcgctgtcgtcggcgatcagcaagctgctgcagtcggagcccatggcggcgccgtgcgcggacttccccaacgtgctcccgaccttcgtgtccaccgggttcgagctccccgccgccgccggcgaccgcctctcgctggggtcgttcggggcgttcggcaacctgtcggcggcggtggcggctcccggcggtggtggtgggtcgtcgacgaccacgtcgttcatggacatgctgaggggagttggagggcttttcgacggcgtcggcaacagccatcagatgggcggcaatggcggcggcggaggcagctactacgcgcctctcatcaccggcgccggcaatggcatgctgatgccgccgccgccgctgccgccattttctggttctctgatgcagcatgggatgcaggggctgttcgccaatcatgcgatgggaggaggtggtggtggagtgatgaacgccggcgaggacggcagcgtgatggcggggctgggaggaggccagtggccgccggcgcttggtggtgcagacgagcagcagggcggcggcgacggtggcgaagctgtgatgacgaaggacaccggcggcggcgcatcgtcgtcggcgtcgaggccggactacttctacggctggaacagcgccgccggcggcgtcgtcgctggaggcggcatcggcggcaacgccgccgctgccaccggagcaacgccatggcagggcctcatcgacagcagctcggccatgatgcccactaccacgcagaccacactatttgttggttcctatgataagggtgtaaatcatgccctccaagataaccaggaggtgcacatgctgaagattcttggagtgatcacagctcccaaaagccctccaaaggaggccttgaatatagatgtattgccagatcttctgaaattggacaatggcttctctacccacagggtgctgacatccccttacttggcttgcaagctttgggaaaaggagatgaagcaacagaacattggtgttggacaacagataagctcaaaagcctggtag

SEQ ID NO: 11706 - DNA, 789 bp, Oryza sativa
  Clone ID: TFbOSC400765j.C1.o2.fg
atgctgggttcggaccagctcgagcaccgcccggcgccgtcggctccccgcgccgagccggacgatgtcgccgacgacgtggaggtggaggcgttccgggacatccacccggagccgtcgcctccgcatctaccgccgccgccgctcaggcagccgtcgtgggacgccgcgagccaccgctcgctgtcgtcctccggcgcgggcggcggcggcgacgtcgagctgttcgccaccatgagccgcgagttcaccgccatggtggcggccgggtcgtcgtccgcgcccagccccgacgttcccggcgacgcccccgccgccgccgacctgaacctgctgcagctggcgcgcatcggcgagaacgagccggcggccgaggcgaacgcgctcgccatcgtgccggcggcggcgggcagcggcccgccggcgccggtggagcaggtgaagaaggaggaggtggaggcgaaggtggcggcgtggcaggcggaggaggtggccaagatcaacaacaagttcaagcgcgaggaggtcgtcatcaatggctgggagagccagcaagtcgacaaggccaccgcctggctcgccaagatcgagaggaagctggaggaggagcgggcgaaggcgacggagaaggctcgcaacgaggcggcggcggcgcggcggaaggcggaggagcggcgggcgtcggcggaggcgcggcgcgggaggaagacggcagaggtgctcgaccgtgccaacttctgcaaggccgccggcagggtgccatccaagcgctccttcttctccttctaa

SEQ ID NO: 11707 - DNA, 885 bp, Oryza sativa
  Clone ID: TFbOSC407314j.C1.o3.fg
atgttgcatgagcagcacgcgccgccgccgcagccggagccggaggtttcgctacagctgtcggcgcccgccaccgccgccgacgatgtcgctgcaggcgacgacgaggaggtcaccgtcgtcaccacgtaccgcgacatccaccctctgacgccgccgtcgccgacgacgacgacgacgccacccacgcggctcgggtccgccgcgtactcgtgggacacggccagcagccaccggtccgtgtcgtccgaggagcagttcatgacgatgagccgggagttcacggccatggtcgccgccgggacgaccatgcagactggccccaacgacggcaacaacggcggtgaccagctcaccagcatcggcgaggacgagctggaggagaccaacccgctggcaattgtgccggacagccacccgatcgccacgccggccaggagcagggcgtcccagctggaggttgtccccgcggcagggccatcgccggcgccgccggtggaggcgaggcaggtgaagaaggaggaggtggagacgaaggtgtcggcgtggcagacggcggaggtggccaagatcaacaaccggttcaagagggaggaggttgtcatcaacgggtgggagaccgagcaggtcgagaaagcatccgcatggctcaagaagatcgaggtgttcttgatgactgaacaactaacgcagagaaagctggacgagcagcgcgccaaggcgctggagaggacgcagaacgacatcgcgaaggcgcggcgcaaggcggaggagaagagggcgtcggcggaggcgaagagaggcctcaagctcgccaaggtgctcgagctcgccaacttcatgaaggctgttgggagggtgcctaccaagcgatccttcttctag

SEQ ID NO: 11708 - DNA, 885 bp, Oryza sativa
  Clone ID: TFbOSC407323j.C1.o1.fg
atgttgcatgagcagcacgcgccgccgccgcagccggagccggaggtttcgctacagctgtcggcgcccgccaccgccgccgacgatgtcgctgcaggcgacgacgaggaggtcaccgtcgtcaccacgtaccgcgacatccaccctctgacgccgccgtcgccgacgacgacgacgacgccacccacgcggctcgggtccgccgcgtactcgtgggacacggccagcagccaccggtccgtgtcgtccgaggagcagttcatgacgatgagccgggagttcacggccatggtcgccgccgggacgaccatgcagactggccccaacgacggcaacaacgacggtgaccagctcaccagcatcggcgaggacgagctggaggagaccaacccgctggcaattgtgccggacagccacccgatcgccacgccggccaggagcagggcgtcccagctgaaggttgtccccgcggcagggccatcgccggcgccgccggtggaggcgaggcaggtgaagaaggaggaggtggagacgaaggtgtcggcgtggcagacggcggaggtggccaagatcaacaaccggttcaagagggaggaggttgtcatcaacgggtgggagaccgagcaggtcgagaaagcatccgcatggctcaagaagatcgaggtgttcttgatgactgaacaactaacgcagagaaagctggacgagcagcgcgccaaggcgctggagaggacgcagaacgacatcgcgaaggcgcggcgcaaggcggaggagaagagggcgtcggcggaggcgaagagaggcctcaagctcgccaaggtgctcgagctcgccaacttcatgaaggctgttgggagggtgcctaccaagcgatccttcttctag

SEQ ID NO: 11709 - DNA, 1632 bp, Oryza sativa
  Clone ID: TFbOSC401520j.C1.o20.fg
atggcactgccggcggtggggcctcgcggcgcgaccgatccagatccagcgccctcgccgctgcgcgtgcacggcatcggcatcggcagccacgcctcgcgtggcacggcaccgcgaggtgaggaggaagaggaggaggaggagtggagaggcgacggcgacgcgggctcggaggaggaggagggggaagcggtcagtgactccttctcccactcgctgagagagtgccagaagcagcggaagctcagagcggagggggctgcgttgctgctttcaccggccaagcatgagctcaccggcggaggtggtgggagcatagaactgctggtgctctcgccgaggtgcttggttgggggtaatgttggaggaatgagcaagagctccacagcgtcatcacggagcagatcaggcacattcccgagccccggtaccccaaactaccaccggcattgcgctagcaccatgcagtaccctaagggatggagctcagagcgggtgccacttggaggtggtaccaataggaggtatgggggcagtggggttgttcttcctttcaacaatgggaggaagctgccatcaaaatgggaggatgcagagaagtggatcctaagtccagtttcctgtgatgggattggaaggatgtcagccccggcgcctcaccatagacggcccaagtcaaagagtggcccacttggccacccaggcggaataccgggtgcttatgcggctgcttcgccgtttgtgccctgctttgatggtgttctggcagcggctaattttgcagcacattctcctttttctgctggggttctcatgccagagcacgtgcgcaatggtgacttcagcagtggaagaggtagaagtggggatgatggcagtagccgatcttactctgcagagaaggacccatatatcttgagatcagcaagtatacatgcgtggacagagacacttatggaagcatccgcctttgctaatatctcagaagaaactgcacaagatgataaattgcaaggcctgcgaggagaaactcctgccatttccagtccaataataaagaaagatgttgccacacaaatgagtcctgatgacagtatatcgtcttctccaaaagcaagacattcatgttccagtttaccatcaggacatcctattaaagaaccaaatagtaatgcacttaaacctgaagtccgagatgtccaggtagatgatcaagtaactgtgacccggtggtccaagcgacatgtaacacgagggtctgataggcggtcaacaaatattgtcgagtggaggaagaaaacaattgagactcgagctccatcttttgatgaaaaagaaagagaaagctgcgtatcaaagtgcaagagggaggaagcgaagatcactgcttgggaaaatctgcagaaagcaaaagcagaggcagcaattcgaaagttagagatgaagcttgaaaagaagaggtcatcatcgatggatagaatcttgggcaaactacgcactgctcaaaagaaagcgcaagacatgcgtagtgcagtttctgacgttgcagctcatgtcagccaacaaatcagaattaatcaggaagtcagatttttccttgctgtggcagctggaggtgacggggttatttaa

SEQ ID NO: 11710 - DNA, 951 bp, Oryza sativa
  Clone ID: TFbOSC12505j.C1.o18.fg
atgttgagtgaacaaacggcggctagtggtagcagcagcagcagccgcggcgccgacgaccgggagattgtcatcagcaccggccgggagatcgtcgtcagaagcagcgggggtgaggagagggaggaggaggtggtggtggaggaggagctcgaggagccggagttcagggacatccacgcgctgagcccgccgccgacgccgacgccgagccagccgtcgtcgtcgtaccaccggcggaggagggagtcgtgggagtccgcggcggggagcaggcacacgtcgatccgctccgtggggagcgacaccgccccaagtgagctcttccctactatgagcagggagttctcggccatggtcgccgcagcagccaacgccaacgccgccgccgccgcagccgcgaacggcggcgactccagccgcgccggggtggacgacgcgctggggaggatcggggaggatgagctcgaggagacgaacccgctcgccatcgtcccggacagcaaccccatcccgtcccctcgccgcgcccacctcgcgctccccgcccccggcgacgtgtcgtcggcgggcggcggccacggcgacgaggtgtcggtggggcaggtgaagaaggaggaggtggagtccaagatcgccgcgtggcagatcgccgaggtcgccaaggtcaacaaccgcttcaagcgcgaggaggtcgtcatcaatggctgggagggcgaccaggtcgagaaggccaacgcctggctcaagaagtacgagaggaagctggaggagaagagggccaaggcgatggagaaggcgcagaacgaggtggcgaaggcgcggcggaaggcggaggagaagcgggcgtcggcggaggcgaagaggggcaccaaggtggcgcgcgtgctggagctcgccaacttcatgagggccgtggggagggcgccatccaagcgctccttcttctga

SEQ ID NO: 11711 - DNA, 1596 bp, Oryza sativa
  Clone ID: TFbOSC401648j.C1.o50.fg
atggagtatgaaaggattcacaaggttcaggctggtgcactttctccgacaaagctaaggatgaagcttctgggaactcacaatcgtgtgagggtcatcagcaacagctcatcacggacatcaccttcgaagaacactgaaccatcgcaagcacagaacagactattagtttgtgatgttcttgaagaagtttcaggcagctctgatggatccaaatgctcctcagcaatcaacaaaactgaagctttagagaaggatccaccattggacatcaacaaggttgaggacatgaccaaaagttcagttcagcaacctgcatcaagcaactcaagcatgatacatccagttcgaaccatagaagaagagagtaatgactgtgatagtggtattgacaatgctagtaccagtagtttcgagttccatggaggagagaaaacagcagcgcagaatccaacatcaggatatttctcgagacagacttcctccaagtggaatgatgctgagaaatggattgttaataagcaaaatgttcaacaaaatatctctaagggcgcaccacagaaccagagtgcacagcagatgaattcagctgcaggcaggggttttattgtgcccaaaatttcaaaccgaaacataattcctcgccccatgcagaacatgaaaagaccgagtccagcttcttccgcttctcgaagcatattagagaggttatcttttggttcacatcaaccaaagttggttaggcatgcagatgtctgtacagttaataatgctggtgtcacctcagagtatcaaacaaaggcaaccgataacagttcatcaattgaaataaggccctacaaagatcccaaagctattcctgcagttcattcggtgtccgtgagagatgtgggcacagaaatgactcccataccgagtcaggatccttcaaggacaggaactccacttggatcaatgacaccaactcgtagcccaaattgctctataccatcaactcctgtaggaggacggtcaacagcatcaccaggagatgacaacacagatgatggaccatatttcaacagaaaaggtggcacaaatgaaatatcagacgatgaaatgagattgaagacaaggaaagaaattgccgccctgggtatacaactaggaaagatgaacattgctacatgggctagcaaagaggagctagaactagtctctgcatccccaagcattgctgatttggagcggatgaagaaagaatatgcagctcgtgcagcagcatatgaagaagcagaaaattttaagcatacagcaagattcaagaaggaagagttgaagattgaagcatgggagagccttcaaaaagcaaaaatagaatctgaaatgaagagaatagaggaacatgcagagaaattgcgaagcgaagccatggcgaagatggctgaaaagctagaaatgacacggcgtttagctgaagagaaacgagcctcagccaatgcaaggatgaaccaacaagcagcaaaggcggttcacaaggctgagctgattcgccagacaggacgagttccagggtcatgtatcctatgctgcagtggttgcttctgtcaacactag

SEQ ID NO: 11712 - DNA, 612 bp, Oryza sativa
  Clone ID: TFbOSC401780j.C1.o8.fg
atggccggggaggcattgaaggaggcgggggcgacgcccgccgcagcgaacgcgggggaggagaaggccgtcatcccggcggcttcgacatcgccggtgatctccaagaccgatgatgacacggagccgccggccgatgactccaaggctctcgtcgtcttcgtcgagaaggttgctgataaacctcatgctgagaaggcaacagcaacagcaacaccaacaaggacctcaaatgacagagatattgcccttgcaaaggtggagacagacaagcgagaatcgttgatcaaagcatgggaggagaacgaaaaggcaaaagcggagaacagggcctctaagaagttattggatattatttcatgggagaacacaaagaaggcagtaataaaaactcaactgaaaaagaaggaagaagagttggaaaggaagaaggcagagtacgctgagaaggcgaagaacaaggaagcaatcgtccataaggaagctgaagaaaagagagcaatggtgatggcccggcgcggtgaagaagtgatcaaggccgaggagatagcagctaagtaccgtgcaaccggagtgacaccgaagaaacatatcgggtgttttggggcataa

SEQ ID NO: 11713 - DNA, 549 bp, Oryza sativa
  Clone ID: TFbOSC402101j.C1.o10.fg
atggagacccaggaggcgaagagagcagatgtggcggcggcgccggcgacggcgaccggcggtgaggccgtcaaaccggccgccggcgatgctggcgcagtaaccaagacgaatgcagcagatggaccttcagcaccagcaggcaaagctgcaactccaacgggttcggttgacagagacgccatactcgcaaacgtggagctggagaggaaactgtcaatgatcaaggcgtgggaggagagcgagaagagcaaagcggagaacaaggctcagaagaagatgtcatccatactctcatgggagaacacgaggaaggcagctatagaagcaaaactgcgaacacaagaggagaagctggagaggaagaaggcggagtacgcggagaagatgaggaaccaggtagcggcgatccacaaggcggcggaggagaagagggcgacggtggaggcgacgcggcacgaggagataatcaagtatgaggagatggccgccaagcacaggtccaaggggactacacccaccaaattcctctcttgtttcggctcctag

SEQ ID NO: 11714 - DNA, 516 bp, Oryza sativa
  Clone ID: TFbOSC408029j.C1.o2.fg
ggcggtgaccagctcaccagcatcggcgaggacgagctggaggagaccaacccgctggcaattgtgccggacagccacccgatcgccacgccggccaggagcagggcgtcccagctggaggttgtccccgcggcagggccatcgccggcgccgccggtggaggcgaggcaggtgaagaaggaggaggtggagacgaaggtgtcggcgtggcagacggcggaggtggccaagatcaacaaccggttcaagagggaggaggttgtcatcaacgggtgggagaccgagcaggtcgagaaagcatccgcatggctcaagaagatcgagagaaagctggacgagcagcgcgccaaggcgctggagaggacgcagaacgacatcgcgaaggcgcggcgcaaggcggaggagaagagggcgtcggcggaggcgaagagaggcctcaagctcgccaaggtgctcgagctcgccaacttcatgaaggctgttgggagggtgcctaccaagcgatccttcttctag

SEQ ID NO: 11715 - DNA, 1533 bp, Oryza sativa
  Clone ID: TFbOSC401731j.C1.o33.fg
atggagtacgagcgcatcgagaagccgttccccacccagggcggtgggttctcgccgaagcggctgcgcgcgatgttgctgggggtggagaagcggcggaaggggcaggaggaggaggaggagggggacgccggggaggtggacgacgagtacggcgcggtgcccaagtcctctgtcagatccgacgccgactccgatgcgcgcagaggaggtagcatgtgcgaagaatacaaggatgtagatgtggtgagcaccatctcagaatcttcatcctcgttggagacagggagtgggcaccgatcgcgtgacacccactccatgggttcacgagtaagggtgcctgaggaggactcctgtgactctgagagtgtggcttcaaactttgagttccataaggagcgaggggcctctgctcggtctgtgacggcggcaatcgttcctccattctcaaagcctgcaccatcaaagtgggacgatgcccagaaatggatcgccagcccgacaacaaaccgtcctggtagggctggtggagtgccacagaggaagatggaaaaaactagctttggtggcgggaggctgccggctacgaaggttgtgttggaggccacagaggagatagatactaagagggttgatccaagccaagagaaaagggaaattgggtggcaaaaagcggtgaattgggccccacctgatccatatccagaagttgagacttgtgcaaagtctgcacttgctgaagaaattacagtagctgattcagctgttacttttagtcgccatgattcatctgccacgcttcagagcgcgacaacatgcatacctcccccaccaacagtccgatcagtgtcaatgagagacatgggtacagaaatgacccctattgcgagccaggagccatcccgaacaggaacaccggtgagagcaacgagtccagattgttctcgcccaactactccacgaaaaacaataggccccaatgcaatcggtgctgttattggccatggtgaatgtagcaacgtggaattaagtgaacaagaattgcaaatgaagactaggagggagataatgctcctcggcactcagcttggtaaaaccaacattgctgcatgggcaagcaacaaggaagaggaaaaagatgcatcactttcgcttaaaggagtgcccatggaccaatctacacagaaggtaacagaaattcgtgcagcagcgtgggaggaggcagagaaggctaaatatttagcaagatttaaacgagaagagattaagatccaagcatgggaagatcatcagagagcaaaaatcgaagctgaaatgagaaaaattgaggtcgacgtggaaaggatgcgagcccgtgcgcaggacaagctgatgagccagctcgcatcggcgagacacactgccgacgagaagcgggccgcggcggagctgaaacggagccgtgcggctgcaaagacggcggagcaggcagaccacatcaggagaaccggcaggatgccgtcctccattggctgctggaactggtgctcgtag

SEQ ID NO: 11716 - DNA, 1281 bp, Oryza sativa
  Clone ID: TFbOSC101572j.C1.o8.fg
atgcttctcggactagagaaaaatcagcacaacggggaggacacatcgcctgaggccaacgattccggcgagctggacgaccagagtaagtccactaccccagaaatggtgttgcacagctcaatcattctcatttacggattcaccaaatcgctaattgcgtcaacagggagcatggagtgctccacctccaccgaaatgtcgagcaacagtggccacagatcaagaaaccgagctcaggacgacgacagcttcgactccgagagcagctcgtcgggcccgccgacggtgaagaggccggcggcggtgaccgccttgctgccaccgttctctaggccgacgccgtcgaagtgggatgatgcagagaagtggatttctagccccacggcgaaccgcggtggccgtgtggggagtgcagctggggctgcgccgaagaaatcggcgctggcatttcctgaacatgtaagccggcctccagccgttgctaaggtggttgctgaggtccccatcaacactggaaccttggtgaagaattcagttgctctcgcacagcctatttcatttaatcctgcacaaagtgcttcgatagttgatgaaccagctcctgcagttaggtctgtttcgatgagagacatgggcacagaaatgactcctattgccagccaggagccctctcggactgggactcctattatagcttctagtccaacctcctctcggacaccaacaccacaacgtaatgcagaaatcagtattggtgaatttggtccaaataagatggaaatgtctgaggaggaactacaaatgaatacaagaaaggaaatcatggatcttggccaacggctgggaaagacaactatagctgcatgggctagcaaggaagagaaatctacaacaagtttcgcaaatgtcataaccgacaaggctgtagaaatcgacagagaggctcgtgctgcagattgggaggaggcagagaaagcaaaatatcttgcaaggtttcagagggaagaggtaaagattcaagcttgggaaaaccaccagaaagcaaaaattgaagctgaaatgaagaggatggaggcaaagatagagatcaagagagctcgcgagcaggacaggctttcgagcaagttggcagctgcaaggcacaaggcagaggcgaggagggaggccgctgagtccaggaagaaccaagaagcagcaagaactgaagagcaggcggctcagatccggaaaaccgggcacataccttcctcaatctcctgctggtgctggtgcctgtga

SEQ ID NO: 11717 - DNA, 516 bp, Oryza sativa
  Clone ID: TFbOSC400879j.C1.o25.fg
atggcggaggtggcgccgccggcgccggcgccggagccgaccaaggacatcgccgaggagagggccgccgtgccggcgccggaggagtcgaaggccatgaccgtcgtcgatgatgctgagaaagctgcagcaacaggtggctcacacgaaagagacgctctcctgacgacggtcgccacggagaagaggatatcgctgatcaaggcgtgggaggagaacgaaaaggccaaggccgacaacaaggcggccaagaagttggccgacatcgcctcatgggagaactccaaggtggccgagatcgaggccgagattaagaagtaccaagagtacctggagaggaagaaggcggagcaggtggagaagttgatgaacggcgtggcgaaggtgcacagggcggcggaggagaagcgagcggcgacggaggcgcggcgaggggaggaggtggtgaaggccgaggaggccgcagcaaagtaccgcgccaagggagagccgcccaagaagttgctcttcggttga

SEQ ID NO: 11718 - DNA, 1482 bp, Oryza sativa
  Clone ID: TFbOSC402100j.C1.o4.fg
atggagcccaagtcttcttcttcctcacactatctgcagccatctgcaacattgccatcaacaagaagaaactcattccaaggagtgggagctgaagctggaggaggaggaggaggcatgaacccattcgggcccacattcagtgacccactctgcagcctcaacctcaaggagacctcagagttcgtgaggtcatccttccccatggctaccatggcgaggagcaacagcagcaacggcgccaccggcaatggcggccatggctaccaccgcgagacctccacggcctcttcatcctcttcctcctcggcctcagctcagaggaggcgagccgagcagcagcagcagcaggtgccagctactccagggcggccattgctgttcttcaattcctcgagccctgcacatcaccagctcgtctccgcgaggaggtcggtgccttccaagtgggaggatgcggagaagtgggtgaggcaggcgtcgtccgaccaccatggcggccatcaccaccaccatggcaagggctccaagcttcaggaggagaagagggcgtcggcggtgaggaggtcggtggatgctgacgtcactgctcttgctctctacactgctcctgctgcagaagtgttcctcaaagacaagttcactgacaatgtggagccctccaaggagagcttcgtgttccggagctcctactgcgagccaacaaagaacacggcggcgcaggcggtggccgccggcaacggcatcgaccaccggcgtgacatcggcacggagatgactccgctgggcagctccaccacctcgaggtgccacacgccgatcaagagcacctcgccggcgaggcacaacacgccggcgagccggtcgggccccctggtgccgtacgccggcggtggcggcggcgccggccaggacatctcggacctcgccgactgccacttcgccaagctggacctcggcgcgcagttcgacgccatgctcatcaactggagctccaaggaggaggaggaggaggaggtgtccaagagcttgaggcacttcgaggccagcgtcgccgccgtcggcgagaagcgcggcggcgccggcgactgccggtgggaggacgatgacagggccaagagctgcataaggtatcagagggaagaggcaaagattcaagcttggatcaacctggagagtgccaaggctgaagcacagtccagaaagctagaggtgaagattcagaagatgagatcaaacctggaggagaagctgatgaggaggatgacgaccgtgcaccggcgcgccgaggagtggagagcgacggcgcaggcgcagcacctccagcagctgaagcgcgccgccgagcaagtccggcgggccaaggccaccagccaccatcaccaccaccaccacctcgccggcagcaacgcctcctgcggctgcttcccctgcaatggcagcaacaacatcatcagtggcaacctcctgaactactattag

SEQ ID NO: 11719 - DNA, 621 bp, Oryza sativa
  Clone ID: TFbOSC400524j.C1.o27.fg
atggctgaggaggaggccaagaaggtggaggtggaggtcaccgaggcgccacccgccgctgccgctgccgcggagacggagccggctgccaaggacgtcgccgaggagaaggccgtcatccccgcccccgcgccgccggccgaggaggagaagcctcccgtcgacgactccaaggcgctggccatcgtcgagaaggttgcagatgaacctcctgccgagaaacctgctcaagggggctctaatgacagagatgttgctcttgcaagggtggaaactgagaagaggaactcattgatcaaagcatgggaggaaaatgagaagacaaaagctgagaacaaggcttcgaagaagctatctgctattctttcctgggagaacacaaagaaagcaaacatagaagctcaactgaagaagattgaggagcaactggaaaagaagaaggctgaatatgcagagaagatgaagaacaaagtcgcgatcgtccacaaggaagctgaggagaagagagcaatggtcgaggcaaagcgcggcgaggaagtcctaaaggccgaggagatggcagccaagtaccgtgccaccggccatgctcccaagaaactcatcgggtgctttggggcctaa

SEQ ID NO: 11720 - DNA, 1284 bp, Oryza sativa
  Clone ID: TFbOSC417639j.C1.o12.fg
atggagtacgagaggatacacaaagttcagatgggagtgatgtctccaaccaagctgaggatgaagctgctgggatcccatggcggcagcatcggcagggttgacgaggcaaagaagtcgccgcgagcgtcgccggcgaggctcgacgccgacgaggacgacgacgaccaccccaagaacagcctcctgccccaagaactcgacgaagattatcccaaggaccagtcggattcttctcgctcgcgctccgacgcgagccatgggagagctggcaatggctacgacagcggcggcttcgagttctacagggaggagaggccgccgccaccgccgccggcggcggtggcggtggtcggcgggacgttcttcaggcaggtgccgtcaaagtggaacgacgccgagaagtggctcgccgggagacacgtcgtgcactccaacccaatcttctccaagaaggccgccgccgcagcagcggccgtgtccggccgcgttgcgccggaggcctcggcgtcgtcgtcgccgccgtcggtggcgagcaggcagcgccagcagaagaggctccgcgtgtcgtcggaggcggcggcggtgtcgatgcgggacgtggggacggagatgacgccgatggcgagcaaggagcagtcgcggagcggcacgcccgccggcgccgccacgccgtcgctgagtccgctctgctcggtgccgacgagcccgaggggcgccgcgtccgcgtcgtcggcgtcgtcggagcgggagctccagatcaggacgcgccgcgagatcgccgcgctcgggctgcagctgggcaagatgaacatcgcgtcgtgggccagcaaggacgacgacgacgagctcccccgcgcctcgccggagaagagaccgagaccgagaccgagacctcactccggcgacggcggcggcgaggccaagaaaagggagttcgaggcgcgcgccatggcgtggcaggagacgcacaagtgcaagctcgcgttgaggtttcagaggaaggaggtgaagattcaggaatgggagagctgccagaaggccaaattcgaagccaagatgaggcacgcagaggtgcaggcagagcagatgaaggcgagggcgaagcagaagctgagcaggaggctgtcggcgttgagccacaaggcggaggggaagcaggcgagggtggaggctcgccggagccggcaggcggcgcggctggcccgccaggtgcaccgcatccgggagaccggcgccgcgccgtcgcgcctccgccgctgctgcagctggctgttcctctga

SEQ ID NO: 11721 - DNA, 738 bp, Oryza sativa
  Clone ID: TFbOSC900142j.C1.o22.fg
atgtggtctgaagcacatggtatcagcactagtcctttgatgaaaaaggtgaaggttattgattgcttatcttgctgtgagcacttcttcaatgggtattatgaaggacggatgtatcaaaatctatggcctgaaatgcttaaattgaatgactggcctatttcaaaccattttgaagagcttttgccttctcatggagttaaatacatcaattctttgccttttcaagcatacacaaacttgaagtctggtttgctgaatgtctcaacattgcttcctgatgacatcttaaagcttgacatgggaccaaaatcatatatagcttatggctatgcacaggagcttggtagaggagattctgttacaaaacttcactgcgatttgtctgatgcagatgcaaatgacttggcctgtcctataaaaagtgagtccgccgaggaaggtgctttatgggatatttttaggagggaagatgttccaaaactgaaattgtaccttgacaagcattctaagaaatttcgccatatatactgttctgcagttcaaaaggtatgtaaccctgtacatgatgaaacattttgtctaacaaaagaacaaaagagaaagctcaaagaggagcatggttatttcactactagaaaaagcattttcgccggcgggggaaactcgtcttcgcaggcggacggccggtccacctgcagcccaaagttcactggcgggctggaggtccgcatttga

SEQ ID NO: 11722 - DNA, 2628 bp, Oryza sativa
  Clone ID: TFbOSC400337j.C1.o7.fg
atgggattaagcgattatgatctaatgggggtggcggtaccagggacgggtgttggtggaccccatcctgaagcccttaaagaaaggatgctttgtaacctctgggaggtgtatactttagctcagagaaatcgaaaatttaatgaacttctgaatgatgaagcgataatgatgaagccttcaaaagaatcgaagaaaagaggtgcaggaaagaaacaagaggaagaagagaataataccatatccattgaggatgaaatgtgtgatgcgaacaataagaaggggaagaagatgctcactggggaaaatgctttgatgtgccaccagtgtcaaagaaatgacaaagggagggtgatttggtgtaaatcatgcaacaataagcgcttctgtgagccatgcatgaaacgatggtacccaggtttgtcagaagttgattttgctgcaaaatgcccatattgtagaaagaactgtaattgcaaggcatgcctaagaatgataggagttgaaaagccccctgaaaagaagatttctgaggaaaatcaacgacgttatgcttttcgtattgtagacttgttgcttccttggttgaaagaacttcaacaggagcagatgaaggagaaggaattagagggtagattacaaggtattggaggattttctaactgcctatttacatttttatttgcaggtgtttctatggatgaagtaaagttggaacaagctgattgtgatatggatgagcgtgtttattgtgataggtgcaaaacttcgatagttgattttcatagaagctgcaaggcttgttcgtatgacttgtgccttgcatgctgctgggagcttcgcaaaggtgagattccaggaggagaagaggcaaagagtgtgcagtgggaagagagaggtcagaagtatgtttttggtaatatttccaaggatgagaagaaaagggtatcttcgaagaggcacatggagacccccagtactgaaacttgcaatgacatggctgttgctggggacccaaataaccctttgttactgtggaaagctaatagtgatggcagtataccttgtccaccaaaggaaatagggggctgcggtgcttcatctttggtactcagatgcttattaccagaaattatgctttctgagttagaacacagggctaacaaagttattaagagagaagcatttgataaagcaataaacgaaacaagtgatcagtgcccttgcttttatcacacaagcaagataagaacaaatgctactcgagaggcagcaaacagaaagggctcaagtgataactacttgtactgtccagatgccaataatatccaggaggatgacctgtcgcactttcagatgcattggtcaaaaggtgaaccggttattgtttctgatgctcttcggttaacatctggtctgagctgggagccattggttatgtggcgggcattgcgagagaagaaaaccaatggtgatgttgaagatgagcactttgctgttaaggcagtggattgccttgattggaatgaggtggaaattaacatacacatgttctttatggggtatatgagaggtagaagacatccgatgaccttttggcctgagatgcttaagctaaaagattggccaccatctagtatgtttgaccagaggttacctcgccatggtgctgagtttataactgcattgccatttcccgagtatactgatccacgatatggcccgctaaatcttgctgtcaggcttcctgctggtgtactgaagcctgatcttgggccaaaaacttatattgcttatggatgttatgaagagttaggcaggggtgactctgtgaccaagcttcattgcgacatgtctgatgcggtaaatatcttgatgcacacagctgaagtgtcctatgacactgaacagcttgacaagatagcaaaaattaaaatgaaaatgagagaacaagatcttcatgaactgtttggggtttcagaatcaggcgccaagggtaaagctgatgatgaagcatcgaaaatctcatgtaacatggaaaacaaacacacctctaaccaaagtactaagggtttggacattaatgctttaccacctgatgattctggaagtgatattggggataaaccatcattttgtcaatctgaggtttctcacccaattcatgaccagactttctatttaactgtggagcataagagaaagctcaaggaagaacacggtgttgaaccatggacattcgagcagaagctaggcgatgcagttttcattcctgctggatgtccacaccaatcttgcatcaaggttgctctagactttgtttcccctgaaaatgttggtgagtgtgttaagctgaccggagagtttagacgtcttccatctgatcacagggctaaagaagataaactagagattaagaagattgctctcaatgctcttaaagaagtcgtaaatttcttagatcctttaccaaaagggtcaaagaacagggatgaagtggtagaagtgaccaaaccaaaaaggaaatacggtaaccgaagaggtgacctgaagagtggggaagaccaacccattgatgaatccatagaagaaaggaagcctaaaaagcgagggagatctaaacggtga

SEQ ID NO: 11723 - DNA, 2994 bp, Oryza sativa
  Clone ID: TFbOSC400891j.C1.o23.fg
atgccgcccaagaggaagcgcggtggcgggaggccgcgcaaggccccggaggacgccgccgccaaggaaaacggtgagaagacaaacaaggaggaggaaacgcaggcttctcctgaggagaatggcgcagggcagactcaggcctcgagaaccgcaagaaagcgcaggaagggtcctgttgctgatccctcttcgactgaacttccacccaggaagctcagggacaggcggaacgttccagcggtagactacaaggagaataagcacacaaaaaagatggatggaacttcaaccatgtgccatcagtgccaaaggaaggacagtggaagagttgtgaggtgccggaatggtgctgaaaaaaacaggaggcacagatattgtgtcaagtgcatcaaacgctggtacccgcatctaacagaggacgattttgagaactgctgtccagtttgtcacaataactgcaattgtaagacttgtctgcggacaaatgtaataaataagggtgacaaggagtttgccgatggtaagaacaaaattaaatactctctgcgtattgcacgctttttgctcccttggttgaaacaacttcaccaagagcagatgctagagaaaagtgttgaggccacaattaaagggatcgatgtaactgacttggaggttcctcaagctcagtttaataatgatgagcggatttactgtgataactgcagaacatccattgttgacttccacagaagttgtaaaagtggtcactatgatctctgcctcagctgctgccaggagttgcgtcaaggtcttactactggtactgttgtcacttgtgacacagctgttgatgtacctgaaatagaaggcaaggaaggtttgcaagagggaagtagtcatagcagtgctgtaggtcaaggggcttctgatcaacagaatgacaggttgataggtagtgcagctccttcagaggattgcactcctagtttgatatggagggcaaaaagcaacggaagcataccatgcccacctaatgcaggtggttgcggggattgtcttctcgaacttaggtgtttgtttaaggagaactttatttctgatttactggataaagtcaattcagtggtcaataaggaaacagagcaggagttgggaggctctagatgttcctgcttcactgaatccggtgaagtgaacaatgaaacatcacggaaatcagcttgcagagaggactccaatgataactacatatattgtccaactgctagagaagttcaaagtggagctttagatcattttcagcagcattggttgaatggtcagccagtcattgttcgtgacgtgcttgagctaacttctggactgagctgggagccaatggttatgtggcgggccttacgggaaaagagagacaagaaagagcatgaacggctctcagttatagctcttgattgtctgacatggtttgagtttatgtaccaccaggatgtgttggtggtgccagtttcatatctggggttcaacagcaccattgaaactactttatatttcaaactggttgatataaatattcacatgttttttgaggggtattcccgtggagctgttggttcggaggatttgcctgtgctacttaagcttaaagattggccacaacatagttcctttgaggagcgcctgccgcggcatggtgctgagttcatgtctgcactaccatttcgtgagtatacagatccaaaatctggtccccttaatctggcagtgaagcttccaaaacatgttaaaaagccagatcttggtccaaagacatacattgcttatggtgtcgcccaagagttgggaataggtgattctgttacgaagatccattgcgacatgtctgatgcggttaatattctcatgcatactgatgaggtagaactcaaagctgaaaggattacagcaatagagaaaaagaaagagagcttacgtaaagatggcaagaatcttcatgttctgcgaccagaccatgacgatgatacatcaatagctctcagtgaatcaactgaagtgccaagatctcgaggacttgaaaatggctcaagcattaagcagccagcaccaaatgttgctgtaatggaccagggaggtgttcatacagatatggtagctgatgaagctgagggaaacttgagtctgtctaatgggcaatcacccaatcaaagtgatgcacataatatggatattactttctccaagggggaaacagaccattctatctgcacaattaatgggggagaggagatgggcaatggctttgggagggaagataaatgtaaatcttctcatggtgtaggatcatctgaatcttctgattgtcaaagacgcagtaggcgacgtgatgcttgctcttccagtgcaacaggggaaataaacgaaaccagcatggagactaacaaatttaccatatctattgagcccaaagatgatcacccatttgttgagggaaatcagacagagggtggtgcattgtgggatatcttccgacgtgaagatgtcagcaaattgcatgattatctgatgaagcatgcagaagagtttagacattataattatgaaacagtcaaacaggtttctcatcctattcacgatcaatgcttttatctaacaaatgagcacaagagaaagctcaaggaagaacatggaattgagccttggacatttgaacagaaacttggtgaggctgtgtttatcccagcaggatgtccccaccaagtcagaaatttgaagtcatgtataaaggttgcacttgactttgtttctccggaaaatgtgcaagagtgcatcaggctgacagaagaatttcgcttgcttccgaagggtcatagggtgaatgaagataaactagaggttaagaagatagctctatatgcacttgatcaagccattgacgatatcacaggcaaaagttgcaatgaaaggacaaaggatgaaggggaagaggaggcgtctgccccaagtgttagttaa

SEQ ID NO: 11724 - DNA, 1788 bp, Oryza sativa
  Clone ID: TFbOSC420889j.C1.o1.fg
atggggagcgcgcccctgctcggcaccaccgtcgacgaggaggatttctcgccgccgagcaccagcggccgcggccgcggcggcaggaagcagggacgcgggaggggtgggaattcgtgccaccaatgcaagagggtgaagccgcggccggaggagatggtcaggtgccagctctgcggcgacaaggtcttctgcgccgcatgcatcaagaacaagtacccggagatgcagcaggccgaggttagagataagtgccctttctgtcgaaatatctgcaactgcactcgctgcaatcccagtgacaagtcggatggacccaggaacccatttgtcaggagatgtaacagcagtagttcagtaaaacggagagtgaagactgctgcctcaggtttaagatgcagggttgatactgcggcactacaggcaaaagcaattgataaattagaagctaacagtaggataaacaatgaatctgccatgttagataaggcagatacactagatgtcaggactgatgaggttgacactgaaactaaaagcaaatatgccaactacatgctacactacttggcgccacatttgacaaagctgaacaaggaccagatgagtgagatagaaaaggaggctaaaattcaaagattggaattgtctcagttgagtgtggagcaggctgcctgccggcatgatgagagagtattctgtgaccattgcaaaacttcaatctttgatctgcatagaagctgtccaggctgctcctatgaattatgcatcgtctgttgtaaggagctccgcgaagccaaacttatgggctcttgtaaggaagaactgttctcttatcctaatagaggacctgactacatgcatggtggtgatggtgattcagtaccagagttgataaactacaaacaaggagacctgtctagcaaccaatctaaggacatacagtggcgtgttgattctgacaagatttattgtcctccaactgaacttggtgggtgtggtaatcatattcttcagttgagacgaatattttcaaaagactggttgagtaaactcgaagtggatgctttccaaatgcgtaaacaattagaaccatctgatattatcggtagagacacttgtgagtgctcatgttctactgatcatgcaagttcaaggaaagctgccagcagagaggattcgactgataactacatatactgccctacattggataatggaaagccagaagatctcacacacttccagaagcattgggtgaaaggcgaacccgtaattgttcaacaggttctcaagaaaatgtcatgtttgagttgggagccaccagatatgtggtctaaagtacatggcaccggcactagtcctgagatgaaaaacgtgaaggctattgattgtttatcttgctgtgaggtcgagatatgcactcaagacttcttcaatgggtattatgaaggtcggatgtatcaaaatctatggcctgaaatgcttaaattgaaggactggcctacatcaaatcattttgaagagcttttgccttcccatggagttaaatacatgaattctttaccttttcaaccatacacaaacttgaagtctggtttgctgaatgtctcaaccttgcttcctgatgacatcttaaagcttgacatgggcccaaaatcatatatagcttatggctatgcacaggaacttggtagaggagattctgttacaaagcttcactgcgatttgtctgatgcattcatgaagagtccttgggcaagttcattttcttctttgaagacttaa

SEQ ID NO: 11725 - DNA, 2754 bp, Oryza sativa
  Clone ID: TFbOSC401978j.C1.o35.fg
atggcggcggaggaggtggaggcggcggcgatcgacggatccggcgaggaggcgaagcggaagagtggtaagcagaggggatcgggcgccaaggggaggcgccggaacggcgaccgggctttccgcccgccggcgatgaggccggaggaagaagggcgcggtgttgcgacgaggcccggggcgctcagggaaaggaagccgccgcccaacgccttcaacgcgccagacgatgatgaggatgtcgagaaaactgatcaacttctcgagcctctcaacaagcccaaaagacgtgatgcagggaagaagagaggacccagaaaaaagaaagtggatcaagagaacatcaaaacccacaggcataacgcaaatgcagtaaaaggcaagatgttagtcaatgataaggtttcgaagactgaaaagaagcaaagggaagaaaatgttgacaggtatcctgatttgcctgaaaatgaatttgctgcaaaatgcccttattgtcgcaagaattgtaattgcaaggcatgcctgcgaatgagaggtgtcgaagagcctccaagaaaggaaatttctaaagaaaatcagattcgttatgcctgtcatgtgttacgcttgttgcgtccttggctgatagaactgcgacaggagcagatggcagagaaggaattagaggctaagatacaaggtgtttcagttgatcaaataaaggtggaacaagctgagcttcgcaaaggtgagatccctggaggagaagaggtggaaattttggatcctgaagaaagagacaaggattatgcttttggtaagattctgtcagatggtgagaaccaaagggactctttgaagtgtcgcagcgacacccaaaacagtgagtcaaacaaaggcatggcttctgacgaaaaccaaaagaaggctctgttactttggaaagcaaacagtaatggtagcataccttgcccacgaaaggaaaaggaagactgcagtttttcatctctagatctgaaatgcttgtttccagagaagttgctccctgaattagaagatagatctgagaaggtcttctggagtgaaacatttgcaaaagaactaggtagaacaagtgagctgtgcccttgttttgatcactcaggcaagataagaagtgacagcaagaaattacgtcaggctgcaaatagggaggactcgagtgataactacttatactgtccggtggccactgatatccaggacgctgacctgttgcactttcagatgcattgggcaaagggcgaaccagttgttgtttcagacactcttaagctaacttctggtcttagctgggagccgatggttatgtggcgggcagtacgagaacgaaccaaagggaaggcagaagatgagcagtttgctgtgagggcagtagattgcctcgactggtgtgaggtggaaattaacatacacatgttttttatgggatatacaaggggcagaactcatcccaggacctactggcctgagatgcttaagctaaaggactggcccccttctagctcatttgatcagcgattgcctcgccatggtgctgaatttatcagtgcattgccatttccggagtatactgatccacgatatggtccgctaaatcttgcagtgaagcttcctggtggtgtcctgaagccagatcttgggccaaaaacttacattgcctatggattttctgaagagttgggcaggggtgactctgtaaccaaacttcactgtgacatgtctgatgcagtaaacatcttaacacacacagcggaagtgccctgtgagacttatgatgctgttcagattaaaaacacgcagaaaaagatgaaaatgcaagatgacatggaaatatatgggatgatagaatcaggcagtgaactcaagccatcagcatgcccagttgaattggggaacaaagctgttggtgaagcaccaaaggcctcatgcagcaaagaaaatgttcataccttgaaagacaagtctaatggttggtggagaaaatatacttttggtttggatataaacgcttcaccacctgatgatgctggaggtgatgccagggatgaagcattgtcctatgaatctgtggtacatagtgatgtagctcagtgtccaaaccataaccatgagaccaataattctgatgatgcacgtattggagctcagagatgtcaaaagaaagctaaaggtcgtcctccgaagacaggttcaggggtatcagagcaccaggaaagtggtggtgctttgtgggatattttccgaagagaggactctgagaaattacaagacttccttaggaagcatgcgccagaatttcggcacatccactgcaatccagtgaaacaggttattcatccaattcatgatcaagctttctatttaactgcggagcataaaagaaagctgaaggaagaatatggtgttgaaccttggacctttgaacaaaagcttggcgaagcagttttgattcctgccggatgtcctcaccaagtcaggaatttgaagtcctgcatcaaggttgcactggactttgtttcccccgagaatgttggtgagtgtgttaggctgaccaaggaatttagacgacttccatcttcccacagggctaaagaagataagctagagatcaagaagatggctttccatgctctgaatgaagttctaaactttctggatcctccttcctcagaagggtcgaaagaagcggcggagaagcctcgaagggggcgtggtcgcccaagaaaacactag

SEQ ID NO: 11726 - DNA, 2742 bp, Oryza sativa
  unsure (1)..(2742): unsure at all n locations
  Clone ID: TFbOSC420010j.C1.o2.fg
atggaggcggcggcggcggcggccgccgtgccgcgaggagctgcggtgcaagcgctccgacggcaagcagtggcgatgcagcgcgccctcatgcccgacaagaccgtctgcgagaagcactacgtccaggccaagaagcgcgccgcctcctccgcgctccgggcctccctccgcaggtcctcagcctccgcctccgccgcgcggggcacgaccccgcctgcgcggatggcggtcggcaggcccatctccggcagggtcgcgggggagccggtgcacgtcgcggagctggtgntcncgccgctgcggccgccgccacggaggaggcagccggtccacgggctgcccatgggcaatgctgccggcgcgcgcaccgcggcggagctggtcgggaggggctcggcggggctggttgcctgcagctcggcggcgggggcggcagcggccgcaacctgccatcagtgccggagggtcgctaataccatttgttgtacaagctgcgacagaagggggtactgcaccaactgcatctcgagatggtactctgatatcccaattgatgatgttcgaaaggcaagggttcaggagatatctgctgtagataagttggaatatcttcatagcattctggcatctgtccttccagtattaaagcagatttattctgatcaatgtttcgaaattggtgttgatacaaaagcttatggacttaggacagatataatcagggcgaaggtcaatcctgatgagcaaatgtgctgtgatacctcaaattatcctcgcagtgacttctgcaaagtgccagtatttgattatcaccgacactgcccaaggtgtttgtatgacttatgtcttgactgttgtcgagacataaggcgatctaggaccagtgttgcaagaggagaatatgctgaaggtcgtgtggtagatagaagtaaagatacttcgaataaaagagcaagaatggaaccatctgcagaaagtgcaaatgataagtcagtcccacaacgaagggacataaaaaatattgacattagatctttattccctacatggagagtcaataatgatggaagcattacttgtgggcctcatgaggctggtggttgtggctcctcgaagttagtgttaaggcgaatattcaaaataaactggattagtaagcttgtaaaaaattctgaggaaatggtcaatggttgtaaagtacatgttcttgagaatggatgctcatcctgcaatgatggcagaacattagagttaactggtcatcgtaactttggtgtctcaacatgttcaaataatggtggtattgatcggttctgtgtgttctctcctgtattagaggacttgaaatctgaaggtattattcattttcgtaaacactggataaaaggagaacctgtagttatcaggaatgcgtttgagccttctctgtcatcaagctgggacccactaaatatttggcgaggaatccaggaaatcatggatgaagaagtggatgacgatgtcattgtcaaagctgtggattgctcaaaccaagcagaggtggatattgagctgaaacagtttatcaaaggttattcagatggtcacaagggggaagatggggaattgatgatgctgaaattgaaagagtggcccccacccagtgtattggaggagtttctgctatgccaaagaccagaatttattgtcaattttccattagttgattttatacattccaggtgggggctcctaaatctttctgctaaattgcccccagacaccctacaacctgaagttggcttgaagctgttaattgcatatggaagacatcaagaagctggtaaagatcctgttcgaagattcgtgctgtcaagcaccagagtaaaggtgcatatgctaatgcatacagccaaagggcatgacgtatgtccaaagaggctacaacctgagcgatctgaaaagattgccaatggaatgacaatgcatgtaaatgctcatgcacctgttcaaaatttgaatgtggatatgggggaacaatcacctgaccatgtaagctcaaagtttgatgaaagagcgcatgcgtctgccttgcgattacaagagaagtcttcagatgccaaacttaattgtggtttcgaaggctcttcaactgagttatcttgctcgtcacattcagaggaaccaaaagttaatggttcagaaagaagtcaggctggttctgtttgggatgtgttccgcaggcaggatatttcaaagctgaatgaatatttaactgctaactgggaagaactggcagctagtagtcaggttaagaatcctatttatgaacaatctatatatctcaacaagtatcataaaaggatactgaaggatcaatatggaattgaaccctggacattccaacaacatatcggtgaggctgtatttgttcctgctggctgcccattccaagtgaaaaatctccagtctacggttcaattggctcttgatttcctgtcaccggaaagtttgggggagtcggcccgaatggcccaggagattcgctgcctaccaaatgatcatgatgcaaaactgaagatgctcgagattggaaaaatctctttatatgcagctagttctgctgtcagagaaattcagagaataaccctcgatcccaagtttaatctagaccttaaattcgaggatcagaatctaactcaggcggtttctgagaacttggctagagtcaccaaacaacggaatgtaccatgcagctga

SEQ ID NO: 11727 - DNA, 2742 bp, Oryza sativa
  Clone ID: TFbOSC401726j.C1.o12.fg
atggaggcggcggcggcggcggccgccgtgccggaggagctgcggtgcaagcgctccgacggcaagcagtggcgatgcagcgcgccctccatgcccgacaagaccgtctgcgagaagcactacgtccaggccaagaagcgcgccgcctcctccgcgctccgggcctccctccgcaggtcctccgcctccgcctccgccgcgcggggcacgaccccgcctgcgcggatggcggtcgcgaggcccatctacggcagggtcgcgggggagccggtgtacgtggcggagccggcgctgccgccgccgccgccgccgccacggaggaggcagccggtccacgggctgcccatgggcaatgctgccggcgcgcgcaccgcggcggagctggtcgggaggggctcggcggggctggttgcctgcagctcggcggcgggggcggcagcggccgcaacctgccatcagtgccggagggtcgctaataccatttgttgtacaagctgcgacagaagggggtactgcaccaactgcatctcgagatggtactctgatatcccaattgatgatgttcgaaaggcaagggttcaggagatatctgctgtagataagttggaatatcttcatagcattctggcatctgtccttccagtattaaagcagatttattctgatcaatgtttcgaaattggtgttgatacaaaagcttatggacttaggacagatataatcagggcgaaggtcaatcctgatgagcaaatgtgctgtgatacctcaaattatcctcgcagtgacttctgcaaagtgccagtatttgattatcaccgacactgcccaaggtgtttgtatgacttatgtcttgactgttgtcgagacataaggcgatctaggaccagtgttgcaagaggagaatatgctgaaggtcgtgtggtagatagaagtaaagatacttcgaataaaagagcaagaatggaaccatctgcagaaagtgcaaatgataagtcagtcccacaacgaagggacataaaaaatattgacattagatctttattccctacatggagagtcaataatgatggaagcattacttgtgggcctcatgaggctggtggttgtggctcctcgaagttagtgttaaggcgaatattcaaaataaactggattagtaagcttgtaaaaaattctgaggaaatggtcaatggttgtaaagtacatgttcttgagaatggatgctcatcctgcaatgatggcagaacattagagttaactggtcatcgtaactttggtgtctcaacatgttcaaataatggtggtattgatcggttctgtgtgttctctcctgtattagaggacttgaaatctgaaggtattattcattttcgtaaacactggataaaaggagaacctgtagttatcaggaatgcgtttgagccttctctgtcatcaagctgggacccactaaatatttggcgaggaatccaggaaatcatggatgaagaagtggatgacgatgtcattgtcaaagctgtggattgctcaaaccaagcagaggtggatattgagctgaaacagtttatcaaaggttattcagatggtcacaagggggaagatggggaattgatgatgctgaaattgaaagagtggcccccacccagtgtattggaggagtttctgctatgccaaagaccagaatttattgtcaattttccattagttgattttatacattccaggtgggggctcctaaatctttctgctaaattgcccccagacaccctacaacctgaagttggcttgaagctgttaattgcatatggaagacatcaagaagctggtaaaggtgattcagtgacaaatctaatgattaacatggctgatgtggtgcatatgctaatgcatacagccaaagggcatgacgtatgtccaaagaggctacaacctgagcgatctgaaaagattgccaatggaatgacaatgcatgtaaatgctcatgcacctgttcaaaatttgaatgtggatatgggggaacaatcacctgaccatgtaagctcaaagtttgatgaaagagcgcatgcgtctgccttgcgattacaagagaagtcttcagatgccaaacttaattgtggtttcgaaggctcttcaactgagttatcttgctcgtcacattcagaggaaccaaaagttaatggttcagaaagaagtcaggctggttctgtttgggatgtgttccgcaggcaggatatttcaaagctgaatgaatatttaactgctaactgggaagaactggcagctagtagtcaggttaagaatcctatttatgaacaatctatatatctcaacaagtatcataaaaggatactgaaggatcaatatggaattgaaccctggacattccaacaacatatcggtgaggctgtatttgttcctgctggctgcccattccaagtgaaaaatctccagtctacggttcaattggctcttgatttcctgtcaccggaaagtttgggggagtcggcccgaatggcccaggagattcgctgcctaccaaatgatcatgatgcaaaactgaagatgctcgagattggaaaaatctctttatatgcagctagttctgctgtcagagaaattcagagaataaccctcgatcccaagtttaatctagaccttaaattcgaggatcagaatctaactcaggcggtttctgagaacttggctagagtcaccaaacaacggaatgtaccatgcagctga

SEQ ID NO: 11728 - DNA, 2039 bp, Oryza sativa
  Clone ID: TFbOSC900031j.C1.o1.fg
gacttaggacagatataatcagggcgaaggtcaatcctgatgagcaaatgtgctgtgatacctcaaattatcctcgcagtgacttctgcaaagtgccagtatttgattatcaccgacactgcccaaggtgtttgtatgacttatgtcttgactgttgtcgagacataaggcgatctaggaccagtgttgcaagaggagaatatgctgaaggtcgtgtggtagatagaagtaaagatacttcgaataaaagagcaagaatggaaccatctgcagaaagtgcaaatgataagtcagtcccacaacgaagggacataaaaaatattgacattagatctttattccctacatggagagtcaataatgatggaagcattacttgtgggcctcatgaggctggtggttgtggctcctcgaagttagtgttaaggcgaatattcaaaataaactggattagtaagcttgtaaaaaattctgaggaaatggtcaatggttgtaaagtacatgttcttgagaatggatgctcatcctgcaatgatggcagaacattagagttaactggtcatcgtaactttggtgtctcaacatgttcaaataatggtggtattgatcggttctgtgtgttctctcctgtattagaggacttgaaatctgaaggtattattcattttcgtaaacactggataaaaggagaacctgtagttatcaggaatgcgtttgagccttctctgtcatcaagctgggacccactaaatatttggcgaggaatccaggaaatcatggatgaagaagtggatgacgatgtcattgtcaaagctgtggattgctcaaaccaagcagaggtggatattgagctgaaacagtttatcaaaggttattcagatggtcacaagggggaagatggggaattgatgatgctgaaattgaaagagtggcccccacccagtgtattggaggagtttctgctatgccaaagaccagaatttattgtcaattttccattagttgattttatacattccaggtgggggctcctaaatctttctgctaaattgcccccagacaccctacaacctgaagttggcttgaagctgttaattgcatatggaagacatcaagaagctggtaaaggtgattcagtgacaaatctaatgattaacatggctgatgtggtgcatatgctaatgcatacagccaaagggcatgacgtatgtccaaagaggctacaacctgagcgatctgaaaagattgccaatggaatgacaatgcatgtaaatgctcatgcacctgttcaaaatttgaatgtggatatgggggaacaatcacctgaccatgtaagctcaaagtttgatgaaagagcgcatgcgtctgccttgcgattacaagagaagtcttcagatgccaaacttaattgtggtttcgaaggctcttcaactgagttatcttgctcgtcacattcagaggaaccaaaagttaatggttcagaaagaagtcaggctggttctgtttgggatgtgttccgcaggcaggatatttcaaagctgaatgaatatttaactgctaactgggaagaactggcagctagtagtcaggttaagaatcctatttatgaacaatctatatatctcaacaagtatcataaaaggatactgaaggatcaatatggaattgaaccctggacattccaacaacatatcggtgaggctgtatttgttcctgctggctgcccattccaagtgaaaaatctccagtctacggttcaattggctcttgatttcctgtcaccggaaagtttgggggagtcggcccgaatggcccaggagattcgctgcctaccaaatgatcatgatgcaaaactgaagatgctcgagattggaaaaatctctttatatgcagctagttctgctgtcagagaaattcagagaataaccctcgatcccaagtttaatctagaccttaaattcgaggatcagaatctaactcaggcggtttctgagaacttggctagagtcaccaaacaacggaatgtaccatgcagctga

SEQ ID NO: 11729 - DNA, 252 bp, Oryza sativa
  Clone ID: TFbOSC29814j.C1.o1.fg
atgcagttcgaggacgggggagatgttcatgttggtgccggtgagggtgaagatggtggcagggtcacagtggatgagcttaccagatgtctacgttgtggcatcagtgcaaatgcgacgcctcatatgcgccgtggaccagagggacggagaactttatgcaatgcttgtggtatagcatgggcaaagggaaaagtgcgaaaagttattgattctgatacccccatggataatgccatgtttgcacaaatg

SEQ ID NO: 11730 - DNA, 4356 bp, Oryza sativa
  Clone ID: TFbOSC404332j.C1.o19.fg
atgactatgatgacgcctcccccgctcgagccggaggaggacgagatgctcgtgcctcaccaggagctcgtcgctgctgacgccgcccagcccatggaagtggttgcgcaaacggaggcagctagcacggcggagagccagccagctgaggacccgcagacgtcgcggttcacgtggacgatcgagaacttcacccggatcaatgcgaagaagcactactcggatgcgtttgtcgttggcgggtacaaatggcgtgtgctcattttccctaaggggaacaacgtggaccatttctccatgtacttggatgttgccgactctgctaacctcccatatggttggagccgatatgctcagtttagcttggccgttgtcaaccagatccaacagaagtatacgatacgcaaagatactcagcatcaatttaatgcacgtgagagtgattggggtttcacatcttttatgcctttgagtgagctctatgatccaagtagaggataccttgtcgatgatactgttgttgtggaggctgaggttgctgtccgcaaaatggttgattattggacatatgattcaaaaaaagaaacaggttacgttggcctgaagaaccaaggagctacctgttacatgaactctctactacagacactataccatataccatacttcaggaaggctgtgtatcatatgccaaccaccgaaaatgatatgccatctgggagtattccgttggcattgcagagccttttctacaagctccagtatagtgacaatagtgtagccaccaaagagctgaccaaatcttttggatgggacacatatgattccttcatgcaacatgatgtacaagagctcaacagagttctctgtgagaaacttgaagataagatgaaggtgacaaatctgagaactgtcgtagagggaacgattgaaaagttattcgaaggtcaccacatcaattatatagagtgtataaatgttgactataaatccaacaggaaggagtccttttatgaccttcaacttgatgttaaaggttgtcgtgatgtgtatgcatcgtttgataaatatgttgaagttgagcgcctcgaaggtgataataagtatcatgcagagaatcatggtttacaggatgcgaaaaagggtgttctgttccttgatttccccccagttttgcaacttcaactgaagcgttttgagtacgactatatgagagataccatggttaagattaatgaccgctatgaattccctttgcaacttgatttggatagagatgatggaaaatatcttgctccagatgcagatagaagtataagaaacctttatgctcttcacaggtataaatttgatgatgagcgtgtaactaaagaagatactaagaaggcccttgaagagcaatacgggggtgaggaagagttgcctcaaataaatcctggtttcaacaacgctccatttaaattcacaaagtattcaaatgcctacatgcttgtctacatccgtgagagtgataaggacaaaataatgtgtaatgttgatgagaaggacattgctgagcatttaagggtaaggttgaagaaagaacaagaagagaaagaacacaaaaagaaagagaaggctgaagctcatctttataccatcataaaggtggctcgagatgagaatttgaaggagcaaattggcaaggatatatattttgacctggtggaccatgaaaaagttcgtagcttccgaattcagaagcagttactgtttaccactttcaaggaggaagttgcaaaggagtatggcatccctgtacaatttcagcgcttctggttgtgggctaagaggcagaaccacacatacaggcctaatcgtccattgagtcctcatgaagaaacacaatctgtgggacaactgagggaggtatcgaataaggcacacaatgctgagctgaagttgtttttggaagtagaacttggcccggatttgcggcctctccctccacctgagaagagcaaggaagatattcttctgttcttcaaactctataatcccgaaaaggaagaactctgttttgtggggaggctcttcgtaaaggccttgggaaaaccctcagaaatcttgaccaaactaaatgaaatggctggatttgtgccaaatgaagaaattgagctctacgaggcaagagctaaattcatgatgctatatttatgggataatctagtatatgtcactccattgaggcgtgttctaggagaaattaaatttgagccaaatgtgatgtgtgaacatattgacaaaaaagccactttccgtgctagtcagcttgaagatggggacatcatctgtttccaaaaatcacctatacctgatagtgacactcaaatgcgttatccagatgtcccttcgtatctggagtatgttcataataggcaggttgtgcactttcggttattggagaaaccaaaggatgatgacttttctttggaattgtcaaaacttcatacctatgatgatgttgttgagagagttgcccgtcagcttggtgtggatgatccagcgaaaattcgtctaacatcccataactgctattcgcagcagcctaaaccgcaacctatcagatatcggggagtggagcatcttttggacatgctcattcattataatcagacatcagacatattgtattatgaggtgttggatattccactgccagaattgcagggcctgaaaaccctgaaagttgcattccaccatgctacaaaggatgaggttgtgattcacagtatcaggcttccaaagaatagcaccattgcagacgtgattaatgatttgaaaacaaaggttgaactatccagtcccagtgctgaattgcgcttgttagaggtcttttaccacaagatatataagatttttccactccatgagaagatagagaatattaatgatcagtactggacactacgtgctgaggagattccagaggaggagaaaaatctcggtccaaatgatcggttaattcatgtttatcacttcatgaaagaccctcttcagaatcagcagattcagaactttggagatcctttttatcttgctatccgtgaaggtgagactttagcagaagtaaaggagcgcatacagaaaaaactccaagtccctgatgaggaattctgcaagtggaaattcgctttcatatccatgaaccggccagattacctccaagattcagatgttgtatctgcccgtttccagaggagagatgtctatggagcctgggagcagtatcttggtttggagcatgctgatactgcaccaaaaagggcctacacagccaatcagaaaaaattaaccagaattactgccgcagttagtgcggcgctgggttccgtgatagtaatagctgatgaaatttttgcatcaacttatatattgacaatattgtccaaaaaattatatctcatgtcgcgtataaaatttggagtcacgcgttcgatattcttctctcgtcactacgatctcaacaaagctccagtccacttaacactgcaactcccaacctcaccaatggacaacccgacgccgtcgtcgagctccggcggtggcggcgccgccgccgccgccaatgccagctccgacgagcaccgcaagacgtcgccggcgacggccgctgatttcttcgacgaggagcacaccttcgacgatatcctgctcccggtggacttgttcgacttcacgcacggactcgacgccggcgacggctgttacgtagacgatcaggctgcgattgggcagaagccgctgtcgccggcgccggagccggcggcagagcagcagccgtcgccggcgccggagcacggcgacgatgagcggctggtgatgtactaccaaggacaggagtacatcttcgaccccgtgcagccgcagaagattgaaaatatcttccaccatctgaatggacaggagatgattccacagagcatcaggccacaacccactaacctggtaagacccatcactgttcccgaggacttcgacaggtttgctgcgctgacgcggtatagggagaaaaagaggaacatcaagttcatcaagaaggcggattacagtgcccgaaaggaagtcgctttgcggatgaaacgcagcaaagggaaatttgcacctagggttcagacctctgaaaattccttggcacacagaaaggggataactttctgcaccaactgtggtgaaagcagcgacgccacacccatgatgcgccatgctcccaatggaaccaaatcattttgcaatgcttgtgggttgatgtgggcgaactcgagaaaaataagaaagatcagaaacccaacttccggggagcaagaagatcaataa

SEQ ID NO: 11731 - DNA, 629 bp, Oryza sativa
  Clone ID: TFbOSC30845j.C1.o1.np
gaattcctgcagccccaaaatttgctataggatatcgtgacttcgcggttttagctgtacgacaccgatgggttcagaccaaggaagctgccgagctcgattactagtcgtctgcacatgccgcaatggcggcggcagcggcgcctgcttccgcggccaacaacggtggcggcaactggcctggtcaagacagctgtctcacggcagcgcctgggcgcggcgcgcatagcaagaggtcatgcgcgacggccgcgaccgccgctgcgtggcacacccttggcccacatccgacattttagtcgtcgctgtcatcgtcccgcccgtcgtccgacttcccgtcctctaaaaagctgtcggccacaaggctgaacggctccagcggcagccgcggcaagaagagccccggccccgcgggggtgaaggtgggcatggaggccggcgtgtacgtggcggtgcatgcactgcgcgtcggagaaaacgtcgtagctgctgacgggtcccctgggtcccaagaccctctgcaacgcgtgtggcttgaggttcatgtctgggcggctgatgccggagtacaaggcggcggccatgccacctctgtggttgacgacgagcggcggcgaccatagtagtat

SEQ ID NO: 11732 - DNA, 888 bp, Oryza sativa
  Clone ID: TFbOSC413617j.C1.o3.fg
atggcttcctccaccttctcgctcttcttcccgatgtccaatgggcagtgttggccgccgtcgacggtggaggagtccgcggcctacgacgaccacagcaccgtcaccacctctccttcctcgccttcgtcgtcctccaccggctccgtcgactgcacgctctcgctcggcacgccgtcgtctcgccgcgccgagcccgtcgcggcggcggcgccagcggcaaaccatggggcgcccgtgccggcgcattatccgtcgctgtcagcggcgaccgtgtcctgggacgcgactgccgagtcgtactattgtggccagcaggggaggccggccaccggcgccgccaagtgcgccgccggcgccgggcacgacgcgctcctcgaccgccgctgcgccaactgcggcaccgcgtccacgccgctctggaggaacggccctcgcggacccaaggttcgtcgccggcgacgctcgctctcgccgtcgctgttctctatctctgcagttcacttcgcggtttcgccgacgtacgtcgtgtcgctgacattgccgccgtcgtacgtttctctgcagtcgctgtgcaacgcgtgcgggatcaggtacaagaaggaggagcggcgcgcggcggcgacgacgacgacggccgacggcgccgccggatgcggcttcatcaccgcgcagcgtggacgcgggtcgaccgcggccaaggcggcgcccgccgtgacgacgtgcggcgaggagacgtcaccgtacgtcgtcggcggcggcggcggcggcggcgaggtcgcggacgcggcgtatctcgcctggcggctcaacgtcgtcccaccggcggcgacggcgacggcgttctcggtgtggccggagcgagctagcctctaccactacaactag

SEQ ID NO: 11733 - DNA, 1313 bp, Oryza sativa
  Clone ID: TFbOSC100956j.C1.o1.fg
gtactcctctctggagaaatgggccaccagataagccagtgctctgcaatgcatgtggctcaagatggagaactaagggttcgctgacgaattacacaccaatgcatgctcgggatgatattgatgctgaggaacctagagctagcaagctgaaacctccaacattgaagctgaaggaacagaagcaactgaagaaaaatccaagccacatcacaatggagaatggaccattttctgatcaaaacttccgtaagatgggagatcctgacctaagtaatcgatctggttctggatcagcactatcatactcagagagttgtgccccctatggcactgctgatgcaagtgaaatgactgcttcagcacaatcacatgcttgggaatcacttgtgccatcaaagagaaggagttgtgtcactcggcctaagccttcacaaatggaaaaacttgcaaaggatcttaattccataatgcatgaagagcagctactttacctttcaggatcctcagaggaggatctaatttaccatagtgcaactcctgtggattcctttgagatgggatatggaagtatgcttctcagaccaaattcaaaatcactggaggaagaatcagaagcaagctctattcctgctgataataagtcatatattactagtgaatcttactcagggtcggtctcatttgtatatagtgaaagcaaggcaacaagcaaccaaaatgttataactgaacagccaaagaagtttctggtgcaaacatcagataatgctagaagggctaatctccatactgaaaatcaggatactctggagaatgcaaactcacctttagtttccctacatatggagggaaaagacagtgaagaaacaagagtaaagaccagtgcttcaaatcgccttacaaagtccaccatgaatcctctgaaaaggcctcatgacacccacttccaaagctccgtagaactaagaggaaccatgaggagtcctaaaagagtttctaaatatggtgatgctatgggtctaaagtgccaagcgtcgtttatgccgaaaccaggcaatggcaaagatttagcctgcagtgacagagcacttaacttattcatgttacccccggataaactatccatgctggttcctcctcagtatgccaacactgattctgatcaagacctgttgctggatgttcctcttaatgctcggcacccagaggccgagcttctttgccagccatctcaactgagctcagtagcccacagctccacctcagaggctgggaatgccggaggagaggggcgccttaagcagccctag

SEQ ID NO: 11734 - DNA, 1860 bp, Oryza sativa
  Clone ID: TFbOSC400173j.C1.o8.hg
atgagcggccaccacgaagctaagccctaccagccccgccgcggcccggctcccgccgacgaggaggccgcccccgccgctgcggcggacgaggcggaggcggaggcggaggtggaggctatggagcggtacgagcaggagcaggagtacgaggagggggaggagggggaggaggaggagtacgagggcggggagggggtccccatggacgccgacgcctccgccgcggccgtggcggggatggacccgcacggggagatggtgcccgtggccggcggggaggcgggcggcggctacccgcacgtggcgtcgaacaccctcacgctgtcgttccagggcgaggtctacgtcttcgagtccgtttccgccgagagggtgcaagctgtgctgttactgcttggaggaagagagctagcaccagggtcgggttcggtaccatcatcttcagcggcatacagtaagaagatgaattttcctcaccggatggcatcattgatgaggttccgggaaaagagaaaagagagaaactttgataagaagatccggtatactgttaggaaggaagttgcacttaggatgcagcgtaatagaggccagtttacatcatcaaaatcgaaggctgaagaagcaacatccgtcataactagttcggaaggttcgccaaattggggcgcagttgaaggtcgacctccatcagctgctgagtgccatcattgtggtattagtgcagcgtcaacacctatgatgcgccgtggtcctgatggcccaagaacattgtgcaatgcatgtggacttatgtgggcaaacaagggtacgatgagagaggtaacaaaaggtccccctgtgcccttgcaaattgtgccagctgcaaccaatgatgttaacggaatcgtcgaggcaacaggtgtcgagcagcacaattctgcagtcgaggaggcagtttctgctgcaaatggccatgaatcgcagtcgggagtcgccgtgatgcgaaggccgttggatcaaggtttgacggcccagaacgcctcctcttcctcttgtcttccatccccaccacgcgtgcgagacgagaccagcgcgacgacggccatggccgcggcggcgacggcggcgggggacgaggagttggagtcgctgctgcgaaacttccaccgcttctcccaggggtacaaggatgcacttgtggaggcccaggctttaagggtgaactgcagctctgaatccgagaggcgtcaggctctcgagtcgcacgttgcagatctcaagagtgataatgagcgattgagaaggctgtatactgaaactttgttcaagttcaccaatcagatgaaatttcacacagagtctcgtaatctgaaggaagaactggaaaaggcaaacacgagattgctatccatggaagaggagtataagagggaaatcgaacaacttaagcttggcagtgaaatgaacagcaatgacctggagaacaagctcagctgcgctgttgttcagcaagcaaccaatgaagctgtgataaagcaactcaatctggaactggaagctcataaagctcacattgacatgctaaatagcaggttggagcaggttactgctgatgtgcaccagcagtataaaaacgagatccaggatctgaaggatgtagtcattgttgaacaggaggagaaaaatgacatgcataggaagcttcagaatactgaaaatgaattgaggatcatgaagatgaagcaggcagagcagcaaagggattccatctcggtccagcacgtggagacactgaagcagaaggtgatgaagttccggaaggagaacgagtccctaaagcggaggctggcgatctctgaacttgactgctcatga

SEQ ID NO: 11735 - DNA, 1128 bp, Oryza sativa
  Clone ID: TFbOSC404775j.C1.o2.fg
atggagggggagcaccaccatcaccaccaggatcatcaccaaggccacttccaagccttctccctgcagcctaaggatcccccagtcttattcccctttgtgatcagtagaagaagcagcagcagcagccctagcgacagcaccactctaagctatggttcagaccatcacttgacacagcagcagcagcatcagcatcaagccatgcttgagccccaaaatatgattggaggatcatccgctggcatctttgcgacgccgttcccgaccgtcaagagcatccgcgacgacatgatcgagcggtcgcagttcgatccatacgataccgagaagctgcaggcgagctgcgggttagccaaggtcgtcgccggcggcaagtggagcgcggtgccagcggccaagatgaagatcacgaggaagatgggtgagccgtcgtccggtgtcactggcggggctgcgacgacggtggcgccgaagaagccgaggaggaggccggcgcaggcgtacgaggatcacggccatggcggcgccatgggccaagcttttggcgtgattagggtgtgctccgactgcaacaccaccaagactcccttgtggaggagtggcccgtgcggccccaagtcgctttgcaacgcgtgcggcatcaggcagaggaaggcgcggcgggcgatgatggcctccggactaccagcgtcccccaacgccgccggccccaaggcggccgcacatagcggcgccgctgcggtggcggctgcgcagccgaaggtgaagaaggagaagagagccgacgtcgaccggtcgtcgctgccgttcaagaaacggtgcaaggtcgtccaggtcgaggatcatcaaacgctgcccgccgccacaaacgcagccgccgcagctgccatggaggagacggccgagtccgccaccgtcgccccgcccccggcgccgacgacgaggggtggtactctcgtcgacagcatcgggctcagctggagcaagacccatgccgccgccaccgcctcctgcagcttccggccgtcaccggtggctcccggcttcgcggcggcggtgcaggacgagatcactgacgccgccatgctgctcatgacgctgtcctgcgggcttgtccggagctga

SEQ ID NO: 11736 - DNA, 1977 bp, Oryza sativa
  Clone ID: TFbOSC401181j.C1.o1.fg
atgcccgacgcggcggccgccgccgccgccgcccaggacgccgacgccgtgatgcgcgacgcacccgccgacgcagcagcaggcggcggcgacaacgacgacgacgacggggatgacggcacagaagaggacgaggaggaggatgacgacgaggagggcgatgaagaggagctgccgccggccgaggatccggcggccccggagccggtctcggcgttgttgccggggagcccgaaccagctgacgctgctgttccagggcgaggtctacgtgttcgaatccgtgacgcctgagaaggttcaagctgttctgttattgttaggaagaagtgaaatgccaccaggtttagctaacatggttttaccaaatcaacgtgagaacagaggttatgatgatttacttcagagaacagacattcctgccaaaagggttgcttcactcattaggttccgtgaaaagcggaaggaaagaaatttcgataaaaaaatacgttacgccgtacgcaaagaagtggcactcaggatgcaacgtaggaagggtcaatttgccggaagagcaaatatggagggagagtccctatctccaggctgtgaacttgcttcccagggttcaggccaagattttctatctcgagaatcaaagtgtcagaattgtggcactagtgaaaaaatgacaccggcaatgcgccgtggtccagctggtccaaggactctgtgcaacgcctgcggactgatgtgggctaacaagggtaccctgagaaattgccccaaggcaaaagttgaatcttctgtggttgcaactgagcagagcaatgcagctgtctctccgagtggaatcgacaacaaggaattggtggtaccaaaccctgaaaacattaccgcaagccatggcgaagtgctgcattctttcaaaggagattggggagagattggggagattgtcactcgttttccgcgcacacgcttcccaaactactcaacggtgtccctgaggggatcgagcgcgagggagatcacccgcgacgcgctgctgcagaaggtctccgaggagcgccagctccgcagccacctccgccgcgccgccgccgcggcgctctccatccagcagctaaccaagtctgcgaaccaccttatgtggccatttcaaaaagaagtccacagagtcattaggcatgtggctgttgttcatatgtggcgtgtttggagaagatactcagtcataagaattgtttcagaacagctccatgaagagtgggaagcattaataaaccagcctgacattaatctgacaaaacaatggatatcaagcatgatgcttagaccatttcttttcttcgttactcaaccatcaagctggtacaagggacaacaggacaagactctaaactcgatttcggcatgcttcaaaatcatcttgaatagcataaactcaatggatgcaagcaaaaatttatgttcctttgctgtgggcacgccagaagaaaggtgtaaccattcttgctgtaaggatggaaacatggttcagattactgacactgctatgaggttggctgtgtctttaactgattgcaaaacatggaaaaaaattacaagtgaggatactagagctgctgatgcatctgtggagagcttgattgaatttattggtgcaagccagagtggtacatatagttgtcttaggagatatatagtaaatcttggttctcatgccttggagaagaaaatttcttcaatctcaacagatgatcagttcctgattactgctagtgcagtcaccattgcgctacgacctttccattctatgagagcagggaggggtgctgatctaaatggtgcttcaaaggaatactttacacttatactcacaattccggatctttgcaaacgcttgccacctctgttgttgcctgctataaagcacatatctatactacaaccatccctagatattttactgggtgctttgttcaagggctag

SEQ ID NO: 11737 - DNA, 4455 bp, Oryza sativa
  Clone ID: TFbOSC416374j.C1.o12.fg
atgcccgacgcggcggccgccgccgccgccgcccaggacgccgacgccgtgatgcgcgacgcacccgccgacgcagcagcaggcggcggcgacaacgacgacgacgacggggatgacggcacagaagaggacgaggaggaggatgacgacgaggagggcgatgaagaggagctgccgccggccgaggatccggcggccccggagccggtctcggcgttgttgccggggagcccgaaccagctgacgctgctgttccagggcgaggtctacgtgttcgaatccgtgacgcctgagaaggttcaagctgttctgttattgttaggaagaagtgaaatgccaccaggtttagctaacatggttttaccaaatcaacgtgagaacagaggttatgatgatttacttcagagaacagacattcctgccaaaagggttgcttcactcattaggttccgtgaaaagcggaaggaaagaaatttcgataaaaaaatacgttacgccgtacgcaaagaagtggcactcaggatgcaacgtaggaagggtcaatttgccggaagagcaaatatggagggagagtccctatctccaggctgtgaacttgcttcccagggttcaggccaagattttctatctcgagaatcaaagtgtcagaattgtggcactagtgaaaaaatgacaccggcaatgcgccgtggtccagctggtccaaggactctgtgcaacgcctgcggactgatgtgggctaacaagggtaccctgagaaattgccccaaggcaaaagttgaatcttctgtggttgcaactgagcagagcaatgcagctgtctctccgagtggaatcgacaacaaggaattggtggtaccaaaccctgaaaacattaccgcaagccatggcgaagtgctgcattctttcaaaggagattggggagagattggggagattgtcactcgttttccgcgcacacgcttcccaaactactcaacggtgtccctgaggggatcgagcgcgagggagatcacccgcgacgcgctgctgcagaaggtctccgaggagcgccagctccgcagccacctccgccgcgccgccgccgcggcgctctccatccagcagctaaccaagtctgcgaaccaccttatgtggccatttcaaaaagaagtccacagagtcattaggcatgtggctgttgttcatatgtggcgtgtttggagaagatactcagtcataagaattgtttcagaacagctccatgaagagtgggaagcattaataaaccagcctgacattaatctgacaaaacaatggatatcaagcatgatgcttagaccatttcttttcttcgttactcaaccatcaagctggtacaagggacaacaggacaagactctaaactcgatttcggcatgcttcaaaatcatcttgaatagcataaactcaatggatgcaagcaaaaatttatgttcctttgctgtgggcacgccagaagaaaggtgtaaccattcttgctgtaaggatggaaacatggttcagattactgacactgctatgaggttggctgtgtctttaactgattgcaaaacatggaaaaaaattacaagtgaggatactagagctgctgatgcatctgtggagagcttgattgaatttattggtgcaagccagagtggtacatatagttgtcttaggagatatatagtaaatcttggttctcatgccttggagaagaaaatttcttcaatctcaacagatgatcagttcctgattactgctagtgcagtcaccattgcgctacgacctttccattctatgagagcagggaggggtgctgatctaaatggtgcttcaaaggaatactttacacttatactcacaattccggatctttgcaaacgcttgccacctctgttgttgcctgctataaagcacatatctatactacaaccatccctagatattttactgatctccaaggacaaaatatttgaggaaataactaaattggagaagtcaggggtttctagtggtggttctggtaccattccctactgtggatgggctcttggaaatcttgtaactttagctacagagcatgatgatttatccaattcagggtgctttgttcaagggctagattgttgcctatatgttgatgcaattaactgtgtttcccaaagcttactgaaattttttgaggagaacaaggaaatgcttcttagttttggtgatagtgttgatacatctttcatcaaggaaaatgataccagtgacagctgcagcagaacactgtttatggatcttctgaagccaatttaccagcagtggcacctcaggaaacttttggtgttggcaaaggaggatgctgtgtgcaagaggcaaaataatcatgacccagatacacagacccattcgcgtagcctaaaattgctggacattgtatgcttttactatcacatgctccgaattttctctttactgagtccatctattggttcattacctattctcaacatgctctcattcacccctggatttcttgttgatttatggggggcattagaaatatatatctttggacaagcagtccacaaattacaaggaccaaaacatgaaagagaatcagctacaagtagttcaggtgagcatgtatcctccatgaggcaaagaagaaatttcaaggatacatcaaacaagtggtcgaatgtgttccagaagattacaggaaaatcaaatgacgcagaggatacaaatttggttgacaatcctttaaattctgagcagaatggtgaagcattaattttatgggatattgaagccatgagacaaggatctgagtgtattggaaaggatttaatgcaaatgttgtatctgttttgtgctacgtatggacacctattgcttgtgctagatgatattgagttttacgagaagcaggttccttttaccctagagcagcagcgaaagattgcatcttcactcaatacgttcgtatacagtactttcattcagaatggtggaagcagcagcaaaccacttatagatgtgactgtgagatgtcttaatctactgtatgaaagggacagcagacacaagttttgtcctatttctctgtggctggcacctgctaggaatggccgaattccaatcgcagcggctgccagagcccatgatgcagcatttgctacattgccaggaaatcagttttttggaattcctatccggagctctgtacttactacaataccacatgtatatccatttgaggaaagagtgcagatgtttagagaatttattgagttggacaaagcatcccgaagagttactggagaagtatctgggccaggtccaggatctattgagatagttattcgtcgaggtcacattgttgaagatggatatagacagttgaactgtcttggatcaaaattgaagtcttgcattcatgtgtcgtttgtcagtgagtgtggccttcctgaagctggtttggactatggtggtctatcaaaggagtttttgacggatctgtctaaagctgccttcagtccagaatatgggcttttttcacaagcatcagcatctgatagcagcttaattccaagcaattctgctaaacttttggataatggcatcgatatgattgaatttcttggccgagttgttggcaaagcgctctatgaaggaattctattggactattgtttttcacctgtatttgtgcagaaacttcttgggcgctatagttttttggatgaactatcaactcttgattctgagctttacagaagtctaatgcaactcaagcactatgaaggggacgttgaggacctatgtttggattttactctgactgaagagttgggtggtagaagaattgtccatgaactgaggcctggtggtaaaaacatctcagttacaaatgaaaataaattgcactatgttcatgctatagcagactacaagctcaatcgtcagatactgccttttgcaaatgcattttacagaggactcggtgatctcatttcaccatcttggctgagcttgtttaatgctaacgaatttaatcagctgctttcaggcggattacaggattttgatgtcgatgatcttcggaacaacaccaagtatactggtggttataccgagtcaagtcgatctgttaaactcttctgggaggttatcaaaggatttaagccaacagaacgttgcatgctactgaagtttgtgacaagctgttcccgagctccattacttggattcaagtatttgcagccttctttcacaattcataaggttccatgtgatgttacactttgggctacaattggaggccaggacgtggatcgtcttccatctgcttccacgtgctataacacactcaagcttccaacatacaaacggtcaagtacgctgaggagcaaactgctatacgcgattagctcaaatactgggtttgaactctcgtag

SEQ ID NO: 11738 - DNA, 816 bp, Oryza sativa
  Clone ID: TFbOSC417054j.C1.o4.fg
atgcggaaaccgacgccgtacgtctccctccatgacgtcgtcgccttcgatttcgtcgacggcgacgtccccttcgacgacctcgtcgacggcgaggggctgtgctgccccgacgacccgtttgaggaggtcatgagatgcctctcggcggtggacgaccctttcttggcggcgttcaagcttgattgctcgccgccgacgcccgcggccgacgccgacgtggactccaggagcgaggagcacatgcacgccgacgttggcggcgggctggacttgcagagagcagtaggcggcggcgatgagaaggcgggcacgccgagcaccgtcgacgacgttccgtggctccaagcttcggctgtggcgaggaagccgcgccgcgcacccgccgccgtacgcaagagggtctggtcactggtatccccccagctggccaccgccgccgccgccgccgtcgacaacagccgcgacgaagtttccagcggcggcggcggcggaggagaaggaggagaacactgctcgcgccccgccaagcggcggcgcaaatgcggcgaggagaagaggtgcggccactgccagacgacggagacgccgcagtggcgggtggggccggacgggccgagcacgctgtgcaacgcgtgcggcatccggtacaggattgaccacctgctgccggagtaccggccgtcgacgagccccggcttcgggagcgacgggtactccaaccgccacaggaaggtggtgaagctcagggagaagaagaggaagaaggccatgctggccgccaccgcaacggcgctaacttctgggcctgtgtga

SEQ ID NO: 11739 - DNA, 669 bp, Oryza sativa
  Clone ID: TFbOSC411828j.C1.o3.hg
ccaccgcaccacgacggccgcccccgcgtcgccgcccgagtagcccgtatctggacgcccggccacaagccgccctcgtcgtcgcccgacatctacctcgtcaggaggacaccgaagctgccggtgacgcggcctccccgtaccaagcaagctccgcccacagcgcccgcgcccgcgcctccgccgccgccgccgcagccggcgtcgccgaagacgaagacgaaggcgaaggcgaagaagccgaagaggaagagaagctgcgtgcactgcggctcgacggagacgccgcagtggcgggaggggccgacggggcgcggcacgctgtgcaacgcgtgcggcgtgcggtacaggcaagggaggctgctgccggagtaccgccccaaggggagccccaccttctcgccgtccgtgcacgccgccaaccaccgccaggtgctcgagctccgccgccagcagcggcagagcaccaacccctccactccaccgccgccgccggtgtccgccgccgagccaatccccgacgagcaaaaagaagaggtggtaagcgtgccagtcgccgccgccgcgcccgccaccgacggcggcgcggcgagctcgctggacgcgctgctgctcgacgggccgtcggcgccgctcatcgtggacggcgacgatttcttggttagttag

SEQ ID NO: 11740 - DNA, 1062 bp, Oryza sativa
  Clone ID: TFbOSC404988j.C1.o3.fg
atgtctactatctacatgagccagctacctgctactctccctctaatggagggggatcaggatcaggggctctacccagccttccatagagcaaaggaccctcctatcttgttccctttcatgatcgacagcgccgtcgagcaccaagggcaaatctatggagatcagggcttgaggaggcagcaggttttgggtgaatccaatcaacagttcaatgatcacatgatgatgggcggatcagatgtcttcctcacaccgtctccgttccgaccaaccatccaaagcatcggcagcgacatgatccagcgatcatcttatgatccatacgatatcgagagtaacaacaagcagcatgccaatggatcaaccagcaagtggatgtcgacgccgccaatgaagatgaggatcataaggaagggggcggcaaccgatcctgagggcggggcggtgagaaagccaaggagaagagcacaagcgcaccaggatgagagccagcaacaactgcagcaagctttgggtgtcgttagagtgtgctcggactgcaacaccaccaagacccccttgtggagaagtggtccttgtggccccaagtccctttgcaacgcgtgtggcatcaggcaaaggaaggcgcggcgggcgatggccgctgctgccaacggcggagcggcggtggcgccggcaaagagcgtggccgcggcgccggtgaacaataagccggcggcgaagaaggagaagagggcggcggacgtcgaccggtcgctgccgttcaagaaacggtgcaagatggtcgatcacgttgctgctgccgtcgctgccaccaagcccacggctgctggagaagtagtggccgccgctccgaaggaccaagatcacgtcatcgtcgtcggtggcgagaacgccgccgccacctccatgccggcacagaacccgatatccaaggcggcggcgaccgccgctgccgccgccgcctctccggcgttcttccacggcctccctcgcgacgagatcaccgacgccgccatgctgctcatgaccctatcctgtggcctcgtccacagctag

SEQ ID NO: 11741 - DNA, 678 bp, Oryza sativa
  Clone ID: TFbOSC401615j.C1.o47.fg
atgggttcttccgatcagaaggtgatcgggatcgccgcggcggcagcggcggcggcggaggaggctgggaggcggtgctgcgtcgaatgcggcgccaccaccacgcccatgtggcgcggcggcccgaccggccccaggtcgctttgcaatgcgtgcgggatccggtacaggaagaagaggaggcaagagctaggcctagacaagaagcagcaacaagaacatcatcctcatcatcatcaacaacagcagcagcagtatcagcggcagcaacagcaacagcaacaagaagatcacagtgatgcagcaagttcagtaaaagacagtagcagcagcagtagcaacaaaagcagcagcctccaagtgatctctgaaatcgtcatatcgcgatccaaatccgattgcgaaggcgcgatggagggaaattgtgtgcccttgaagaggttagtgcaacaagtagattttctactatcatctactgggattacagaaagctgccaatgtgttgctgtttcttgtgccaatcagatgggattacagaaagctgccaatgtgttgctgtttcttgtgccaatcagagttctgacaatggaaaacaacagctgtgacattttgcatatcatcagaataataggcagaggctgtggcattgagtccaagaccagaataatagacagataa

SEQ ID NO: 11742 - DNA, 1164 bp, Oryza sativa
  Clone ID: TFbOSC400622j.C1.o13.fg
atggcgtcggagtgggaaatggccatgggcgtcgacctcggcatggggatgagcacgtaccacaacgcctccggtggcatcgccgccgcgccgatgatgggccaccacggcggaggaggcggcggcggcgggtactccgccgcgcaccaccaccaccaccattactacgggatgcctcatcaggcggcgatgggcgacgccatgcgcgtcgacgacctcctcgacctctccaacactcccggcgcccacgacttcttcccggcctccgctgccgccgccgccgcaggtgaccacgggcaccaccaccaccaccacatcggcggcatgggcgagccgtcgggcgccacgccgtcggccacgtcgtcagatcaccagacgtcgatgctctccttcgccgacgacttctacatacccaccgaggacgctgccgagctggagtggctatccaagttcgtcgacgactcctactccgacatgccgaattaccagtcgtccgcgcacgccgcaatggcggcggcggctgcttccgcggccaacaacggcggcggcagctcggccggccaagacagctgcctcacggcggcgcctggccgcggcgcccgtagcaagaggtcgcgcgcgacggccgcggccgccgccgcgtggcactccctcgtcccgcgcccgccgtcccagtcgtcgccgtcgtcgtcgtgctcgtcgtccgacttcccgtcctcgaacaagccatcgggcaccgcgaggccgaacggctcaggaggcggcagccgcggcaagaagagccccggccccgcgggggcggaggtgggcatggaggccggcgtgcggcggtgcacgcactgcgcgtcggagaagacgccgcagtggcggacggggcccctgggccccaagaccctgtgcaacgcgtgcggcgtgaggttcaagtccgggcggctgatgccggagtacaggccggcggcgagccccacgttcgtgctgacgcagcactccaactcccaccgcaaggtcatggagctgcgccgccagaaggagctcctcatcatccgcggcagccaccgcgacgccgccgcggccgcagcagcagccgccgccgccgccgccgcgggatccgccgcggcgaccgggaggccggagctcatgttccgcgactacggcgtgtgctga

SEQ ID NO: 11743 - DNA, 812 bp, Oryza sativa
  Clone ID: TFbOSC400622j.C1.o23.gp
ttataccaacagaattgattgatctctctcatagaggaggaagaacttgcaagggaggtaggtaccaacaaattaattaacaaaaaagcattgaaaaatatctggaataaggcaaaaaagagaaaaaaagggagaggaaataaacaagagaaagggagacgggagaatttcgcaaaaggatctaagcccgcgcgtctgtgctgtgcatgcatccatccatgcatgcgatgtgatgcgtagctgcgcctgcatggctcgctctggacgccgcgtgcgccgcttgatcagcacacgccgtagtcgcggaacatgagctccggcctcccggtcgccgcggcggatcccgcggcggcggcggcggcggctgctgctgcggccgcggcggcgtcgcggtggctgccgcggatgatgaggagctccttctggcggcgcagctccatgaccttgcggtgggagttggagtgctgcgtcagcacgaacgtggggctcgccgccggcctgtactccggcatcagccgcccggacttgaacctcacgccgcacgcgttgcacagggtcttggggcccaggggccccgtccgccactgcggcgtcttctccgacgcgcagtgcgtgcaccgccgcacgccggcctccatgcccacctccgcccccgcggggccggggctcttcttgccgcggctgccgcctcctgagccgttcggcctcgcggtgcccgatggcttgttcgaggacgggaagtcggacgacgagcacgacgacgacggcgacgactgggacggcgggcgcgggacgagggagtgccacgcggc

SEQ ID NO: 11744 - DNA, 927 bp, Oryza sativa
  Clone ID: TFbOSC405544j.C1.o2.fg
atggcggcggagcccccggcggacggccgcgatcccccggcggacgatggcgccgccggcgacggcgcggtggagtccgcggcggcggaggcgctcctgagcgcggcgtcggagcagctgacgctcgtgtaccagggggaggtctacgtcttcgaccccgtcccgccccaaaaggtcgcgccctttttcaccccttccaaaatttttttccatcgcgtccgtttggttcttccctttcgccctttcggtagctccgtgcctatctttggtgaatttgagaatagggttcaggctgttctattggtacttggagggtctgacatgcctcctggtttagtaagcatggctgtacctaccacattcgatgaaaagagtacaactgtggctgccagaagagttgcttccttaatgaggtttcgtgagaagaggaaggaaagatgttttgataagaaaataagatacagtgttcgtaaggaggttgctcaaaagatgaaacgacgtaaaggccagtttgctggaagggcagactttggtgatggttcatgttcttctgcaccatgcggctccacagccaatggcgaggatgatcatatccgagaaacgcattgccaaaattgtggcatcagctcaaggcttactccagcaatgcgtcgtgggccagctggtccaaggtccctctgtaatgcctgtggcctaatgtgggcaaacaagggcaccctaagaagtcctttgaatgcccccaaaatgactgtgcagcatcctgctgatctgagtaaaacgggtgatacagatgacagcaaagcaaatctgtgtgctgagcataatcaaaccactatgaaaactgacactgagatggtgccagagcaggagcagaaggcagacgtgttgccaccaaccaaagaagaagatagcatggctacctcgtga

SEQ ID NO: 11745 - DNA, 660 bp, Oryza sativa
  Clone ID: TFbOSC400014j.C1.o11.fg
atggttggtgataaggacgcggcggcgctggctggagagctgaccggcgacgcgggcgccagcttgaacggcttctttgaccacacgggtttggagtcggcggtggtaggggaggggcaaggggaaggggaggaggaggaggagctggagtggctttcgaacaaggacgcgttcccgtcggtggacaccatggcggcggaggtggagtcggcggcgcccggggcgccggcgcgcgcggcggtggggccgaggaccaagggtttgcggcggcgccggcgggtgactgctccgtggagcctggcgccccttctgtcgcgcccgcgtcaggcggcggcggcggcggcggacgcgggggcgccgcggcgccggtgcacccactgcgccgtggatgagacgccgcagtggcggctcgggccggacggcccccgcacgctgtgcaacgcgtgcggcgtgcggttcaagtccgggcgcctcttcccggagtaccgcccggcgaacagccccaccttctcgccgctgctgcactccaactcccaccgccgcgtcatggagatgcgcctccagagcgaggaggacgcctcggccgccagccgcgtcaacgccaaggcacgccgcgccgagcgcgcggcggcgcgcctcgccggcaaggacaagaagtga

SEQ ID NO: 11746 - DNA, 1587 bp, Oryza sativa
  Clone ID: TFbOSC401803j.C1.o31.fg
atggtggtggtcgacgggctccacgacggcggcggcggtgacctccaggccttgctggatgacgcgggggtggatgatgtcgcggcaaggggcggcggcgaggtagaggaggaggtggagcggccgtcgaacgaggacgcgttcccggcggtggagaagatggcgacggcagcggcggcgaaggggttgcagtgccggcactgcgggacgacggagacgccgcagtggcgccatggcccggagggccaccgcacgctgtgcaacgcgtgcagcatgcgctaccggagcggcaagctggtgccggagtaccggccgctgaggagcccgacgttctcgccggagcttcactccaacaggcaccaccgcgtcctccagctgcgccgccgaccggggccccagtcagccgccccgtcccccgcggcggtggcgaggtacggcggcgaggcgaaggaggaggaagaggagctggcatgggtgtcgaacaaggacgcgttcgcgacggtggagaccaccatggcgccgtcgccgcgggtggtggagacaccaccggaacacgaccaccggccggcgaacaccccgaccacctctccagagccgcactccgacagaccccgccgcgtcgtccagctacctcgccgcctgcaggagccatccgcatcagccaacctcgcccatgcagtggcggcgacggcgagggcggggcgagagtgcgcgcactgcgggacgacgaagacgccggcgtggcgccttggcccggacagccgccgcaagctgtgcaacgcgtgcggcaacaagtaccggagcggccagctgaacagcacgaccttctcccagaattcccaagaacagaagaagaagagcaagagctcggcgtgttccagggagaggaagcgatcggcggtggcggcgacggtggtggtgggtggtggtctccgtgacgacgcggcggcgatcgcggacgaacacctcgacggcggcgacctccaggccttgttggatgacgtggcgttggatgacgtcgcggcgaggggtggcggcgacgccggcgaggcgaaggaggaagaagaggagctggagtggctgtcgaacaaggacgcgttcccgacggtggagacgatgtcgccggcgccgccggagaaccgaacgaaggcgcccgtgccgccggcggggtggcagtgccggcactgcgggtcgacggagacgccgctgtggcgcgagcgcgacggcccggcggaggcggagcacgtgaggaaggaggagacaccaccgaacatcaccccggcaaccaaacaccgccgcatcgtcgacctcctccgctgctccactgctcttaacacggcggcgaaggcggtggagcggcggtgcacgcactgcgggacgacgaagacgccggcgtggctgagtggtccggacagccgcggcaagctgtgcaacgcgtgcgggaagcagtacaggaaaggtcggctggtgccggagtaccggcctctcaactgtccgaccttctcgccggagctgcactccaacgcacacgcacaccgccgtcgccgagagtcgccggtcgccatcgccatcgccggcgagaagtga

SEQ ID NO: 11747 - DNA, 609 bp, Oryza sativa
  Clone ID: TFbOSC102322j.C1.o22.fg
atgggcgcccgtgccggcgcattatccgtcgctgtcagcggcgaccgtgtcctgggacgcgactgccgagtcgtactattgtggccagcaggggaggccggccaccggcgccgccaagtgcgccgccggcgccgggcacgacgcgctcctcgaccgccgctgcgccaactgcggcaccgcgtccacgccgctctggaggaacggccctcgcggacccaagttcacttcgcggtttcgccgacgtacgtcgtgtcgctgacattgccgccgtcgtacgtttctctgcagtcgctgtgcaacgcgtgcgggatcaggtacaagaaggaggagcggcgcgcggcggcgacgacgacgacggccgacggcgccgccggatgcggcttcatcaccgcgcagcgtggacgcgggtcgaccgcggccaaggcggcgcccgccgtgacgacgtgcggcgaggagacgtcaccgtacgtcgtcggcggcggcggcggcggcggcgaggtcgcggacgcggcgtatctcgcctggcggctcaacgtcgtcccaccggcggcgacggcgacggcgttctcggtgtggccggagcgagctagcctctaccactacaactag

SEQ ID NO: 11748 - DNA, 930 bp, Oryza sativa
  Clone ID: TFbOSC418119j.C1.o10.fg
atggatgtgcacccgccgaatgcggccgcctcctcgctggaggagttgttcccgcaccagcccgccacggaaagtgatagaagtggcatagagtggctctctgtctatgtagaggactgcttgtcaacctctgcatcctgcacaaaccctgtctctgcagaactaccgcctattacaatggcaagtcaaggtgctgcaaaaccaaagttaccaccacgctcatctaccaatgcaagaaaaaagaaaaggagcctggcatctgtcataagcgacactgatgaccaacattgtatcacgctgtttgtcgagccaccgctactcctgctcgatcataaggactggctagcagagagtgagcttatcctccccaagaaggacaaagatgaagaacttgtccaagagcaagaacaagaggaggaagagaattacaaaatgagtgcaggaatgcaattccagcaggagcaactggtgatcacttgtagctattgtttgtccagccaatcaccacagtggtgggatggtccatcagggcctacctgcgatgcttgtcgtctgaggattgaggcgaggaatgggcacaccaccagttccaagaagcgctatggccaagagattgacaaagaacaggacataggaaagcggcgagataagaagaagatcaagaaggctgtttatgtgaatgatgagctgctatcggaggagccaatgaagaggtgcacccattgcttgtcctacaagacgccacagtggaggaccggtcccttggggcctaagacgctatgcaatgcttgcggtgtgaggttcaagtctggcaggctgctgccggaatacaggcctgctaatagtccaacttttgtgagtgacatacactccaattctcataagaaggtcatgcagctgaggaattctgttccacacccaaggaagtga

SEQ ID NO: 11749 - DNA, 645 bp, Oryza sativa
  Clone ID: TFbOSC413566j.C1.o12.fg
atggcgggcgggcagtactactacaggcagtgcggcggcgtcgcggaggaggacagtcggtcgccgtacggcggcggcggtgcggcggtggactgcacgctgtcgctcggcacgccgtccacgcggcgcgcggaggcgggcgcgtacggcggcgggctgcagccgtgggacgtgccgtcgtcggcgcgccctggcggcggcggcggcggcaagcaggacggcgccggcgtggctccttgcaacaaggaggcccccgccgccggccgcctgcctcgccgctgcgccaactgcgacacgatgtcgacgccgctctggcgaaatggtcccaggggacccaagtcgctgtgcaacgcgtgcgggatccggtacaagaaggaggagaggcgcgccgcggcggcggtggcgccgacgccgccgccgtcgctggacaccggcgccgggtacgcgtactgctactcgcgacagccgccgccgccaccggcgccgcagtggggatgctacggccaggccgcggcgaagtcggcgtcgtacgcgatgttcgacgcggcggacgacgggccctgcctgtcgtggcggctcaacatgatgccatcctcgccggcgttcgccgtcggcgagcggcccggcctgttccaatactattag

SEQ ID NO: 11750 - DNA, 881 bp, Oryza sativa
  Clone ID: TFbOSC101319j.C1.o7.np
cgacggagttgtcctcgtagaaccagtgcgcctgctccagcaagaacaggatccgctcgaacgactccaaatcctccttgggcacgttgagcacgaagcggctgcgatttttccgtttccaccggcgattcgattcacatggttggcatgtgcccatgagaatgtctactttgttttcaggagtttgctgtgccagcccggcggttgaattgttgccatctttgagcccagacatcctggttcgagatgcgcggctagaggattgctgggaagtagctgatactcattgcagctcgttctttccagattacacttttccactggaccttgttctacgtattgatcgttacattgccctcctatccggtttttcggttccacctggctgcatgagaacttgccttgtcgccgttaacagtaattcgcttagtagaagtatcagcattgaatgtggagatttaagagatgctgacttccaagaaaaacacggtctcagtaaggcctccatagctggcattcttacagtagacacggtggcagactatcttcccagaagagggcctctcaagcagagaagaacaggtattgcatatatagcaaatgttgcagtccgaaaggaagaacgtcgtaaaggaatcgctaaaatgcttgttgcagaagcagaggagcgagcaaagagttggggttgccgatccatggcattacattgtgatgtaaacaacattgctgcgctgcgtctgtacaaaaatctaggatacaaatgcatccatgtaccagaagatgctaagtggccagaacctaagatagcaaaaggagtgcgatacaactttatgatgaagctagtacccaagatgtagtgtatatgatcagaacagagaaac

SEQ ID NO: 11751 - DNA, 411 bp, Oryza sativa
  Clone ID: TFbOSC900385j.C1.o23.fg
atggattcctcgtcggtcgagaaggggagtgggtcgatagatccggacgagcgcacggcctccggcgagcccaaggcgtgcaccgactgccacaccaccaagactccgctctggcgcggcggcccctccggccccaagtcgctgtgcaacgcgtgcgggatccggtaccggaagaagagacgggaggcgctggggctcgacgccggcgagggcggcgcggagcggcaggagaagaagaagagcaagagggagagaggggaggaggtgaccatggagctccgcatggtggggttcgggaaggaggtggtcctgaagcagcggcggcggatgcggcggaggagacgcctcggcgaggaggagaaggcggccatcctcctcatggccctctcctccggagtcatctacgcctga

SEQ ID NO: 11752 - DNA, 1290 bp, Oryza sativa
  Clone ID: TFbOSC401000j.C1.o33.fg
atgccgtcctacgcgcaccaccacagttctctgggggatgacgaggaggagaacgggcgtttcttgagcctgtgtttgcttggtttctggaattttgggaatttatggtttttgctgtgtgtgtatgtgggtgccttttggacggagaaggatgggaagatggacgcgctgaaaagtagttgccggtcggaggaggcggccgacgagggggcggccgcggcgccgtcggcgtgggggatggttgagagggacgggttctccgtcgaggacctgctcgacctcgaggagttctgcgaggcggaaaaggacgccgccgaggagaacgagcaggcgctggccctcgtcgccgcgccagaggaggaaaagtcgaaggacgactcccagccgtcgtccgtcgtaacgtacgagcttgtggcgcccccgccgccgcctccggagattgttgacctgccggcgcatgacgtcgaggagctagagtgggtgtcgcgtatcatggacgactccctttccgagttgcccccgccgccgcagcctcctgcgtccgtcgtggcgtcgctggccgcgcggccgccgcagcctcggcagctgcagcggcggcctcaggacggagcttaccgcgcgctgccacccgcgtcctatccggtgcggactccgaccatctgcgcgctgtcaacggaggcgctggtgccggtgaaggcgaaacgcagcaagcgctctcgggccacggcgtggtctctctcgggggcaccgcctttctcggactccacgtcatcctcgtccacaaccaccacctcctcgtgctcctcgtcggcttcgttctcgtcgttctcgccgctcctcaagtttgagtggcacccgctcggcggcacgtcggacctcccggacgatcaccttctgccgccggggaagaagtccaagcacggtaagaacggcaagaacaagcctaagaagcgtggccgcaagccgaagcagctcccaccacatccctcgggcgcggcggcgtcggcccccgcgccgggcgaccggcgctgtagccactgcggcgtgcagaagaccccgcagtggcgcgcggggccggagggcgccaagacgctctgcaacgcgtgcggcgtccgctacaagtccggccggctcctccccgagtaccgcccggcgtgcagccccaccttcgtgagcgccatccactccaactcccaccgcaaggtgctcgagatgaggcgcaagaaggaggtcggctccggactcctcaccgccgccgccgccgcagcgcccgccgtggcgtcgttctag

SEQ ID NO: 11753 - DNA, 1164 bp, Oryza sativa
  Clone ID: TFbOSC401779j.C1.o10.fg
atgtcgtcgttcgcgcaccaccaccatggctcgctggtggagaaggacgggaggatgtccgcgctgaggagtagccttaggccgtacgaggcggccgaggagatggccgcggcggcggccgccggcgggccggcggcggcgtggggggcggtggagaggggggcagggatgatgggggacgggttctcggtggaggacttgctggaccttgaggagctctgtgaggtggacagggacggcggcgagcaaggcgaggcggcggcggcggcggcggccgccgtggagaaggagaggtctagtgactcccatggctcatcggtggtgtcgtatgagcccatgccgctgctgccgccggtgatggacctgccggcgcatgacgtggaggagcttgagtgggtgtcccgtatcatggacgactcgctcgccgagctcccgctgccgcagctccccgcggcggcggcggcgttggcggcgtgcggcaagccgcagcaccggcggccgcacgaaggcgcggcgtcggcgttgttggaccctatgcgcaccccgaccatttgcgcgctgtcgacggaggcgctggtgccggtgaagtcgcggcggagcaagcggtcgcgtgcctccgtgtggtcgctctccggcgcgcccctgtccgactcgacgtcgtcgtcgtccaccgcgacaacctcgtcctgctcgtcgtcggcctccttctcgccgttcctccagtacgtggacttccccgcgctagtcgcctccgacctgctcgacgagcagccgcgctccaagaagtccaagcacggcaagaacggcaagcagaagcccaagaagcgcgggcgcaagccgaagcaccagcagccgccgcacctcgccgccgccgccggcggcggcgccgccctccccgccacgggcgaccgccgctgcagccactgcggcgtccagaagacgccccagtggcgcgccggccccgagggcgccaagacgctctgcaacgcctgcggcgtccgctacaagtcgggccgcctcctcccggagtaccggccggcctgcagcccgacgttcgtcagcagcctgcactccaactcccaccgcaaggtgctcgagatgcgccgcaagaaggagacccccgtcatcgtggcggccgccgcgccggccgtcgcctctttctag

SEQ ID NO: 11754 - DNA, 1164 bp, Oryza sativa
  Clone ID: TFbOSC401064j.C1.o72.fg
atggaggtgacggccgagttcggcggcgcctactacggcggcgcggcgggccgcgagaagaaggcgctgcagcaggggtgcggggaccacttcgccgtggacgacctcctcgtgttgccctacggcgaggaggatgaaacaacaagggagggtgaggccaccggcggtaaggaggaggctgccggctttgggaacgcgtcggcggactcgtcgaccataacggccctggatagctgcagcaattccttcggcctagccgacggcgacttccccggcgagctgtgcgagccgtacgatcaactcgcggagctggaatggctatccaactatatgaacgagggagacgacgcattcgccaccgaggacctccagaagctgcagctcatctccggcatcccctccggtgggttctcgacggcgagcgtcccgtcggctcaagctcaagctgcgtcggcggctgcctccatggcagtgcagcccggcggcttcctgccggaggcccctgtccccgccaaggcacgaagcaagcgctcccgcgctgcgcctggcaactggtcgtcccgcctgctcgtgctgccgccgcctccggcctccccgccgtccccggcatccatggccatctcgccggcggagtctggcgtgtcggcgcatgcgttccctattaagaagccgtcgaagccggctaagaagaaagacgcgccggcgccaccggcgcaggcgcagctctcgagcgtgccggtgcactcgggcggctcggcgccagcggccgcggccggggaagggaggcggtgcctgcactgcgagactgacaagacgccacagtggaggacggggccgatggggcccaagacactgtgcaacgcgtgcggggtgcggtacaagtccgggcgactggtgccggagtaccggccggcggcgagccccaccttcatggtatcgaagcactccaactcccaccgcaaggtgctggagctgcgccggcagaaggagatgcaccagcagacgccgcatcatcaccagccgcaggtggccgccgccggtggagtggggagcctaatgcacatgcagagctccatgctgttcgacggagtgtcgcccgtcgtgagcggcgacgacttcttgatccaccaccacctaaggacagacttccggccgcccatctag

SEQ ID NO: 11755 - DNA, 1161 bp, Oryza sativa
  Clone ID: TFbOSC900183j.C1.o21.fg
atggaggtggcggcggcggactacgccggcggggtccgtgtcaagaaggaggccggaggctgcggcggcagcggggacatgttcctcgtcgatgacctcctcgacctgccgtgcgacgaggaggaggaggagacggggttgtgcggggcgtacggcggcggcggcgccggcctgggagcgggcgtcgtcggaggtggcggggatgaccgcgcggccgggaacgcgtcggccgactcgtcgacggtgacggccgtcgacagctgcagcaactcattctccggcctcgccgacggggacttctccggcgggctgtgcgagccgtatgaacaactcgcggagctggaatgggtgtccacctacatgggcgaggagaccttgcccacggaggatctccggaagcttcagctcatctccggcatccccgccgcgccgcgcgcgccgcccgctctggccgtctccgcggtgcagctgccggcaggaggcgccggcgcgctgcccacggaggcgcccgtgccggggaaggcgcggagcaagcggtcccgcgtcgcgccgtgcagctggtcgtcgcgcctgatggtcctgccgccgccgccggcgtcgccgccgtccccggcgtcggcggtcatctcgccgtccgagtcgggcaccgcggcgccggcattcccggccaagaaggcggcgaagtccgccaagaagaaggacgggccgtcccccgcgccggcgccgaacgcggccgcgcaggcggcggcggaggggaggaggtgcctccactgcgagacggacaagacgccgcagtggaggacggggcccatgggtcccaagacgctgtgcaacgcgtgcggggtgcggtacaagtccgggcggctcgtgccggagtaccggccggcggcgagcccgacgttcgtggtgtccaagcactccaactcccaccgcaaggtggtggagctgcggcgccagaaggagatgcagctcctgcaccaccaccagcagccgccgccgcacgtgggcgcgggcggcggcggcgccgccggagggctgctccacgtgacgagcccgctgctgttcgacgggccgacgtcgtcggcgccgctcttcgccggcgcggacgaattcctgatccataaccgcataagcccggactaccggcgccaggctacctag

SEQ ID NO: 11756 - DNA, 631 bp, Oryza sativa
  Clone ID: TFbOSC225j.C1.o10.np
accacctcacttcacttggggggcaagttgcaagtctcaagtttacaaatccacccctttcacaaacaaaccgaagcttcttctccacttcgtcccacacttcaacgcctcgcgatcgatcgccccaaatccccgccgccgccgccgccgccgcgaatcgccggatgcccgccgcccggggcggccggcgcacgcctattaacagtgaaatttggtaatcggcaaagacgtcatcggcttagaatcattatctgctgcagcatctcggaatcagccgatgggagttatcaagtcgccaatagtcggattcctgctatattcgcctgcttcttgattgccaataagggtatcatcggggttttagccgatttcatgacatcggacctccagccgatgtgtgctttaaacctcggatcgatgcttatttatcatatcattgctagccgattggtttataccggattatattgcaatattatattatcatcagccgattgcctttatatcatcatctacattggacatatagccgatttatcaaaaccctatcgctatcggctggtatcggcatcggctattatcgactatcggctggaactactctatcggcttgtcagccgatcggttgttt

SEQ ID NO: 11757 - DNA, 2448 bp, Oryza sativa
  Clone ID: TFbOSC400773j.C1.o134.fg
atgtcgctccggccgagcgagcggatggggatccgccagaagggctacaaggcgtcgatggacgcggcggaggggcggcggcggcgggaggacatcaccgtgatactccgcaaggccgaccgcgatcgcgccctcaaggagaagaggcggcgccccacggccaccgccgccgccgaggggttgccgcaggcggcgcactcgtcggccatcgagaagaagttggagagcctgccgatgatggtgcaggggttgtactcggatgacagcagcatgcagttggagtcgaccacgcagttcaggaagctgctctctgtcgaccattgtcctccaattgatgaggtgattagatctggagtgctccctcgctttgtggaattcctcaccagggaggagtacccccagctccagtttgaggcagcatgggctctcaccaatattgcttcaggaacagcagccaacacaatggcagttattgaacatggtgctgtgcccatctttgtgaagctcctcagctcaccaagagaggatgctgtctgggccctgggaaatgtggctggggattccacaaaatgccgtaacctggttcttatgcatggtgcaatgttaccgctactgcagcagctcaatgagcatgctaaactctcgatgctgaggaacagtgcctggaccctttctaacttctgccgtggcaagccgcagcctgacttcaagcatgttgaacctgcgcttccagtgctgcgggagctcatcctctctcaagatgaggagatcctaacggactcatgttgggcactctcttacctgtcagatggttctaatgacaatatacaagctgtgattgaaactggcgtgtgtgattggcttgttgagctccttagccatccttcacctgtggtgctcattcctgctctccgcacggttggcaacattgtaactggggatgatgcgcagacccagagtaaattaaccaaaactgcagatactggacaaaattatttgcaaaactacggatttaatccacaatactatggaaccacagatttagtgctgactttaagcatgtgtattgttggtcatccccaagcacttccctgtcttttcaatcttttgacaacaactcaaaagaaaagcgtcaagagagaagcttgctggacaatctccaacatcacagctggaactaaagagcagattcaggctgtgatcgattcaaacataattgctcctctattgcatctgttgcaacatgctgagtttgatgtcaaaaaggaggctgtttgggcaatttctaatgccacatctggtgggacattcaatcagatagagtatcttgttagtcagggttgcatcaagccgctttgtgatttacttgttcaccaagattccaaaacagtgttaacttgtttggaggcccttgataatatcttgagggttggggaggctaagaagaacttgggggcttgtaatatgaacatatttgtgccgatggttgatgaagctgatggcttggacaaaattgaggatctccagaaccatgacaatgttgagatatataataaggcagtttatgtgcttgagtcatactgggtgcaggaggatgaccaacagccctttcttattccatctgtatctgaatctgaatctgacaatgaaatgtttcagtttggcagtttcggtaaagtttcggtgaagtgcccgatttggatggaaatgcaccgtagctgtctgttcagggggctttccagaatcggagagtcaagttatccgagtcatggtttggtcctgctaacttgttatgaggcagcagtcaggcggttggttcatatggattatggttctccacacaagggggtgggtactggaaattggtcggtcggggaagggcatactcttgcttgtgttgtcgggttagctattacttttaccttcctttcagtagcgagaaaaaggttgcccgtgaatcgtgatacacaaagccgctgtgatgacgggacggatccagaattaggccctattacgcttccttctctcccttttctttcgtctcccctctcccctgttctcatgttctcactggtggtggggatcggcgtggcggaggaagggaggaggagctgcgtcgaatgccgcgccaccaccacgcccatgtggcgcagcggcccgaccggccccaggtctctatgcaacgcttgcggaatccggtaccggaagaagaggaggcaggatcttgggctggacctgaaccagccacagaagcaggagcatggtgaggtaatacctgaagtaaaagacagtaacagcaacagcaacaactgcaacagtgggagtggaaatagcagcagcaacttgcaggttgttccgaaaaggaggcttctgatgggtgtggaggaggctgcattgttgctaatgacattgtcgtccccatctgcatccacattgctacatggctga

SEQ ID NO: 11758 - DNA, 999 bp, Oryza sativa
  Clone ID: TFbOSC101253j.C1.o2.fg
atgtcccaccacgacggcagcaagccctaccagccacgccggggccccgagcgcccccctcctccggccccggcggacgatgcggcggcgcacgtcgcgcccacggtcgaccacctcgccgcggtggccgccgaggccgaggcgatggcccgcttcgaggaggagcaccgcgccctgggggcggaggaggagtatgaggaggaggaggatgagttggaggaggaggaggaggagatggaggaggatgaggacgcgcaacatcatgagggggtgggcggcgaggtggctgtcccgatggacgcggaggccgccgcgcagctggacccgcacggcgggatgctcgccgcctccggcgctgtccagcccatggcgtccaaccaactcaccctctcgttccagggcgaggtctacgtcttcgactctgtctcccctgacaaggttcaagcagtgctcttgctactcggtggaagggagctgaacccaggtttgggctctggagcatcgtcatctgcgccatacagtaagaggttgaattttccacaccgggtggcatctttgatgcggttcagagaaaagcggaaggagcgcaactttgataagaagatccggtattctgttcggaaggaagttgcacttaggatgcagcgcaatagaggtcagtttacatcttcaaaaccaaagggtgatgaagcaacatcggaattgacagcttcagatggctccccaaactggggatcagtggaaggtcggcctccctctgctgctgaatgccatcactgtggtataaatgcaaaggctacacctatgatgcgtcgtggacctgatgggccaagaacattatgcaatgcctgtggcctcatgtgggcaaacaaggttaaaatgccaagttcaaggtgtcatgccaacttggggatgttgagggacctatcaaaagcacctcccacacctattcaagttgtggcatcagttaatgatggtccatttttaagcagttgctga

SEQ ID NO: 11759 - DNA, 2355 bp, Oryza sativa
  Clone ID: TFbOSC400406j.C1.o1.fg
atggccatcgatggcttcctcctcctctccaattcactcgccgcagccgccgccgccttctcttctgcgctctcggctacttgtactcccgagatgcggcgccgcctggcaagcgggccccaggatcggtgtccccacacgtcagcgataagtgagggtacaggatacagtacgagatgggaaaggggggttggtggtggtgatgccatgatgcacatgctggtggcccccgatggaggcggcggaggggagatgccgccgccgtacgggggagccgcggcggcgccgccgccgccgatggagcaggagctggagctccaccgcgacaacgccgacgacggcctcgacggccacgtgcggtgcttgaggtgtggtatatccggcaacgcgacgccccatatgcgccgcggccctgatggcccaagaactctctgtaatgcgtgcggcattgcgtacagaaaggggaaaatgagacgaatgatagaagctgaaccacctatagatgaagctgcacttgctaagctggttcctgaggtaggcatggaatttgagagtgaggacaaggcctatgaattctacaacaaatatgctggacatgttggttttagtgttcggaaaagtacatcacacaaatcttccggaaatattaccaaagtaaggacttttgtttgctcaagggaaggttacaacagggacaaaaaatcattggaagcaaagaagccaaggctggatacaagaattggttgtccagcgcggttgattattaaagtcacaccagagagtaaatacagagtcactgacttcaaagcggaccacaatcatcagctggcccctccttcgacaatgcatatgttaaggtcacagaggatattgacagaacttcagtctggggaagcagaattgtcagatgattctgtcatgacacctacaacaaaagcaaccggtgatcttgttgtgagacaaattggtttccttcgaagtatctctctcctcccagcagattataagaattatctccgttcaaagcgtatgaaggctatgcaactcggtgatggtggcgcaatattgaaatatttgcagacaatgcaaatggaaaatcctgctttcttttacaccatgcagattgatgaagacgacaagctaaccaacttcttttgggctgacccaaaatctagagaagacttcaactactttggtgatgtcctctgtctagacacaacttacaaaataaatggatatggcagaccattgtcattattcctcggagtgaatcatcacaaacaaacaattgtttttggtgcagctatgctttatgatgaatcatttgagtcatataggtggctgtttgagagttttaagattgctatgcatggaaaacaaccagcggtagctttagtagatcaatctattccacttgctagtgcaatggcagcagcatggccaaatactactcaaagaacttgtgcttggcatgtatatcagaactctcttaagcaccttaatcatgttttccaaggttcaaaaacatttgcaaaggattttagcagatgtgtatttggctatgaggaagaggaagaattcttgtttgcctggagaagcatgctagaaaagtatgatcttaggcataatgagtggctgtctaaattgtttgatgaaagggaaagatgggctttggcatatgagagacatatattttgtgctgacataataagtgcacttcaagctgaaagcttcagtagtgttctgaaaaagttcttgggccctcaactggatttactgtccttcttcaagcattatgaaagagccgtagatgagcaccgctatgctgagctccaagctgacttccaagctagtcaaagttatccaagaatacccccagccaagatgttaaagcaagctgcccatacatataccccagtggtgtttgagatctttcgtaaagagtttgagctgttcatggactctgttctgttcagttgtggggaagctggggcaacctctgagtacaaagtcgctccctctgaaaaacccaaggaacattttgttagatttgactcgagtgactgctcctgtatctgcacttgtaggaagtttgagtttatgggtattccatgttgccatatgttgaaggtgctcgattacagaaatatcaaagaattacctcagagatatctgttgaagcgatggagaaggactgccaagtctgcaaatgaagaaaaccaagggacactcctgtttctaatatgcatgagaattcatttcgcagaagctcatgatgcaggtgacttgaatctaaacattattccttctgcacggtgcctgctccacgatactggcgttgaagcagtgaggtga

SEQ ID NO: 11760 - DNA, 876 bp, Oryza sativa
  Clone ID: TFbOSC900101j.C1.o2.fg
atggcgtcggcgacgtcgacgacgcccgacctgtcgctgcacatcagcctgccgagcggtggcgcggcggtggggacgacggcgccgccggggctggggaacggcggtgcggttggtggtgccggcggcggcaaggcggcgggtggtggtgacccgtggcggaggctggatggctccacagcgtcgacggagctgtcgctgtcgacgccgcagcagcagcaggagggcagtacatcggcggccgatgtgctgccgtggcggctgcggcagccgacggcggcggcggcgtccgtgccggtgacactgccgacgataccgatggatggagcgacgcccaaatcggtgctagagctgatggacgtcaaggatctgaccctagctcatgtgaagagccatctgcagatgtataggaccgtgaagagcactgacaagccagcagcagcctcagggccgatggacggcagcggctccggctccggctccggcgacgacgagctcctggccggcgatggaaggcaggcgacgtcatcgggcgccgatgcggaccggcggatgtcgttcaccgagcaccggtcctcctccgagggcgcggcgagccatgccggcggtggcggcgacggcgactgctcctcctctgccgtcaactccgacaccatcagagcgcgcagcaattcgccgagggggctgtgggctttgacctcagacctgatactagctgacatcctagaaatgtgtaaccaagggcctcttcctgtgttgctttgtcctttactttccttgccattactcccagtgtctactgatactgtagcagatatactgaggttcaataataggagaaatttatgtattgggcatcaaacattgtttttttaa

SEQ ID NO: 11761 - DNA, 425 bp, Oryza sativa
  Clone ID: TFbOSC31068j.C1.o1.fg
atggcgaccaccacctgcagccgcaggggagcgacgccgaagtcggtgctggagctgatgaacgtgaaggatctgacactggcgcatgtcaagagtcacctccagatgtataggacagtgaagagcacagacagatcatcccacattgcctcaggagaggcgcagctgcagcagcaggcaggaatggaggtggccatggaggcggcagctggaggaggaggaaatggtggtggtggtggtggtggggtggtgctaccgatgatgccggcatgtgacgacatggttgggatctgtagctcccctgcgccgcctgccgcagcgactagttccgctgctgcctacttcctctgcgcgacgacgacgtcaacagcaactgctccactggcagtagtgccatcgcctcctgctccaaccattcccacaag

SEQ ID NO: 11762 - DNA, 861 bp, Oryza sativa
  Clone ID: TFbOSC400549j.C1.o9.fg
atgggcaacctcgccgccgccgccgccgcctcctccgccgcagccggcggcggcggcgccggggacgccgggggatcgggcgacgggtacctctccgacggtgggctgctgctgtcctccggcaagcggcggcgcgcgcaggagaggaagaaagctgtcccttggactgaagaagagcaccgaacatttcttgctggtcttgaaaagctaggaaagggggactggaggggtatatctaagaactttgttactaccaggactccaactcaagtggctagtcatgctcagaaatattttcttagacaaactaatccaaacaagaagaagcgcagatcaagcctttttgatatgatggcaactgatatgtcaccagcaccaaactgccctgtcttgccaccatcaatgggaaaattacatgatatggtagctatgactaaacaactccagaacagcagtttggaaggagtctcatcttcaagcacagttaatctagcaccacaagttgcaagagatcttcctcccccaattccatcttttaaagcaacaaatgtagattcaagtctcagcaaaatgaaccacatggacggtttcttgagggcgcccatgctgttcagaccaattccaagaatcgctgaaggggcatcttcatcgactcctgcaactgcaagcatagctgatctggaatttcaagctaacctgactgcatgttctaatgcattattcgcgagtccgagaagaaagccaaagaaggcagatcctccagcagagaaggatctggatctgacagttgccccaccctcccaacaaaccagggccagtatttcttcccagaacgcagtaggcgtaattcaagtcgtatag

SEQ ID NO: 11763 - DNA, 798 bp, Oryza sativa
  Clone ID: TFbOSC422332j.C1.o27.fg
atggagcagcatgaggaggcagcggagaggaagccttcgccgccggtgatattccggctgttcggcgtcgaggtccgcggcggcggcggcggagttgacgaggaggagtacgaggaggaggaggtggagggtggattgttcatcaagaagagctccagtatgcccaacctcacctccatcgacccgctgccggtgccggccgacggcggcaaacggcgcgcctccgacgactccgagctcgcctccggccagcagaagcgccgccgccgcaaggtgcaggagaggaagaaaggggtaccatggactgaggaggagcacaagaaattcctggaagggctgaggcagctggggaaaggggactggagaggcatctccaagaactttgtgaccagcaggacggcgactcaggtggccagccacgcccagaagtacttcctccggcagaccaaccctggcaaaaagaagcgccgggccagcctctttgatgttgttgctgagtgcagtgatgatcagcttccaagtcctcagagtgttggaactaagcctcctacccaggatataattcatacagatcgcggcgatgtcccgatactaagctatccagttgctagaggctttagaggcgatagcgtgcaggttgatgaactaactgaatatgtgaagagattaaaggccgccgaggacatgtcgctctccatgatctctggactggaaatggcatcatcatccatcagcagtctagagctcagtatcgcgcctcctcattgcgcgatcgaggcggccatcaaggtgctgtga

SEQ ID NO: 11764 - DNA, 933 bp, Oryza sativa
  Clone ID: TFbOSC400601j.C1.o105.fg
atggcggcaacggcggcggtggcggcgatagcctcgtcggtgaaaagggcgaccaacaaccggaggaaacaacggcgcgccaaagtgcaatctggccgccagcatcggcagaggaagcggaggctcgtctggacagacgagctgcagaagatgttcagggaagcatttaaccagctctcgctgacacaaaatttgaattcttatcactctgttttgataataaagatccaagaggactatgaaaaaaatacccggtgcccacaaaaatactttaagttgatgaaattgatgattgatccgatgaatgatttaagtctaacccgagataacattgctagttatctccagaagcataagaaacgtcttcaaaaagaatatcagaaacatcagaatcttcttgaacaaaaagaccaacagttacctattgttgacaataccaataccagttctatccaacaaaaaaatatgcattatgaatcctgctacaatgaacatagtaacaagcaacccaagttgaaggaacccacgttgttgacagctaattatcatgggcttagaaacatgcatcatcatcacaaaaacatcatcaacatggaaccttccaatgtactgcggcctcctaacttgaacaatgcaaagggctttaatatgcccttcaacaaggaaggagtcgatgaagccatatatcagagccaactaatggcacatcaagtttatgcaaatcatgttgatgcaacagcacaaaccacctgggaagtaacgatgacgcaagatatgcgccccatatctcaagtacatcaacatggttgtgaaacaacacctgtcgattcctctaataatacaaatggcatatctgaaaataataattaccatgttgggaggaagaattctagagcaaatatggttggcatcctttggccattgttgagatag

SEQ ID NO: 11765 - DNA, 903 bp, Oryza sativa
  Clone ID: TFbOSC401371j.C1.o1.fg
atgggcccagataatggagcaaacaacaattccaacttggctgcaaggcaacgcttacggtggacaaatgagctgcacgaacgatttgttgaggctgttactcaacttggtggtcctgatagagcaactccgaaaggagttctaagaattatgggtgtacaagggttgacgatataccatgtgaaaagtcatttgcagaaatacaggcttgcaaagtacattcccgactcttcagctgatggtaacaaggctgaaaacaaagaccctggagatttgcttgctggacttgagggatcctctggcttacagatatctgaagctctgaagctgcagatggaggtccaaaagcgtctacatgaacagttagaagtacaaaggcagctgcagttgcgcattgaggcgcagggcaagtacctcaagaagatcattgaggagcagcagcgtctcggtggagtgaaatctgaaacacctgctgctggtgcttccgtcacattgccaagcgatcagttccctgattccgaaagaactgacccctcgactcctgcacctacatctgaatctccaactcaaggtgtaccttcgaatagggacaatggaggacaaaacgaagcaaccaagagcccccagcgcgatgattctctgtcccgccatgaaccactaacccctgattccaactgtcagcctggttctcctaccgctagtccaaagcatgagagggcagcaaagaggcaacgaggtaatggtgcagagttctcggaaactgacttcgcccttcctcattctatcttcgagtcgagttcggggtcagagttccaacaatgttccatgtcctactcagctgttgagttgggaagtttgaaggttgcgctttgtcgcggcgtcgacttctgctcatctgggtaa

SEQ ID NO: 11766 - DNA, 1239 bp, Oryza sativa
  Clone ID: TFbOSC401174j.C1.o9.fg
atggaggtggaccacgcggaccgcgacggcgcgcggcgccggtgccgcgagtacctgctcgcgctcgaggaggagcgccgcaagatccaggtgttccagcgggagctccctctctgcttcgacctcgtcacccagactatcgaggggatgaggagccagatggacgccgccggcagcgaggagacggtcagcgaccagggcccgccgccggtgctcgaggagttcatcccgctcaagcccagcctctcgctgtcctcctccgaggaggagagcacccacgccgacgccgccaagtcaggcaagaaggaggaggccgagacgtcggagaggcattcgtcgccgccgccgccgccgccggaggccaagaaggtgacgccggattggctccagtccgtgcagctctggagccaagaagaaccccagcagccatcgtctcctagcccaactcctaccaaggatttaccgtgcaagccggtggcgctgaacgccaggaaggccggcggagcgttccagccgttcgagaaggagaagcgcgccgagctgccggcgtcgtcgaccacggccgcggcgagctcgaccgtggtcggagacagcggcgacaagcccaccgatgatgacacggagaaacacatggagacggacaaggacaacgacaaggacgccaaggacaaggacaaggaaggccagtcgcagcctcaccggaagcctcgccggtgctgggcgccggagctccaccgccgcttcctgcaagcgctgcagcagctgggcgggtcccatgtagcgacgcccaagcagatccgggagctgatgaaggtggatggcctcaccaacgacgaggtcaagagccatttgcagaagtatcgtctacacacgaggaggccgagctcgacggggcagagcagcgccgcagccggcgtccccgccccgcctgcgccgcagttcgtcgtcgtcgggagcatctgggtacccccgccggaatacgctgccgcggccgccgcacagcagcacgtgcagcttgccgccgccggcaataatgcgtccgggagcgccaaccccgtgtacgctccggtggcgatgctgccggcaggcttgcagccgcattcgcatcggaagcagcaccagcagcagcagcaaggacagagacattccgggtcggaaggccggcggagcggggacgccggcgatggcagctcgtcctccccggccgtctcgtcgtcgtcgcagaccacctccgcttga

SEQ ID NO: 11767 - DNA, 1131 bp, Oryza sativa
  Clone ID: TFbOSC405568j.C1.o3.fg
atggtaattgatgaagataaatgccatgctgattctacaagctacatgctttctgcagaactcaacttttctgtcactgtatttacaagccccataaaagcactagactttcttcagaatcatgcagaaggtgttgatttggtgctggcagatgtccacatggaagagatgaatggttttgatttccttaaagttgcaagagagcttcataaatccattcaagtgattatgatgtcaactgaaacgacaatgtacacaatgaagaggtgcgtcaaacttggagctcaatttttggtcaataagccccttgatgctggaaccattaagaatttgtggcaatatgttgacttgaaagttctaagaatggagaagatcaaggacttgcttcaaggtattggagatgaaagcacttgtgccaatgaaacgaattctcttgctgaaaacccgaagaatgatactaagaagaaatattatctcatgtggactccacatctacagaaaaagtttttacatgctcttcaaatacttggaaaagatgcttcaccaaaaaatataaagaagatcatgggtgtggacaacattgattgtaggcaaattgctgctcatctgcagaaacatcgactacggctaacaaaggatttgaagaaagcatcatttacaacggataccagcaaggatgaatcaaattctagaatagggcctgcagagagtcatcacgtgtgccgcaacgcaagtacactgcagcctcgttccaacactcaacctacagaaacaaccatgcaaatcctctctgaagacgctgaatatgacgatgtttacgccgcgatgcgaagagccttacagtatgggattgtctttgatgagtccaagcattccagtgatccttctggtgatgaggatgaacaagttgtggtaggaggagatcaagatggatgtgccaatgaagccaatgacatagactcatctggtgatcatcatcaggttgctgctgttgtcactaaaccatgcaacgcaaatgcttcacaagagataatcaacaagatgactaattctgatggtatgcaagccaccaaaggaagcaaggcagcagttttccgccttgtggattattcagaatccgatagcgattag

SEQ ID NO: 11768 - DNA, 1068 bp, Oryza sativa
  unsure (1)..(1068): unsure at all n locations
  Clone ID: TFbOSC900405j.C1.o11.fg
atgtgcgtgcagggcgactccggcctggtcctcaccaccgaccccaagccgcggctccggtggacggtggagctccacgagcgcttcgtcgacgccgtcacccagctcggcggccccgacaaggcgacgcccaagacgatcatgagggtgatgggagtgaagggcctcaccctctaccacctcaagagccatctccagaaattcaggttagggaagcaaccgcacaaggagttcagcgagcactcagttaaggaagccgcggcaatggagatgcaaagaaacgcagcatcttcttcaggcataatgggcagaagcatgaaccatgaccgcaacgtgaacgatgccatcagaatgcagatggaggtgcaaagaaggctacatgagcaactagaggtgcagaagcatctgcagatgaggatcgaagcgcaggggaagtacatgcagtccatcctggagaaagcctatcagacgctcgccgccggcgatgtcgcggcggcggtggcgtgcggcccggcggggtacaaatccctaggcaaccaccaggcggcggtgctcgacgtgtgctccatgggcttcccttccctgcaagacctccacatgtacggcggcgccggcggcggccacctcgacctgcagcagcagcagccgccggcgtcgacgatggagagcttcttcgcctgcggcgacggcggcggctcgctggggaagacggcggcgaagacgaggcattacggcggcgccgggaagagcccgatgatgtggggcgtcgacgacgacgacgacgacgacgacccggccgggaagtgcggcggcggcggccatcatcagctgcagatgncncccccgccgatgatggacggcggcatcgacgtcatggactccctcgccgccgacgtctacgagacgaagccgatcatgtccggcgactcgacggggagcaagggcggcggctacgacgtcgcggcggcggcgtcgaagctggagaggccgtcgccgcggcggccgccgcagctggggagcccgtcggtgatggccggagctcagacgaggaacctatcctacgggtaa

SEQ ID NO: 11769 - DNA, 2070 bp, Oryza sativa
  Clone ID: TFbOSC412867j.C1.o2.fg
atggaggagaggaagggattgatggggagggagagggatcaattccccgtcggcatgcgggtcctcgccgtcgacgatgacccggtgtgcctcaaggttcttgagaccctcctccggcgctgccaataccatgtaacatcaaccaaccaggctattactgcgttgaagctgctcagggagaacagggacatgtttgatcttgtcatcagtgatgtccacatgcccgacatggacggatttaagctccttgagcttgtggggcttgaaatggatctcccagtcatcatgttatcagtaaatggagagacaaagactgtgatgaaggggataactcatggtgcctgtgactatcttctaaaaccggtccgaatcgaagaactaaggaacatatggcagcatgttgttaggaggaagttcggtaatcgtgagcgaaacaatcttgatttctccaaagaatgcaataagccgcaaagcgcggatactgatcatggaccataccaacctacctgtggttcttctgatcaaaatgggaggtccagcaggaaaaggaaagaactacacggcgaggacgacgatgaaggcgatgataatgattatcaagaaaatgatgagccctcagctgcaaagaagcccagagttgtatggtcagttgagctgcaccgaaaatttgttgccgctgtcaaccagcttggaattgacaaagctgtaccaaaaagaattcttgagcttatgaatgtggagaaactcaccagggaaaatgttgcaagtcatctacagaagtacaggctttacctcaagagactaggtgctgtagcatcacaacaagccagcattgttgctgcctttggaggcagagatccctccttcttgcatattggagcatttgaaggactccagagctatcaaccttttgcaccttctgctgctcttccatctttcaatccacatggcctgctaacccgaactagcgccgccgcggctttcggacttcaggagcttgctgccccctccagcacaattcagacttctacaggaaatgtcacagttggccattgcttggaagaaaaccagcaggcaaatctagcacaaggcttgaccgcggcgatcgggcaacctcagcttcaacagaactggattcatcaagaaggtaatggtctgtctgatgttttttctgggagttctctgaccaacactttgtccagcacactccaaagagttccaagcagttcattgccaccacaagaactcttggagtgcaaacaagccaaagttagcatgccgccatcgatacggataccgccttctagttcagcacttcttgagaggactcttggggtttccaccaatttgggagattctagtatatcccagcagggtgctcttccaatagatggtggattttctgctgacaggttaccattgcacagttcatttgatggcgctgttgcaacaaagctagatactagtttggcagcttcacagagagagattggccagcaggggaaattttcagttagcatgcttgtctccccttctgacaatcttgcattagccaaaaatgccaaaactggagctagttcttctggcagtactataattctccctcttgatactgcaagacattcagactacttgcagttcggaggtgcaagcaattctttgcagaaaatggatggacagaaacaagatcatatacagagctcaaacattatatggagttcaatgccaagcactcaactgccaagtgatacccaaattcataatactcaaaaccaaagattggacagcggaagttttaaccataatattggtgcccatttggctgaccaaacaaatgcaagtgcgtcaatacttccgcaaatgaagtttgacacaagaatatcagaagagaaaatgaagcagaagaatacatatgacttgggtagttcaaagctgcagggtggatttaattctagtggctgcaattttgatggccttctcaattccataatcaaagtggagaaggatgatctcccattcatggacaatgaattgggctgtgacctttttccacttggtgcctgcatatga

SEQ ID NO: 11770 - DNA, 1191 bp, Oryza sativa
  Clone ID: TFbOSC417054j.C1.o12.fg
atggtgggcggcggcagggagaggaacggcggcgtcaggcagtacaaccgatccaaggtgccgcggctacgctggacgcctgacctgcaccactgcttcgtccatgccattcacaagctcggcggccaggacaaggctacaccgaagcgagttttgcagctgatgggagtgggaggactcaccatatctcatgtcaaaagccatcttcagatgtacaggaacatgaggaatgatcttggaatgcaagggatacaggtgcaacaggtggatcaggagcacacatatggaggtggtgtggaagtttggactgatatgcagcagtgtgatcatgatgagtgtgatgtcccttgctgcagctgccactccccaaagcctagaaaggagccactgcttcacctccaactgaaaagcagtggcatgaatattgacgaaccaggcacgcgcgcacgcattgccgcgcccaatgtacgcagctgcagggacgacgccgcagcatctgcgacggagacgcgacgacgacgtggtgggaggccggaggaggtagacgacgacgcgaacgcgagcacgagccccagaattagccagctgcagctgctgcgtctcagaggccatggaatacgtgagagcgacatgtcaccgtcgacgagcctgcagtgctactatgtacgcagccagaggacgacgacgatgccgccgggcgctgctgctgcagcagccggcggcgatggcggatcacagtgctacgccgcacctcggtacagctcttcctccaagctgaaattcttggggttcgtggtgacatcggggcctcctcctcctcgtcttcctcctcctgctgcctgctgctgcggcagcgatgacaacatcccttttcaggtcggcacgtttgccccacaccgcgtcgcgccgccaacggcgagctgcggcggcggcggcggcggcggccgcgcggaggcgcgcccctcgtcgtcgtatcgctcggtgtggttcgaaccggccgccgccgccgccgcgagcaacaacggcgtggcgccggacggcgagcacgacgacggctgctcgctctcgctctcgctggcgttggacacgggatgcgccggcgccggcggcagcctggtctcgtcgacgacgtcgtcgtcgtcgggaagccggatcagcctcgacttgtcgctctccacgcttgactcgtag

SEQ ID NO: 11771 - DNA, 867 bp, Oryza sativa
  Clone ID: TFbOSC417459j.C1.o2.gm
atggtgggcggcggcagggagaggaacggcggcgtcaggcagtacaaccgatccaaggtgccgcggctacgctggacgcctgacctgcaccactgcttcgtccatgccattcacaagctcggcggccaggacaaggctacaccgaagcgagttttgcagctgatgggagtgggaggactcaccatatctcatgtcaaaagccatcttcagatgtacaggaacatgaggaatgatcttggaatgcaagggatacaggtgcaacaggtggatcaggagcacacatatggaggtggtgtggaagtttggactgatatgcagcagtgtgatcatgatgagtgtgatgtcccttgctgcagctgccactccccaaagcctagaaaggagccactgcttcacctccaactgaaaagcagtggcatgaatattgacgaaccaggcacgcgcgcacgcattgccgcgcccaatgtacgcagctgcagggacgacgccgcagcatctgcgacggagacgcgacgacgacgtggtgggaggccggaggaggtagacgacgacgcgaacgcgagcacgagccccagaattagccagctgcagctgctgcgtctcagaggccatggaatacgtgagagcgacatgtcaccgtcgacgagcctgcagtgctactatgtacgcagccagaggacgacgacgatgccgccgggcgctgctgctgcagcagccggcggcgatggcggatcacagtgctacgccgcacctcggtacagctcttcctccaagctgaaattcttgggcctggtctcgtcgacgacgtcgtcgtcgtcgggaagccggatcagcctcgacttgtcgctctccacgcttgactcgtag

SEQ ID NO: 11772 - DNA, 606 bp, Oryza sativa
  Clone ID: TFbOSC415628j.C1.o3.fg
atgcggtggccggaggagctgcaccgccgcttcgtccacgccgtccgccgcctcggcggatgccacgaggcaacaccgaagcgaattatgcagctgatgggcgctaagggagtcagtatatcgcacgttaaaagccatcttcagatgtacaggaactccaacaacagtagcaatgttaaccgtcgtcatcctgtcaccccacaaatcgattggacgacgacggcgcagcaggatgaacagcagagacgacagatgagcagcttcagcttccttgcaacaagaacggtgccagcagctggaattgggagccatagccaccagagacctcaccggcggcaagcgctgcacgccggagacgacgacggctgcgagctgacgctgtcgatcagcggcggcgccgctgaagaatcgaaagacggtggctcgagcatcaccgacgacgacgacgagcttctgatccagccaccggcgcctaacatcatcaacgacgacggatcaacgcggcatggtcatcgtcatccttttgcttgttccacacagccgctgccgccggcggccattaaccttgaacttacgatttcttctccttgctgctggctcacctag

SEQ ID NO: 11773 - DNA, 1404 bp, Oryza sativa
  Clone ID: TFbOSC900208j.C1.o22.fg
atgagcacacagagtgtcattgctgtaaagcaattcagtggccctgacaaaatcgcacaagcatacactgttccacagccatcagctcatgtgctctccaacgctaactatgactatgatctctgtggttcaacaaatagtacctcattatcatgtgctatccaatcctcaaacattaagaccgaatcaatcagttcatctagcctgccaaagatccttccatttagtactgactcaaatggtgaaagttcactttctcgcatgtcgcaagccgagttttcggacccaattttgtctagttcttctacattttgtacaagtctgtacacctcatcaccgatgaactctggttcatgccgaaaaaccggttatttgcctttcctgccacaacctcctaaatgtgagcagcagcagaattcagctgggcaatcatccagctctctgatgctccttgatgctgatctcagaaatagtggtcatgctgatgatgaacacacagatgacctcaaggactttcttaacctctcttcagattgtagcttccatgggaaatgcagtgccatggcttataatgagcagatggagtttcagttcttgtctgaacagctcggaattgcgatctcaaacaatgaggagagtcctcggttagatgacatatacgacagaccaccgcaacttatgtctcttccagtgtcatcttgctctgatcaggaggatctgcaggatgcaagatctcctgctaaagttcagttgagttcatctcggtcttcatctggaactgcatcatgtaacaaaccaagactgaggtggacaccggagctccacgagcgtttcgtagatgccgtgaacaagcttgaagggccagaaaaggcaactcccaagggtgttctgaagcttatgaaggtagagggcttgaccatctatcatataaagagccacttacagaagtatcggcttgcgaagtatcttccagagacaaaagaagacaagaagcaagaagaaaagaaaacaaaatcagtggctaatggaaatgatcatgcaaaaaagaagagtgctcaaatggcagaagctcttcggatgcaaatggaggtccagaaacaactccatgaacaactagaggtacaaaggcaattacagctgcgcatagaggaacacgcaagatatttgcagaagatattggaagaacaacagaaagcaagagaatccatatcctcaatgactagtacaacagaaggagaatctcctgaattcgcaccgatggagaaaaccgaggacaaagcagaaacctcttcagcacctttgtcaaagtgtagaattacagatactgatgcagaatgccattcaaaagttgataataaaaagacaaagcctcaggctgatcttgaaatggtgcatgacgaataa

SEQ ID NO: 11774 - DNA, 750 bp, Oryza sativa
  Clone ID: TFbOSC400570j.C1.o9.fg
atgtttgaggggtgctacggcggagtcgggtcggcggcggcggcggcggcgcgggacccgaagccgcggctgcggtggacgccggacctccacgagcgcttcgtcgacgccgtcaccaggctcggcggcccggacaaagcaacacccaagtcggtgctcagattaatgggcatgaaaggcctcaccctgtaccatctaaaaagccacctccagaaatatagactgggaaggcaaagcaagaaatcagcaggcctggagctagcagtagcagatagtggtgatgcgctaaagtatcaagtcgaagtccaaagaaaactgcaagaacaacttgaggttcaaaagaagctgcagatgcgaatagaagcccaagggaggtatttaaaggaaatactagagaaagctcagaaaaacatttccctggatgcaaatgggtctgctaacctctcatcaaccagatcacagattacagacatcaacctagctctttcaggtttcatggacaatgcaacacaagttcaggaggaaaacaatgaactgatgaaacctatatctgatgacaacctaaaagttaataatttgggctttcagctctaccatttaggaagtcaggagagtaaggatgttaagtgcactccaaaaactgaagagttgcttctactagacttgaatattcaaggaggatatgaactctcttctagaggaatgcaagggtgtgagttggatctgaagatcaaccagcagagaagatag

SEQ ID NO: 11775 - DNA, 1053 bp, Oryza sativa
  Clone ID: TFbOSC400084j.C1.o5.fg
atggccgtgtttggagaagctttagcagtaaagcttctttcagagccttacgtgcaaagaagcattgctttgaagtggcaaagaggatgccaaatgtatgaaccaaagcccttctcaagcattgtactagctcacaacgatccagtttcccacaatcaacaaattgaacgtattaacaacaatgtagtatctaatagtggtgggaacagctcaaacagcaactttgccgccagacagcgcttacggtggactgatgacctccatgatcgttttgtggatgctgtaacacagcttggtggacccgacagggcaactccgaagggaattcttagaataatgggtgttcaagggttgaccatctatcatgtcaaaagccatctgcaaaaatatcggcttgctaaatacattccagatcccacagctgatggtgccaagtctgacaagaaagatctcggagatttgcttgctgacattgaaagctcctcgggaatggaaataggggaggctttaaagttgcagatggaggtgcaaaggcagctacagctccggatagaagcccaaggaaggtacctccagaagatcattgaggagcagcagcggctcagtggtgtgctgggtgaatcaggcaagttaggcgccctgggaccagctccaggggagccataccaggattccaacaaaaccgacccctcgaccccggtaccgacttccgaatccccaatccgcgacaaggctggaagcggcttgttcaagaccatttcttcgcacgacgactgccgcgagcctttgacaccggactccagctgccgtgccggctcccctttggagagcccccccagggctagcaagaggatccgggtcagcagcgacattgatcatcgtgggaacaatgagttcccccctcctctcaaagttccggagccaagttcaggttcagatttccgacaggaaagctcagtgttattatcatccagcgcagtgcacttcgattctttggagagcctggatgcagatgaaaatgtcttcaccaatggttcaggcagtgatgattga

SEQ ID NO: 11776 - DNA, 1179 bp, Oryza sativa
  Clone ID: TFbOSC402805j.C1.o18.fg
atggagcggcatctgtttctgcatggaggaaatacacaaggagattctgggctggttctctcaactgacgctaaacctaggttgaaatggacacctgagttgcatcagcgatttgtagatgcagttaatcaattaggtggagcagagaaagctactccaaaaacagtcatgaggctcatgggcattccaggactcaccttataccatctgaaaagccatctccagaaatacaggctcagtaagaatctccaaggtcaagctaatgttgggacaacaaagaatgcccttggatgtacaggtgttgctgataggattcctggaacaagtgcattagcgatggccagtgcaagcgccattccacaggcagagaaaactattcaaatcggtgaagcactacagatgcaaattgaggtgcagaggcagctaaatgaacaacttgaggtacaacggcatctacagctgcggatagaagcccaagggaagtatctgcaggcagttcttgagcaagctcaagagacccttgggaagcagaacttgggccctgcaagcctggaagatgcaaaaataaaaatatcagaactggtctcacaagtttcaaatgaatgtctcagcaacgcagttacagaaataagagaaagttcaagtatacacagactagagccaaggcaaatccagtttgttgaaagttcagccaataactgtttgactgcagctgaaggattcaaggagcataggctacaaaaccacggggtactcaaagcatatgatgatagtacattattttgccgaaaacagtcccaagatcaagaatctcaatattcccttaacagaagcttaagtgagcgtagaatgggtcatctgtatagcggtaaacagtatcacaaatcagagggaagtgacagtgatacagaggttctacatgagtatatcacgcctcaaaagaatggcggaggcagcacaaccagttcaacatcaggaagcaaagaaataaatgtagagaagctatatcttgatgaaccaagctgcaaaagacaaacagttgactatcaaagagaaagcaagctactagattttgatcaacaaagttcagggaagaatcttgatctaaatactcacaatatagatgataacgatcaaggttatagacattttgacttgaacggcttcagctggagttga

SEQ ID NO: 11777 - DNA, 879 bp, Oryza sativa
  Clone ID: TFbOSC404146j.C1.o1.np
gtccctagtaacggagggaacaataaccctaatatggcggcaagacagcggttacgttggacaaatgagttgcatgaccgtttcgtggaggctgttactcagcttggtgggcctgatagagccactcctaagggagttctgagaattatgggtgtgccaggactgacaatataccatgtgaaaagtcacctacagaaataccggcttgcaaagtacattccagacccttcagctgatgacaacaaggatgaagataaagatccagggaatctgctttctgcacttgaaggttcatctggaatgcagatatctgaagccctgaagctgcagatggaggtccagaagcggctacatgaacaattagaggtgcaaaggcagctacagctgcgaattgaggcgcaggggaagtatctccagaagatcatcgaagagcagcagcgtgtcattggtgcaggagcttccagagccacgtcaagcgaacaattgcctgactctgagaaaactaacccaccaactccagtaccaatttctgaatctccagttcagggtgcaccccatagcaagaacagtcaaagccaagttgagccgacgaagagcccttcgcatgatgatgctctcccgtgtggtgaacctttaacacctgactccagctgccggcctggttcaccgacgctcagcccaaagcatgagcgtgcagccaagagacagaggggcagtgatgcaggcgatgtcacagcattcgcagatggagaatttgtacttccaccaggcatctttgagtcaagcacaggatccgagttcctgcaagcttatgcacatcttgatgctcctatttttggcacgaagaaatcccttcaaccgtgccagtacgtcaatctt

SEQ ID NO: 11778 - DNA, 2085 bp, Oryza sativa
  Clone ID: TFbOSC22451j.C1.o8.fg
atggcggcgacgcaggcgacggccgccagaaaattcccagagggtttgcgcgtgcttgccgtcgacgatagccccgtttgcctcatgctcctggaggcgttgcttcgccggtgcaagtaccaaccgacgatgacgagggacgcggcgacagcgctacggatgctccgggagaggccgggggatttcgacctggtgattagcgacgtgcacatgctggacatggacggcttcaagcttctcgagctcatcggccttgagatggatctccccgtcatcatgcaatccgcaaatggggagcttgaaactatgatgaagggcgtgacccatggggcatgtgactacttggtgaaaccagtgagcctcaaagacatccagaacatatggcaacatgtgtggaggaagagaaagcttgacataaggaaccacaatggcggttacaacgacggcggtgagctggttggcgcgacgcggaccaagaggaagtacacaaggaagatgagaaatgatggagataattatggtgagaacaaagagaacatggattcaactctgaagagacaaagggttgtctggacacctgagctgcaccgggactttgtcattgccgtccatgagcttggagttgatcgtgctgttccaaggaagatattgcggatgatgaaagtggactacatgaccagagagaatattgcaagtcatcttcagaagtatcggttatacctgaaaaggatcagcactcaaacaggcatggatcctgatcaatttcctgaaaaatggaagtatatgaatgaactggatgctctgaaaaattactgtgaaaatgggagataccgtctaaccccagccattgcctcctcaagctcgagcaatccatttgcaaggatgaattctgcatctgcattggcaacaaatggctttctgcccactcactcagttcagctcaagaacagccagagaaacatggccatggggacagttggccatggtggaagcccgggcaacaatcctgtgtttcagccactgcagaactcatcaaatgcaagaaagtgcttcccatctggcccatctgggagctcatttgcaaacatatcaaatggcttggtgttggatacagacgattctggtagctcatatgctggcatgttctgtaagagtatgtgggagacaagcaatggctctccatcttgccattctggcaactcgtctgcaaacaagtcaaataatggggtttcggcgcctgcaaatcagtttcaagtacagtcaaagtttgggttttcagctcttgcaaatcagtttccagtgcagtcaaattgtgggttttcggcgcctgcaaatcagtatcaagtgcagtcaaatggtgggttttcggtgcctgcaaaccagtttccagtgcagtcaaatggtgagtttttggcgccaacaaatcagtttccagtgcagtaccctgaagtgaataatcagcctttggttcagatgaatcaatcttctacaaaccacttcagcacaattggcaatgattaccaatttccggaccttgcaaactgtagcaaatactggcaacctacagcaccatcgatgtttcctgatcttggtcacaatgatgggacatctttccgcccgtcgcaggcgaacatcgccaatatcaaccagctctcaagctttgcagcctccagtggccaggaaccgatgtttggagatgaactacatggtcaaatgtcaccaatcatgagcaccatatcactgtcagatttcgatgatcagatggggtcattcaacataggaaacgacacaagcccagcagagatgatgcatgacaacttctcacttggtagtgactcgaacatcagttcttcaacaccaactgattcaagcttcggttctacatttcctgactttcatctcgacagccctgagatgccggctcagatgctgaatggtggggatgaagatggcattcttctccctgtgctcgatgacacagttgatcagcaagatctttttgatcaactagatgaaaacaatggtagggaaaaacttggtagtggccgatgtgttaggaagggtccctttgaatgtttcttttag

SEQ ID NO: 11779 - DNA, 2076 bp, Oryza sativa
  Clone ID: TFbOSC6952j.C1.o2.fg
atggcgccggtggaggatggccgcggggtggagttccccgtggggatgaaggtgctggtggtggacgacgaccctacatgcctcgccgtgctcaagaggatgctcctcgagtgccgctacgacgcgacaacttgttctcaggctacaagagcattaactatgctgcgagagaacaggcgtggttttgatgttataattagcgatgttcatatgcctgatatggacggattcaggttacttgaacttgttggccttgagatggatctcccagttattatgatgtctgctgattcaaggacagatatcgttatgaaaggaataaaacatggagcatgtgactacttaattaaacccgtcagaatggaggagttgaagaacatctggcaacatgttataaggaaaaagtttaatgaaaacaaggagcatgagcattcaggtagcctagatgatacagatcgtaccagaccaaccaataacgataatgagtatgcttcatctgcaaatgatggagctgaaggtagctggaagtctcagaaaaagaaacgggataaagatgatgacgatggtgaattggaaagtggtgacccttcttctacatcaaagaaaccaagagttgtttggtcagttgaactccaccaacaatttgtaaacgcagttaatcatctggggatagacaaagctgttcccaagaaaattttggagttgatgaatgttcctggtttaactagggaaaatgtcgccagccatttgcagaagttcagattgtatctgaagaggattgctcagcatcatgccggaatagctaatccattctgcccgcctgcttctagtggtaaagtaggctcactgggaggacttgatttccaagctttggctgcctcaggtcagatccctcctcaagccctggccgccttgcaggatgagctcctagggcgacctacaaatagtttggtattgcctggaagggaccagtcatctttacggcttgctgcagtcaaaggaaacaagccccatggggagagagaaatagcatttggtcaacctatatacaagtgccagaataatgcatatggggcattccctcaaagcagtccagctgttggaggaatgccttcattttcagcttggcccaataacaaacttggtatggcagactcaaccggcacattgggaggcatgagtaattctcagaatagcaatatagtcttgcatgaattgcaacagcagccagatgccatgctgtcaggaacccttcactctctagatgtcaaaccttctgggatagttatgccttctcagtcattaaatactttctcagccagtgagggtctctcccctaatcaaaataccttgatgatacctgctcagtcatctggttttctagcggccatgcctccatccatgaagcatgaacctgttcttgcaacttctcaaccatcgagtagtctgttaggtggtattgatttggttaatcaagcttcaacaagtcagcccttaataagtgcccatggaggggggaatctttctggccttgtaaatcgtaatccaaatgtagtaccttctcaagggatcagtacttttcatactccaaataatccatatttggttagtccaaattctatgggaatgggctccaaacaaccacctggtgttcttaagacagaaaactctgacgctctgaaccatagctatggttatcttggtggtagcaacccccctatggactctggcttactctcttcacaatcaaaaaatacacagtttggtttactgggtcaggatgacatcactggtagctggtcgcctctgccgaatgttgacagttatggtaatactgttgggctaagccaccctgggtccagttcatctagttttcaaagttctaatgtggctcttgggaaattgcctgatcaagggcgaggaaagaatcatggatttgttggtaaaggtacttgcattccaagccgctttgcagtggatgagattgaatctccaactaacaacttgagtcacagcattggaagcagtggagatattatgagccctgatattttcggatttagtggacagatgtga

SEQ ID NO: 11780 - DNA, 855 bp, Oryza sativa
  Clone ID: TFbOSC409883j.C1.o6.fg
atggagagggcgggctacggcgtcggcgtcggcggcgcgggggcggtgggagccggggtggtgctgtcgcgggaccccaagccgcggctgcggtggacgcccgacctgcacgagcgcttcgtcgaggccgtcaccaagctcggcgggcctgacaaggcaacccccaagtcggtgttgagactgatgggcatgaaaggtctcaccttgtaccacctcaagagccatcttcagaaatataggcttggaaagcagaacaagaaagatacaggcctagaagccagcagaggagcatttgctgcacatggcatcagttttgcctctgctgcacctcctaccatcccatcggctgaaaataacaatgcaggagaaacgccactggccgatgcgctgcggtatcaaattgaagtccaacggaaactgcacgaacagcttgaggttcagaagaagcttcaaatgcgaattgaggcccaagggaaatacctgcagacgatactggagaaagcccagaacaacctctcctatgatgcaactggaactgcaaacctcgaagcaaccagaacgcagcttacagatttcaacctggctctttcaggattcatgaacaatgtttcacaagtgtgtgaacagaacaatggagagctagcgaaagcgatatctgaagacaatctcagaactaccaatctaggctttcagctctaccatggaattcaggattccgacgatgtcaagtgttctcaagatgagggcttactgctgctagatttgaatatcaaaggaggaggatatgaccatctgtcctccaatgccatgcgaggcggcgaatccggtctgaagattagtcagcacaggaggtaa

SEQ ID NO: 11781 - DNA, 537 bp, Oryza sativa
  Clone ID: TFbOSC404146j.C1.o3.fg
atgggtgtgaagggtctcaccctttttcacttgaaaagccaccttcagaaatacagattaggaaagcaatctggcaaagagatggcagagcaatcaaaagacgcttcttatattttgggagctcaaagtggaacaaatctatctcctacagttccaactccagatttgaaagagagtcaagaactaaaagaagcactcagagcacagatggaagtgcaacgaaaattgcatgaacaagtggaggtccagaggcatgtacagatccgaatggaagcgtaccagaactacatcgacacgctactggagaaggcatgcaacatagtatctgagcaactgaatggcttcagcatatctgaccatgatctaacctctgctggtgtcatgttgagctcttcagacaccttgagcccctccatcttccaccagctctctgtcagctcgatcagcctgcacagtcccggaggcaaatcctccccttttgcagctgatgctgacctgttctttcagaaggcgcctgaaaaacgcaagtcatattga

SEQ ID NO: 11782 - DNA, 900 bp, Oryza sativa
  Clone ID: TFbOSC900288j.C1.o13.fg
atggccctgcaggctgcagccctgctctctttctttctttctttctttcttttttttttctttctttcagttcttgcttctcccgattatccttgtaaggggaacctctgctctgactgcattctcatgatgtaccatgcaaagaagttctctgtaccctttggaccgcagagtacacagagtaacgagcatatgagtaatattggagcttttggcgggtcaaacatgggcagccctgctaatcctgcagggagtgggaaacaacggctacgttggacctcagatctccataaccgctttgtggatgctattgctcagcttggtggacctgatagagcaacacctaaaggggttctcactgtaatgggtgttcctgggatcacaatttatcatgtgaagagccatttgcagaaatatcgccttgcaaagtacataccagaatctcctgctgaaggctcaaaagacgaaaagaaggattctagcgattccctctctaacacagattctgcaccaggaatgcaaatcaatgaagctttgaagatgcaaatggaggtccagaagcgactccatgaacaacttgaggtgcaaaggcagctgcagctgagaattgaagcacaagggaagtacttgcagatgatcatagaggagcagcaaaagctcggtggatcactcaaagcttgtgaggagcagaagctaccgcattcaccaccaagcttagatgactacccagatagcatgcagccatctccaaagaaacccaagatggacaacctgtcacctgattcggtacgggatgtgacacagtcagattttgaatcccatttgattggtccttgggatcaagaggctgcattccgagtggatgaatttaaagctgaccctggtctgaacaaatcataa

SEQ ID NO: 11783 - DNA, 656 bp, Oryza sativa
  Clone ID: TFbOSC11575j.C1.o2.fg
tggcgaccccgaagcagattcgcgagctgatgaaggttgatggattgaccaatgatgaggtgaaaagccatctccagaagtacaggttgcacacaagacggccgatgccgtcgccggcgccgccgacggcagcgacgccgcagctggtggtgctgggaggcatctgggtgccgccggagtacgcgacgcaggcggcggggccggccatctacggcgcgcacccggcgacgcagccgcactacacggcggcggtggcggcgcaggagtactaccaccaccaccaccaccacctgcagcaccaccccgccgccgccgccctggtgcaccaccgcgccgtagccccgcccccgccgctgccgcctcagcagcagctggcccctccctacagcgccaagtcgtcggcgtcggcgaggctcgggtccccggactccgacggccgtggcagcggcggcggcggcggcgccgccgcctccggagccggaagggacatgtccgagagcatcgaggaggaaggcgagggcgaggagcgggaggacgacgacgacgacgacgagatggcggcgaccaacaacgcccacgccgtcgacggcgacgacgacaacgacgagatcaacaccaccaccaccacgagcgcgggagcgataactactaattaa

SEQ ID NO: 11784 - DNA, 265 bp, Oryza sativa
  Clone ID: TFbOSC101630j.C1.o11.np
tgtcgcgacgtccctctccgtcacagatcggagagatgagctcggcggtgcgaggagaacgacgagcaggggcggcaacgaggttccctctctggcgtctcacgcgcggggccaccaagcgcgaggtcacgacccccacagcgcagtcgcatcgttcttccccgcgtcactcgacagcttttctaacgaagaacgcgtgcccaattttggctacatgaaccttgttcggtcacactccaagccgagctggtgcagaatctcgggt

SEQ ID NO: 11785 - DNA, 2559 bp, Oryza sativa
  Clone ID: TFbOSC900310j.C1.o4.hg
atggggtcgtcgtcggcgtcggcggcgcagcacgaggaggcggcggcggcggcggccttcgtcctcggcggcgtcgacatgcggatgctggcggcgaggacggcgacgggcgcgctggcgagggcgggcggcggcgaggcggcggcggcggcggcggcggcggcgaggttcgaggattgcatccggagcctcgaggccgagaaggccaagatggaggtgttccgccgcgagctccccatcagcgtccacctcatcgccgacgtgatcgagtggctcaaggacgaggtggagaagcagcggctgctacggcggcggcaggtggaggctccggcggcggcgccgccaccggagatgttcgcgccgccggcgacggcgaagaggaagtcggcggcgtcggcggcggcggagggggtgaaggcggaggcggacgcgaacgacaagcggagctggatgagctcggcgcagctgtggagctgcgggagccacacaagcaccagcaccagcaatggcggcagcgtcaagaagcagcagcacaaggtgtccaatgcgttcatgccactggccaccttgccggcgtttgcaaaatcactggagaaagccgacgccgccgtgccagacctgtccctctcctcccgggtggcgatggccgacgccccggcatgtccggcggcgccgagcgccaccagcagcgccgtcacggatgtcgctgtagcgcagcggcagcaggcggtgcaacggaaggccagacggtgctggtctccggagctccaccgccggttcgtcgccgcgctccagcgcctcggtggcccacaagctgcaactcccaagcagattagggagctgatgaaggttgatggcctcactaatgatgaagtcaaaagccacctgcagaagtaccggctgcacacgcggcgggcatccgacggcggtgatggtggcggtgaccatcagacggttggcggccgtctatggccgctgccaccggagcaatacaccacctcgcagcacagcacatcgcagtctggctcgccgcagggccccctccagctcaccgtgtcgtcgagccacgccgtgtcagtgaccgccggcgatagctgcgacggcggtgaggaggaagaggaggacgggaacccaatccacagtggtagtgaggggaaaacctccacgatttctcgcgccgccgccgccgccgccgccgtttggctgagcacctcgccgccggcgctattccccaccggggaaacctcgccggcgtgtctgtggagatttctgctgcgagggaagcttcttcgtcgactccgccggtgcggttgcggttcaggagctcgccgagcggcggcggcggcgatgagggaggcggtgacggtgcaggtcggcggcttcgccaactacgtcggctcccacttctggaacttccaggatgagttgctcgggctcgccgacgaccccgacgccgatccggtcttcaagaacgccgcgctggacatggacgtcctctaccgctccggcgagacgcaccagggtgttgctacctactgccctcgtctggtgtctgttgattctcgagggtctcttggctctttgagttcatccggtaatctcgactttgacaagttcgataactatggcagcgcacaagaggttgtttcagactggtcgcaaatagaggaaatgaatgagaggctaaggttctttgttgaagaatgtgaccatattcagggcatccagtttattgtggatgattcaggaggtttttccagtgtagctgcacagtttttggagaacattgctgatgattacacaaatacacttgtattgctttactgtgtgagggatccaatgacccttggaccatccaggaggaatcaaagggagtccattatgagagctcttcatgatgctgtttcattttcaaaactttcgtccttttgcaacctgatgaacatggttactgctctggatgtagcgatgcctgccccttctttgacagatagagatgctatggggaacatagagatgaagctgcactctttgacccctgaaatcagcgatgaggacgaagatccttattcagttgaatcgctagtggttcatggagctcttgatagaggcgggcaaaggacttccatatcacaagtgaaggactcggtatgttcagtctacgaagccagagagacaaagccaaaattttcccatctctcagcatctctttgccccctccctgtcccccttccgttcccgtcaatcttcagaggcaacattggccggcacggggagatccttagtgaccatacagaagaatcccagccaaagggctcacttgacatcgaatcgataccaatggcggcacggttacgatcaagcagcgccgtcctgcctttcatagagaggcgatcggggagcctccagaagcacggtgtcgcgagaggcgccatcgggtctctggtcctccatgactggggcttcgggagggaggaggtggaggacatgggggagcacctagcgaagttgctccgcccgtttcaccctgaaatggatcttacttcggattccgactag

SEQ ID NO: 11786 - DNA, 1659 bp, Oryza sativa
  Clone ID: TFbOSC401249j.C1.o76.fg
atgcggcggagcggagccccgccacaagaaaattactcggagagccgcgtgcgtctagttcagataaacctcgcgtacagtgcattcatcccgacagattggaacaacttggagacagctgagtcaaggcctaaatccacgggattaaacaaggttcgagccttcgaggagccaatgaggcgagcatgttctgctgccccttcagggtttcagaagacgagcttgcgaattccatccccctccacccacgaagcaccaaccggcgcgcagcaaaagaccagaaaattaaagccaggagcagaaaacaaccaatcatatcctgttggagtgcgtctttacaaactagagctggagactaaaaagaaccagataagcaaagaaaatgatagcgaggatatcatgaacaccaagaagattaagctgcacgactgccacttcggctcgccgctatgtgacccttcgccggcgccgcacctgctgagctccgccgccgccgccgggctgtcgttccacccggggctcgtgagctcggcggcgcagcaccagcagcacggcgcgggcggctggctgcacgaggagtactacgcgccgaggtcgtcgccgccgtcgtcgcttctcgcgcagacctgcgtcggctccaacgcgaccgcgttctacgccgccgagaacctgccgcagttcgacttcccagctctcggtacggcggcggcggcggcggccaaggcgccgttccggtcgtcggagagcgagctgtaccggccggtcgacccgctgctcctccgtgcggaccactcggtgaggacgtactacgtccggccgcagaagcgggattccggcgagaggacaccattgccgccgccgtcgcagcaacagcatcaggacagaatccacgggctcttcgccggcgctcccaccactcggcttctcagcggcgaacccaaaatccactcgtttccacctcaagtggcggcgaagccgattctgccggcgatggatgcgccgagcctgcagaaccagatggagaatcagctgacaaggaactgcatcggcgcggcaactccggtgacccccaccggaaacctcgccggatcaggtgcgccgagcaagacgcggatcaggtggacgcaggacctgcacgagcggttcgtcgactgcgtcaatcagctcggcggcgcagacaaggcaactccgaaggggattctgaagctgatgaattcggatggcctgacgatctaccacatcaagagccatctccagaaatatcgcatagcgaagtacatgccagcgtcatctgaagggaagcaactggagaaaagagcaacaggaaatgacatgcagaatctggaccccaaaactggaatgcaaatcacggaagcactgcgtgttcagctcgacgtgcagaggcgcctccatgaacagctagagattcagagaaatctgcagctgaggatagaggagcaggggaagaggctgcagaagatgttcgaggaccagctgaaggcgagcaggagcgtgatggaaccgcaggagctggacgacgtcgtcgccttcgccgccggcgacggagacgacgacgcgttcgatgacgtcgacgtgcagctgctggccgtcgctggcagcggctatgacgacgccgggttccagtccaaaataagctag

SEQ ID NO: 11787 - DNA, 996 bp, Oryza sativa
  Clone ID: TFbOSC900221j.C1.o21.fg
atgagggaggaggaggaaccgagctggttcgcgcggtgggaggagcagctgccggcgccggacgagctgatgccgctgtcgcagtcgctcatcacgcccgatctcgcggtggccttcgacatcccgacgcatgggggtggtggtggtggtggggtgggcgggggtgttgtcgggggtgatggggtgggaggtggaggtggtggtggtggtggtggtggcggtggcgtgggggcaggggagatgaacggcggggcgtcgtcggcggccgggtcgagcggcggcggcggcggcgggggaggtggcgacgagccggcgcggacgctcaagaggccccggctcgtgtggacgccgcagctgcacaagcggttcgtcgacgcggtggcgcacctcggcatcaagaacgccgtccccaagacgataatgcagctgatgagcgtcgatggcctcacgcgcgagaacgttgcgtcgcacctccagaagtaccgcctctacctcaagcgcatgcagggggtcggcaacggcggcggcggcggaggagggggcggcgccggcgccggcgggagccactcctccggctccggcacggacgccgccacggagcacctcttcgccaccgggccggtccccttcctcccgcccggccgcgcccccgccggcggggacccgtacccgccgttcgcccccatgggcgggcaccaccaccacccgccgcagatcggccacttccaccaccaccccgccgcgcgcccgctcggccactacggctccggcccgggcgccggcttcgaccacgggttcctcagccgggccgtcgccggaggcggcccgcccgtcggcccaccggggatgcaccaccgcatggtcggccccgccgccggcatggcgatgatggcgccgtcccccttcgccgaagagctggagctcggatcccgaggaggcggcggcggcggcgggcgccgcgagcttactctgttcccgacgaccggcgaccactga

SEQ ID NO: 11788 - DNA, 2076 bp, Oryza sativa
  Clone ID: TFbOSC401801j.C1.o6.fg
atggcgccggtggaggatggcggcggggtggagttccccgtggggatgaaggtgctggtggtggacgacgaccctacatgcctcgccgtgctcaagaggatgctcctcgagtgccgctacgacgcgacaacttgttctcaggctacaagagcattaactatgctgcgagagaacaggcgtggttttgatgttataattagcgatgttcatatgcctgatatggacggattcaggttacttgaacttgttggccttgagatggatctcccagttattatgatgtctgctgattcaaggacagatatcgttatgaaaggaataaaacatggagcatgtgactacttaattaaacccgtcagaatggaggagttgaagaacatctggcaacatgttataaggaaaaagtttaatgaaaacaaggagcatgagcattcaggtagcctagatgatacagatcgtaccagaccaaccaataacgataatgagtatgcttcatctgcaaatgatggagctgaaggtagctggaagtctcagaaaaagaaacgggataaagatgatgacgatggtgaattggaaagtggtgacccttcttctacatcaaagaaaccaagagttgtttggtcagttgaactccaccaacaatttgtaaacgcagttaatcatctggggatagacaaagctgttcccaagaaaattttggagttgatgaacgttcttggtttaaatagggaaaatgtcgccagccatgtgcagaagttcagattgtatctgaagaggattgctcagcatcatgccggaatagctaatccattctgcccgcctgcttctagtggtaaagtaggctcactgggaggacttgatttccaagctttggctgcctcaggtcagatccctcctcaagccctggccgccttgcaggatgagctcctagggcgacctacaaatagtttggtattgcctggaagggaccagtcatctttacggcttgctgcagtcaaaggaaacaagccccatggggagagagaaatagcatttggtcaacctatatacaagtgccagaataatgcatatggggcattccctcaaagcagtccagctgttggaggaatgccttcattttcagcttggcccaataacaaacttggtatggcagactcaaccggcacattgggaggcatgagtaattctcagaatagcaatatagtcttgcatgaattgcaacagcagccagatgccatgctgtcaggaacccttcactctctagatgtcaaaccttctgggatagttatgccttctcagtcattaaatactttctcagccagtgagggtctctcccctaatcaaaataccttgatgatacctgctcagtcatctggttttctagcggccatgcctccatccatgaagcatgaacctgttcttgcaacttctcaaccatcgagtagtctgttaggtggtattgatttggttaatcaagcttcaacaagtcagcccttaataagtgcccatggaggggggaatctttctggccttgtaaatcgtaatccaaatgtagtaccttctcaagggatcagtacttttcatactccaaataatccatatttggttagtccaaattctatgggaatgggctccaaacaaccacctggtgttcttaagacagaaaactctgacgctctgaaccatagctatggttatcttggtggtagcaacccccctatggactctggcttactctcttcacaatcaaaaaatacacagtttggtttactgggtcaggatgacatcactggtagctggtcgcctctgccgaatgttgacagttatggtaatactgttgggctaagccaccctgggtccagttcatctagttttcaaagttctaatgtggctcttgggaaattgcctgatcaagggcgaggaaagaatcatggatttgttggtaaaggtacttgcattccaagccgctttgcagtggatgagattgaatctccaactaacaacttgagtcacagcattggaagcagtggagatattatgagccctgatattttcggatttagtggacagatgtga

SEQ ID NO: 11789 - DNA, 1299 bp, Oryza sativa
  Clone ID: TFbOSC401261j.C1.o3.gm
atggggcgggtatttcccgccctcctgcccggccacattatttcgggacaaattcggcagcagctcagtggcggcgtcggcgtcggcggcgccgcggcggcggcgagctcgaatgatcggccgccgttgtgcgtccagggtgactccggcctcgtcctcaccaccgaccccaagccacgcctccgctggaccgtcgagctccatgaccgcttcgtcgacgccgtcacccagctcggaggcccggacaaggcgactccaaagacgatcatgagggttatgggagtcaagggactcacactttaccatctcaagagccatcttcagaaattcagacttgggaagcagcacaaggatttcaacgaccactcggttaaggatgcaatggacatgcaacggaatgcagcgtcttcttcgggcatcatgggaagaagcatgaatgacgtgcatgtgaatgaggcactaaggatgaagatggaagttcagagaagattccatgaacaattagaggtgcaaaagcaccttcagatgagggttgaggcccaggggaaatacatgcagaccatcctggagaaagcataccaagccatctcgtcctcaggagattgcgccacgtggcacgcaggatacaaatctctaggcagccaagctgtccttgacattggcagctccatgagcttcccttctctgcaagatgatctgcagttatatggaggaagccatctagatcacctgcatcagcagcatgagcagatggagatcaggccatcaattgataccttcttggcattcaattacagctccagtactgggaagagcccaatggtgtggcccggcgccgacgacggcggcggcgagccggcgaagatctccggcgatcatcagctccagatggcggcgccggcgacgacgacgatgatgatggaggccatcaccatgtcaggaggagactccatgggcagtaaggggtttgagggtcagatgagctctaagcttgacatgagatcaccacctccacagcaaacagtgctacctgtaggaagtgagaggatgagtagtccaattgttggagccaaggctaggaacatctcctatggccgcaacgtgcatgtgaatggggcagataagaaggcccagagccaagaacaacaagaggcagaaaagcacctccagatgagggttgaggcccaggagaaatacatgcggtccatgatggagaaagcacaccaagccctcgcatctggtgccacgtggcccgccgccaatgagcaggcgaagatctcacctccaggaaggaagtga

SEQ ID NO: 11790 - DNA, 1671 bp, Oryza sativa
  Clone ID: TFbOSC7339j.C1.o2.fg
atggcggccaccgccgcctacctcccgctccgtgcccaggcgcaggtgggcctggctccgctccggccgtcgggctcggccgctgctggggcgcggttgcccggccggacggcgcggcgccggcttgcggcgagaggcgggccggaggctgccggtatccgcgcggaggctgtccctggtggtggaggggtcgcgcggagggcggccatggtgcccccgtataatgttctaatcaccggttccacgaaaggtataggatatgctctggcaaaggaatttttgaaggctggcgataatgttgtaatctgctcaagatcagctgaaagggtagaatctgcggtgactgacttgaaaaaggaatttggagagcaacatgtgtggggaattgtctgtgatgttagggaaggaaaggatgtaaaggcactagttgattttgcacgtgacaagatgaagtatattgatatttggaaccataagaaggcaggattttctccttatctttgtgttcctttggcacagatcaacaatgctggatcaaatgcatatagttacaaaccgttggtcgagacctccgacgaggctctcatggaagtgatcacaactaacactcttggattaatgatatgttgtcgtgaggcaataaatatgatgagaaaccaacctcgaggtggccacatatttaacatcgatggtgctggttctgatggaaggccaaccccaaggtttgctgcatatggtgcaacgaagagaagtgtggtgcaccttacaaaatctctgcaggccgagttgcagatgaatgaagtgaacaatgttatggtgcacaatttgtcgcctggcatggttacaacagatcttcttatgtctggtgccacaacaaagcaggccaaatttttcatcaatatattagctgaacctgctaatgtggttgcggattatctcgttccaaacatcagagcaatacctactaaccagtccatgaaaccaacctacatccgttttctcacaggcttgaaagcctactccagaatattttcaaggattgcttttggtgctcgtaggaacaaaataatgtccaacagccagccagcacaagaggatgattgcatgtcgagcattctggtttctcgccttatccgggctatgcagccaacaaggagttaccttcgatggtctgatgatctccataagatgtttgtggaggctgtggcctaccatggaggtccctatgaagctaaaccaactgcagtgaaggagacaatgcaagctatgggtgtcacaagccttacgacccacaacatcaagagtcacctccagaagtacagggagagtttcagttcaggtgttgggtctcttcatgatcatgatctgctgagaaccacttctccaagcaaggaagcacttgatctggcatctgagatggttagggacaacgatgccgctatggctgaaatcgagatgttgaacgatttgctgttggatcacgatatagagatggtagagaccagtttctctgtggacgatttgcagatgatggagagggagctgatgagtgaaatcaagctgatcgagcacaacttcgagatatctgagagtgctcttgatgagtacatggatgacttggccaactacgcatttgaccttacgggtcctgcaaactcttctagtccatga

SEQ ID NO: 11791 - DNA, 1347 bp, Oryza sativa
  Clone ID: TFbOSC900146j.C1.o4.fg
atgtgccccgacattgaggaccgcgccgcggtggccggcgatgctggcatggaggtcgtcgggatgtcgtcggacgacatggatcagttcgacttctccgtcgatgacatagacttcggggacttcttcctgaggctggaggacggtgatgtgctcccggacctcgaggtcgacccggccgagatcttcaccgacttcgaggcaatcgcgacgagtggaggcgaaggtgtgcaggaccaggaggtgcccaccgtcgagctcttggcgcctgcggacgacgtcggtgtgctggatccgtgcggcgatgtcgtcgtcggggaggagaacgcggcgtttgccggggctggagaggagaagggagggtgtaaccaggacgatgatgcgggggaagcgaatgtcgacgatggagccgcggcggttgaggccaagtcttcgtcgccgtcatcgacgacgtcgtcgtcgcaggaggctgagagccggcacaagtcatccagcaagagctcccatgggaagaagaaagcgaaggtggactggacgcctgagcttcaccggaggttcgtgcaggcggtggagcagctcggcatcgacaaggccgtgccgtcgaggatacttgagatcatggggatcgactctctcacccggcacaacatagccagccatcttcagaagtaccggtcacacagaaaacacatgattgcgagagaggcggaggcagcgagttggacccaacggcggcagatttacgccgccggtggaggtgctgttgcgaagaggccggagtccaacgcgtggaccgtgccaaccattggcttccctcctcctccgccaccaccaccatcaccggctccgattcaacattttgctcgcccgttgcatgtttggggccacccgacgatggacccgtcccgagttccagtgtggccaccgcggcacctcgttccccgtggcccggcgccaccatgggttccaccgccgccgccgtcggaccctgctttctggcaccacccttacatgagggggccagcacatgtgccaactcaagggacaccttgcatggcgatgcccatgccagctgcgagatttcctgctccaccggtgccaggagttgtcccgtgtccaatgtataggccattgactccaccagcactggcgagcaagaatcagcaggacgcacagcttcaactccaggttcaaccatcaagcgagagcatcgacgcagctatcggtgatgttttatcgaaaccgtggttgcctttgcctcttggactgaagccaccttcagtggacagtgtgatgggcgagctgcagaggcaaggcgtagcaaacgttcctccagcgtgtggatga

SEQ ID NO: 11792 - DNA, 699 bp, Oryza sativa
  Clone ID: TFbOSC416785j.C1.o7.fg
atgcccggcgtgcggctgaaccaccaccaccatcatcagccccccgcggcggcgccgttcgtgggcgcggcgccgctgccgcaccacccgagatcaggcggcgcgtgctactgcgacccgtgccacgtcgccggcgcgtggcgcaggggtggctgcggcggcggcggcgcccgcggcgtgctcccggcgaagcgcgccccgcgcgcgccgcgcatgcgctggacgtccaccctccacgcccgcttcgtccacgccgtcgagctcctcggcggccatgacagggcaacgccaaagtcggttcttgagctgatggatgtgaaggacctcaccctggctcatgtcaagtctcacttgcagatgtacaggacagtgaagaataccgaaaggccggcagcttcgtcagatcaagctgatgggtttgagaatgggtcggccggcgagatctgcgacgagaactcgctcgacctgcacggcggatgcaggccggaggcgatgtcggcggcggcgcgacatggaagggaggactggtctggcttccatgagtccaacactggaaccatgcaaactctgaaggatatgcaatccaagagcctagagatcatatcagacatgaactcctgcgtttcggagacgacatcgagcaccagcgagctgaacctcgagttcacgctagggcgaccacaaaaccgaccaaactaa

SEQ ID NO: 11793 - DNA, 1764 bp, Oryza sativa
  Clone ID: TFbOSC415689j.C1.o8.fg
atgtctcgtccccaacctccaccgcttctccccgtcctccctgaactcggcggcctccaggcactcacctcatcctcggcttccctcgccacgtggctccgcggtggtggtcgggaggaggttgcagctatcaatctagatggcggtgatgcggtcatactggtcgttgtcccacctcacctcgccggccatggtggacaagggaggccgccccactacagcattgaacggaggaggtcacaacctcaattcgagtgccatgcgtatgtcaagggtgtaaaatatttggtattcgagttcaggggtgtaattcggctgacggcgatagctcacggagtggtaggcgacgtatttcttggcagcgaggcacctgtggtgacttcgtcaatttcaaaatatgctggtctagtcttcggaggtgctcatagggatgtgtcagccctaggagaggagaagctttctttttttggaaaatcgagtcaacaaaagagaataagcaccaatcagctctacaattctggaattccggtgactgtgccatcgcctctgcctgctataccagctaccctggatgaaaacattcccaggattccagatgggcagaatgttccgcgggagagagaattgagaagcacacctatgccacctcatcagaatcagagtactgttgctcctcttcatgggcattttcagtccagtaccgggtctgttgggcctctgcgttcgtcccaggcgataaggttctcttcagtttcaagcaatgagcaatatacaaatgccaatccttacaattctcaaccgccgagtagtgggagttcttcaacgctcaattatggatcacaatatggaggctttgaaccttccttgactgattttccaagagatgctgggccgacgtggtgtcctgatccagttgatggcttgcttggatatacagatgatgtccctgctgggaacaatttgactgaaaacagttctattgcagctggtgatgaacttgccaagcaaagtgaatggtggaatgattttatgaattatgactggaaagatattgataacacagcttgtactgaaactcaaccacaggttggaccagctgcgcaatcatctgtcgcagttcaccaatcagctgcccaacaatcagtttcatctcaatcaggagaaccttctgcagttgctataccctcgccctctggtgcctccaatacctccaactccaagacacgaatgagatggactcctgaacttcatgagcgctttgtagatgctgtcaatctacttggtggcagtgaaaaagctactcccaagggtgtgttaaagctaatgaaggcagacaatttgaccatttatcatgttaaaagtcaccttcagaaatacagaacagctcgatacagaccagaattgtctgaaggttcttcagaaaagaaggcagcctcaaaagaggacataccatcaatagatctgaaaggagggaactttgatctcactgaggcattgcgtctccagttagaactccaaaagaggcttcatgaacagcttgagatccaaagaagtttgcagctgagaattgaggagcaagggaagtgccttcagatgatgctcgagcagcagtgcatacctgggacagacaaggcggtggatgcttcaacctcagcagaaggaacaaagccatcttctgatcttccagaatcttctgccgtgaaggatgttccagagaacagtcagaacggaatagccaaacaaacaggcatgagaatccattaa

SEQ ID NO: 11794 - DNA, 702 bp, Oryza sativa
  Clone ID: TFbOSC419196j.C1.o4.fg
atggcgactactgctgccaccgcgccggatctgtcactccacataagcccgccttcgccgccggacatggccgccggcggcgagacgatggagcagttggctgagccaaagctgtgcctagggtttggcacggcggcggcggcggcggcggagcagtacaacaatggcggctgcaacctccagcagcagcagcggctgcaccaacctagccagatccagagattcaagaagagcgccagcggcggcagccctgtgtgctccggcggcgccaccggcaccggcggcgttgcggcggcgagatccgggaatggcggtggaggtgggaagaggagctctagggcgccgaggatgcgatggacgacggctctccatgcgcactttgtgcaagccgtcgagcttcttggaggccatgaaagagcgacaccaaagtcagtattggagttgatgaacgtgaaagatctcacgctggctcatgtgaagagtcacctgcaggcaacttatttgcttgacctggtgcagatgtatagaacagtgaagggaaccacagacagaacatgtgctgaaggccatgggcagatgagagatatgggctttctgaggagaggaggtggtggagtggatggctttgacgtgcttggtaacacctcttcaattgcaatcgccaatattagggccttcaatctcaaggatgcaaatatataa

SEQ ID NO: 11795 - DNA, 1620 bp, Oryza sativa
  Clone ID: TFbOSC401660j.C1.o24.fg
atgcttgaggtgtccacgctgcgaagccctaaggcggatcagcgggcgggcgtcggcggccaccatgtcgtcggcttcgtcccggcgccgccgtcgccggccgacgtcgccgacgaggtcgacgcgttcatcgtcgacgacagctgcctgctcgagtacatcgacttcagctgctgcgacgtgccgttcttccacgccgacgacggcgacatcctcccggacctcgaggtcgaccccacggagctcctcgccgagttcgccagctccccggacgacgagccgccgccgacgacgtcggctccgggccccggcgagccagctgctgctgcaggagccaaggaagacgtgaaggaagatggagccgccgccgccgccgccgccgccgccgctgactacgacgggtcgccgccgccaccgcgggggaagaagaagaaggacgacgaggaaaggtcgtcgtcgttgccggaggagaaagacgcgaagaacggcggcggcgacgaggtcctgagcgcggtgacgacggaggattcctcggccggtgccgccaagtcgtgctcgccgtcggcagagggccacagcaagaggaagccgtcgtcgtcgtcgtcatcggcggcggccggcaagaactctcacggcaagcgcaaggtgaaggtggactggacgccggagttgcaccggcggttcgtgcaggcggtggagcagctcgggatagacaaggccgtgccgtccaggatcctggagctcatgggcatcgagtgcctcactcgccacaacatcgccagccatctccagaaatatcggtcgcacaggaaacatctgatggcgagggaggcggaggcggcgagctggacgcagaagcggcagatgtacaccgccgccgccgccgccgccgcggtggcagccggcggcgggccaaggaaggacgccgccgccgccactgcggcggtggccccgtgggtcatgccgaccatcggtttccctccgccgcacgcggcggcgatggtgcctcccccgccgcaccctccaccgttctgccggccgccgctgcacgtgtggggccacccgaccgccggcgtcgagccgaccaccgcggcggcgccaccaccaccctcgccgcacgcgcagccgccgttgctgcccgtctggccgcgccacctggcgccgccgccgccgccgctgccggcggcgtgggcgcacggccaccagccggcgccggtggacccggcggcgtactggcagcaacagtataacgcggcgaggaagtggggcccgcaggcagtgacaccggggacgccgtgtatgccgccaccgttgcctccagccgccatgttgcagaggtttcctgtaccgccggtgcctggaatggtgccgcaccccatgtacagaccgataccgccgccgtcaccgccgcaggggaataaactcgctgccttgcagcttcagcttgatgcccacccgtctaaggagagcatagacgcagccatcggagatgttttagtgaagccatggctgccgcttcccctcggcctcaagccaccgtcgctggacagcgtcatgtctgagctgcacaagcagggcatccccaaggtgccaccggcggcgagcggtgccgccggctga

SEQ ID NO: 11796 - DNA, 1299 bp, Oryza sativa
  Clone ID: TFbOSC405553j.C1.o18.fg
atgctgcaaaggaacctgccgaatctctccctccggataagccctccggccgtctcgtcggcggcggcgccggtatcctccggaacaccgacgacggcggcgaggacgactctgccgaccggagtgattacagacgcagaaggaggaggcgaagtagcagcgttctttggaaaccctagctccggcagcgagccccccggtctgagcctggggctcgggccgacgacgccggcgcacgcggacgccggcggcggccgccatggcgaccaccacctgcagccgcaggggtgcgcgccgttcaagcgcgcggcggccagggcgtcccagctgccggcgggctcgaagcggagcgtccgcgcgccgcggatgcgatggaccaccgcgctccacgcccgcttcgtgcacgccgtcgagctcctcggcggccacgagagagcgacgccgaagtcggtgctggagctgatgaacgtgaaggatctgacactggcgcatgtcaagagtcacctccagatgtataggacagtgaagagcacagacagatcatcccacattgcctcaggagaggcgcagctgcagcagcaggcaggaatggaggtggccatggaggcggcagctggaggaggaggaaatggtggtggtggtggtggtggggtggtgctaccgatgatgccggcatgtgacgacatggttgggatctgtagctcccctgcgccgcctgccgcagcgactagttccgctgctgcctacttcctctgcgcgacgacgacgtcaacagcaactgctccactggcagtagtgccatcgcctcctgctccaaccattcccacaaggtttcatgaatgcatatatggagatgttgatgtagtaatacagtcaatttcaatgttaataaatgttttgctacatggaattgataagagctgcctcgctttaacttttcttgagcacaggaggactgaccaaacgccagcgctggaaaagggtgtcgcgattgttgactcgttgcaccggtgtcagaagcataactactcaccagtgcttcaagatgctcttcatcagggagctgaagaagatcatcttattaccgggaacctaccaatgggaggagcatcagcacaagcgagcattgaggccatggcgactaccaactcttcaagccctgcaagctcatctccatcacttgcaagcctggagcagctgctacctgaagactcgtttgcgcccaacctggagatctccctcgggagacataactggaacatggaccatcctgaagaactcagcctgaaatacctgtga

SEQ ID NO: 11797 - DNA, 969 bp, Oryza sativa
  Clone ID: TFbOSC417454j.C1.o3.fg
atgggattctacagctcgtaccaccacccatccacgtggccctccacgtcgccgtccccgctcgcggcgccgccgggcgccgcgtcgtcgccgctcgaccccacggcggcgttcctctcctccccccaccaccggatgctgtccgccgcctcggggaggctcaacggcatgctctccgtctccgacaccctccgcagctacggcgtccccggcgccgccgcccccggcgtcatcggcggcgcgcaccaccaccaccaccacctccacggcggccagccgttcgtcggcgccctcgcgtcccgcttcatgcccaagctccccgccaagcgcagcatgcgcgcgccgcgcatgcgctggacgagcaccctccacgcccgcttcgtccacgccgtcgagctcctcggcggccacgagagggcgacgcccaagtcggtgctggagctcatggacgtcaaggatctgacgctagcgcatgtcaagagccacctccagatgtatcgcaccgtgaagagcactgacaagcctgcagcctcttcagggccggcggacggcggctccggcgacgaggagttcgccggcggcgggcaggcggcgtcgggcggcggcgacagcatgtgcctgaggggtggcggcggcggcggggtggccgcggcggcgttcgcggagcacggccggtcggcgtcggagggcgccgccagctcggtcggcggcggcggcggcggcgacatggaccagtcgtcggccggcaacaccagcaccaccaggtggagcaactcctcaagggacccatggctgtcgtccaattcttgcaacatggacgcccatcgctccgtaggattgtcttctcctattgagaacttggaaccgtgcagatcgagcagctcgcaggtgtccaaccatgagctgagtagccctagtctcgagttcactctagggaggcctgactggcacggtgcagatcatgattag

SEQ ID NO: 11798 - DNA, 762 bp, Oryza sativa
  Clone ID: TFbOSC100626j.C1.o5.fg
atgggaattagcggcgagaggaagggagccgcgaggcagtacaacaggtccaaggtgccgaggctgagatggaccgcggagctccaccgcagcttcgtgcgagccatcgactgccttggcggccaacaaaaagcaactcctaagctcattcttcagctcatggatgtcagagggcttaccatatctcacgttaaaagtcacctacagatgtacagaggcacacggcatggcattggacaaaacgatatgcagccacagctacatctgaagcagcactcattcggcagtgatgagcagagccccaaggaattcatgtgcccacccataaaaagggccaaggtagggacagaagcttcaggcaaatacagatgcatggaagggagcagtgacatgaggagtagtgctcctcctgcaggcacccggtacttcatcgatgattgtatgcgactgcaagaagtgtccatggataggaggagatcagatcaacacgatgctgcagctgccgctcgtgctcgtgctcctgctgctgctgcttcaagccttcatcaggcactgggattttgggtgcagggaagaagagaggagccctttatggtacaccagattagtaaacccaaagcacatcaactgaaccatatggtcaggaacatgaagatatcttgcaaggagaaccacgaaagtagattcttcatgtccctcgtcatggtgctattactaatttctgctgatctcgtttctcgtgaaacaccctcgaagctgtga

SEQ ID NO: 11799 - DNA, 3462 bp, Oryza sativa
  Clone ID: TFbOSC401719j.C1.o42.fg
atggcgatgcgaggtgagccgtggcggcgccaggagggggagcaggcgcaggcggaggccgatcgggaacgcgagctggacctcttccgcagcggctccgcgccgcccacggtcgagggctccatgggcgcgctccacgccgccgccgccgccgacgtgttcctggaggacgagctccgggccgacccggcctaccactcctactactactccaacggcaacatcaaccctcgcctcccgccgccgctgctgtccaaggaggactggcgctccgcgcagcgccttcgccccggcttgggtgggatcggcgacgggaggaagcccagaggtggaggtggaggccgcggcggcggcggcgctggagggatgggtccaggggatggcctcattgggatgcccggtctcgagattggccgccagaatagcttctccggttttggcactataaaacgcctttctgtcgcaaaagtattggtcctgaaacttcttataattctattcaaggctaaagaaataacttctgacctatatatgatgcaggatgactcgtatcaacacgatacggatagacagggtgccaactgcaatggtacagacttgttgagttcttctaaagtgcagtatggtctacatcgtgagactggagctattagtggccttcactcagacagcaaagcaccatgcttgccagaaaaccagaatgaatcatcacactcatatgcatcaataataggatcatcactttcaagaagtgcatctccagatcctgaactagtgaggagagttcctagtccttgcctccccccaattggtgtgaaacttggtgctacagataagaagaataatgttggttcatcttctttcaattgtagttctcccaatattattgaatctgatgatttggtgtctgctctatctggtatgaacctgtcgtcatcaagagcaatgaacggaaacacaatggaccaatctaagctccatcaggatgtggatgatgttcgtaagttcctttttgatcagtacatggatcaaacaaatggcaatcagcgccattcctacatgaaacgttctgaacaaggacacgtgaaggttcctcaagaatattctggtgcttctatgaatccttctgttatgagaagccagatcaatgctggtggtttcacatcatttaacaactcatcggtgggatctggctttgcttctcctaggcttggatcccgatcaccaggtgggagtttatcttcacggcaaaatctaactggtgcatctaaccttccaaactacgttggaattggaagtccaactgcagcttctgcccaccagatgcctgttgatccactgtatgttcagttccttcgggcagcagaaattgctgcccttgcagctaactgtgaggatcctttgatggatagggctaatctaggaggttcttacatggatctatttggccctcagaaggcgtaccttagtccattgcttcagtcacagaagcaatatagttactacgggaatctcggggttggtcttggctatgctggtaactctttaacaagtcctattcttccctcgtcaccaggtggacctggtagtccacttaggcacggggatcgcagcatgcgctatccatctgggatgagaaattttggtggttcctttggctcctggaattcagatctcggtggtaagatggaggccaatttagttccatcacttctggaagaatttaagagcaacaaaagcaaatcatatgagctctctgaaatcgctggtcatgttgttgagttcagtgcggatcaatatggaagtagattcatacagcaaaagcttgaaacagccagcactgaagaaaaagacatggtttttgctgaaatcatgcctcaggctctcacattgatgactgatgtctttggaaactatgttgttcagaagttttttgagcatgggagctcagctcagataaaggagttggctgatcagctaattggacgtgtcttagcactcagcctccaaatgtatggttgccgagttatacagaaggccatagaagttgttgatttagatcagcagactaaaatggttgctgagcttgatggacaagtgatgcgctgtgtacgtgatcaaaatggaaatcacgttatacagaaatgtattgaatgcattccacagcatgctatccagttcattgtttcaaccttctatggtcaagttgtgatgctatcaactcatccatatggttgtcgggtgatacagagggtgctggagcattgtgatgatcctaaaacccagcaaatcatgatggatgagatcctacaatctgtttgcttgctggctacagaccagtatggtaactatgttgtccagcatgttctggaacatggcaaaccccacgagagatctgctattattgagaagttgattgggcagatagtacaaatgagccagcaaaagtttgcttcaaatgtcattgagaagtgtttagcctttgggaatcctgtggagcgtcaagtcctgattggtgaaatgcttggctccagtaatgagagcgaacatcttgaggtgatgatgaaagatcaatttgcaaactatgtggtacagaaggtgttagagacctgtgatgatcagcagagagagatgatccttacaaggataaaagctcatctgaacacactgaagaaatatacttacgggaagcatatagtggcacgcgtggaaaagctcgtcgcagccggagaaaatccgagtattatgggcgaggaggcgccggaggagtacgagctgggcggcggggaggacgagcgggtgatggagtgggagacggggctgcccggcgccgacgagctgaccccgctgtcgcagccgctggtgccggcggggctggcggcggcgttccgcatcccgccggagcccgggcgcacgctgctcgacgtgcaccgcgcgtcggcggcgacggtgtcccggttgcggcgcgcgtcgtcgtcgtcgtcgagctcgttcccggcgttcgcgtcgaagggagcgggaacgggagcggacgaggcggagtcagggggaggcgcggatggggggaacgggaacaccaacaacagcagcagcaagagggcgcggctggtgtggacgccgcagctgcacaagaggttcgtggaggtggtggcgcacctggggatgaagaacgcggtgcccaagacgatcatgcagctgatgaacgtggagggcctcacccgggagaacgtcgccagccacctccagaagtatcgcctctacgtgaagcggatgcagggcctctccaacgagggcccttccccctccgaccacatcttcgcctccacccccgtcccccacgcctccctccacgaccaggttccttctccttaccacccccacccccaccaccactcctacaacaacgccgcctatgccgccaccgtctcctcctaccaccactaccaccacgccaaccactga

SEQ ID NO: 11800 - DNA, 2226 bp, Oryza sativa
  Clone ID: TFbOSC900191j.C1.o18.fg
atggcggagaacaacggcgcggtgcctcccggctgcaagctcccggcgggaggattcttcgggaggctgcacgtgctcgtcgtcgacgacgacgccgcctacctcgaggagctcaagcttatgctgctcctcgccggctacgcagtgacgggcaagacgacggcggaggaagcgctgaaagaggtggaccagaatccggaggattacttccacatcgtcatgaccgacgtccacatgtcaggaatggacggcttcgatctcctccacaggatcaacggccgggtccctgtcatcatgttctccgagggcgaagatgtggtgatggtgatgaggacggtgatgaacggcgcatgcgactacatggtgaagccgatgacatcagaggcgatcaagttcatatggaagcacgtcctgcgctggaggctcagcgccctccccgcgaatgcctcatcatccctgcagccaagcgatcacctggcggcggctctagcggctgtggcgccgccgccgccgccggcggtgcagctgccggccgcaccggcgcaggctgggaacagggatggcgaagctcatgaggaggcagagttgtcgacacagcctcctgcgctggtgccatctggcgttcaagaggcggctgcagcggtatggagcagccgtggtgatggacaagaggcgccgccgccggcggtggctgcggcggcgaaggccccctcgaagaagaggggcgcgtcagaagtgtcggacaggggctccaacaatttggaggcgacgacggggaggaagaaggtgaggacaaggttcacatggacgacggtgtcgcacacatcgtttgtcagggcatacgagcagctgaaggaccaagaaggtccaaagaagataaagcaactgatggaacttgatggtatatttgtaactaaaactcaagtctcaagccatctacagaaatacagaagctggttagaaaatgaaagaaaaaaggaagaagcaacaagcagctcaccatgcaacccactgagttacaccaactgcctagatagaggcaactatgtgggagtgggagctaaagaaatcgagaatttcatttccagccatcagagatctctaggaactgcaattggtcaagaatcaactattgaacaggcaagccttcatagtgagattacatcagtcagtcgtgatgctcatgaaaatggaaacagccaggctagaggaagtgcgatgagcaatggtccaaagaagataaagcaactgatggaacttgatggtatatttgtaactaaaactcaagtctcaagccatctacagaaatacagaagctggttagaaaatgaaagaaaaaaggaagaagcaacaagcagctcaccatgcaacccactgagttacaccaactgcctagatagaggttatagtacttggaagcaaagttcagtcataactgaaggacagcaaagttcaagtttttctggacggcctattcattccatggccacatcaaatggttgtctaactacgactgatacccaagcaggcaactatgtgggagtgggagctaaagaaatcgagaatttcatttccagccatcagagatctctaggaactgcaattggtcaagaatcaactattgaacaggcaagccttcatagtgagattacatcagtcagtcgtgatgctcatgaaaatggaaacagccaggctagaggaagtgcgatgagcaatggtacttcaggtactcgtggtgtgcttgttacaaatgagaacctcctgcatgttgttagtgcatcgttgccatcaaacatgggacagccaacgcaaccaagtcaaagcttctgcaccaatgaattggcagctaactacagtattattagtgatcaaaaccctgggactagccatccaactagctctagtgctatcaataatcaaaactctaagacccaagaaatgtctgtttcacaaacagtagaacttgggtgtggcaacgatgtgatgttggattggccagaattagttggactggaagatcagctggataatgatgtgctaatgaacagcttctttgatggagacttactccagcagggtgtagttactgctatagatgggacgcaagagatgcttgcttttgattctaccggtgacttgggctcagtgccgccaagaggccttaacaacgaaattgccagccatgagaataccaatggaaagaacggcgcatctagtggaccttga

SEQ ID NO: 11801 - DNA, 2151 bp, Oryza sativa
  Clone ID: TFbOSC100899j.C1.o12.fg
atggaggagttgctcggcttggtgcggggcttcgtcgacgtcctcgtcctcgccggcggccgcacctcgtctggcgccgccgccacctggcgctccggtgacgtcaagaaggccctccaatgggccctcttcttcgaggaggttttcaagaacctgcgtgacgatggtcagtacgatgagtctgcaagtgagctcgatgctgcactcgttcaactcgcttcaagcccgaatttccccaagggtattgaggatatccgatcaaaaacacttgcgatggcaagagagttggttgtgaagcattttctgaaaacaacgaatgcggagaatttaggtgctgtacttcaagcagttgttgagatggatatggatggcatttctgctagtggtgaatgcaatgtgtgccaagagtatgtgcaatcgattttagatatgaatttacctagtttgatgcgaaccaagaatgcccgtgatgttggacattccactagctctgatgaattttgtgaagaatccttgtttacgggtaattcacagattctacttaaagaactacagaagaagctggattcaggatcgtgtatttctttggctgagagagaactgaacacacttctaaaaagcatgaaaaaggacagctttgatagtgcaggaagtacattgtgcacctcagcaactgctcagaaaacacaaatcatcgacaagtttatcctgtggaagcaatggaaagcaaagtgtttgtcgtacttgcttgatgagcgtaccattcggatcatgtcaggaactaatatgatctttaatgctcccaaggagcagtggatgggattgtttgaaccattaaaagtttctgcagattctagtcaaagtggcatcattgaagtcatggagctatgcttgttgggattggttgcaaggcaatggaactcattaatagagagcatcatgtcacatacttttagttcctttcctatatcaaaacaatatgctgatctgcaccagttgcttcaaggaacaactcaggatgaatgccaagacaagcttcttggtttcaaggagatggatatttgtgagtatgcaaggcaatcattagagagcgaaccgtacatattatggcttctacctccagttcttactgctgcagcaatgccgccacggtcaagcttgtttaagatataccttgttgaaatagataagcaactcggtgaagctgcttccaaagaccgaaaatgcaattgcggaggagatggaatagaccagcatcaaaactcttccaactttacatcagatctttatatcaacaaaagtgaatcacctaacggcaagctttcttctgaatcatatgctattgatacctctggatgtgattcttccttgccgccaacacagtcattatacaagggtaatccaagttctttaaggatggtttatcctaaagtatctgaacagaatagttggagtcaagaaccactgcctggaccatttgtttgtccaactagtgttgatttcttcgatcaacaagatatgactatttttgaccaacaaatacaagataacattgcagcaagtcctagcaccaaccttgcaaagcaaaatgagtggttctcatctggcacttccttgcagtatttggaaagttcggtgtctgctggttctgtgctgaaggctgttgatgcgacaagtacaacaccttcaaattatttgcattgtcatgcacagagaaatacatcaaatcctcccaacttcaatgaaatttgttctgaagcaactccaaaagctgtccagaaagttatgaaggttgacggcttaactatataccatgtaaaaagccatctacagaagtatcgcacagttcatcatcgacctcaactatctgatggtcgaggcatggaaaccacctgtgaaggattaagggtccagattggcttgcagaaacaacttcacgaacaacttgagatccaaagaaagctgcagctgcaagtagaagaacacagcaagtacctcgccatgataatcgagaagcagagcgagagcctaagacaactgggagcattaccaagatctctagatgcacccactcaggttttggataacagggaaacgtgcgagggacaaacaggagatgctgattcagcagagcaaaaacctgagaaatga

SEQ ID NO: 11802 - DNA, 921 bp, Oryza sativa
  Clone ID: TFbOSC900143j.C1.o24.fg
atgcaagcagaagtgaacatatctgaggccatagcttccaactttacatcagatctttatatcaacaaaagtgaatcacctaacggcaagctttcttctgaatcatatgctattgatacctctggatgtgattcttccttgccgccaacacagtcattatacaagggtaatccaagttctttaaggatggtttatcctaaagtatctgaacagaatagttggagtcaagaaccactgcctggaccatttgtttgtccaactagtgttgatttcttcgatcaacaagatatgactatttttgaccaacaaatacaagataacattgcagcaagtcctagcaccaaccttgcaaagcaaaatgagtggttctcatctggcacttccttgcagtatttggaaagttcggtgtctgctggttctgtgctgaaggctgttgatgcgacaagtacaacaccttcaaattatttgcattgtcatgcacagagaaatacatcaaatcctcccaacttcaatgaaatttgttctgaagcaactccaaaagctgtccagaaagttatgaaggttgacggcttaactatataccatgtaaaaagccatctacagaagtatcgcacagttcatcatcgacctcaactatctgatggtcgaggcatggaaaccacctgtgaaggattaagggtccagattggcttgcagaaacaacttcacgaacaacttgagatccaaagaaagctgcagctgcaagtagaagaacacagcaagtacctcgccatgataatcgagaagcagagcgagagcctaagacaactgggagcattaccaagatctctagatgcacccactcaggttttggataacagggaaacgtgcgagggacaaacaggagatgctgattcagcagagcaaaaacctgagaaatga

SEQ ID NO: 11803 - DNA, 1068 bp, Oryza sativa
  Clone ID: TFbOSC401119j.C1.o16.fg
atggggctggatgtgggggaaatcggcgtcggcgcggcggacctgagcctggatctcaagatgttcgccgccaagagcttcggccgcgtcaggggcaaggacaccaccaccaccgccatgggtgactgcatccggaggctcgaggaggagatgggcaagatcgaggtcttccgccgcgagctccccctctgcgtccgcctcctcgccgacgtgattgatgtgatgaaggaggaggtggagaagaagggtggtgatcgtaaggaggatgaggaggacgccgccggcgacaagagcaactggatgagcaccgcgcagctctggactgggaattccggcggcccagacgccgccgccgctgatccagagaagcaggacaaggtgaggatctcgtcggaggcgaagtccaacggcggcgcgtttgtgggctctggcgcgccggctttcgcgcggccgaagcagagcttgatgaggaaggaggacatggcgtacgacgtcaggatgccggatctgtcgctgctctcgccgcctgcttccgccgccgccgccgacgaaagccgccgtcaggtcgtgggcttctcccaggccgcggcgagggctgccgccatggcggcgtctggccccgctctcagcctccagccccagcctcagccggcggcggcgcagcagcagcagcaggcgaggaagacgaggcggtgctggtcgccggacctccaccgcaagttcgtcgccgccttgcagcaactcggtggccctcaagttgccactccaaagcaaatcagggagctgatgaaggtggatggactgacaaatgacgaggtcaaaagccatcttcagaagtaccgcctgcacaaccggccgagagtgccaagctcaacaattgtgaaccaaccgattgtgctcatgcaagggctctgttacattcctcaagagcaaagcagctcccagtctggatcccctgagggtcctctccatttctcaggctcaggcatggccggtggcggctcatcggcggcgacggtcagctgcgaggaggaggatggcaggtctgagagctatggctggaaatga

SEQ ID NO: 11804 - DNA, 966 bp, Oryza sativa
  Clone ID: TFbOSC1299j.C1.o1.fg
atgggaagtgcaggcaaggaggaggaggaggaggacggcggcggcggtgcaccggcggcggcggccaacaactacgggagctcgacgacgagcagtactacggaggaggagggatccggggagagcaggcggcgcacgtcgtcgtcgtcgtcggtgcgcccctacgtccgctccaagaaccctcgcctccgttggacgccggagctccacctctccttcgtccgcgccgtcgacaggctcggtggccaagatcgcgcaactcctaagctcgttcttcagctgatgaatgttagagggcttagcataggccatgtcaagagccatctccagatgtataggagcaagaagatcgatgagtccggccaggtgataggtggtgagtcatggagatcagatgatcatctgcaaatgcaaggtggtggccatgggggacaagcgtacaaccttggccatctttccctgcctgctctccatcatcgctctatcactgctggctccggtaccatcttccagtccaggtttggcaattcatggtccccatggagatgtcatggatcatactggctccctgcaggccatcacctgcttgttggatcaaaaccctattacccaccagcagctgaagctgaagctcctttccgcagatcaagtgctaggtatgtagctagagctaataccagcaaccatccagattttgtccaaggctcttcttcatctccagatgataatatcatgaaccatcaaagaccagttctgaaagagatgatctgcagtgagggtagtaaccatcaagaaggccctcttaatctggatctctcactcgatatctgtccgcggggcgagaagaggaagagagaatgcagctggaggaaacaagaggaagatcatgatcatgctactgttgctattggtgctgatcaagaagcagagagttgtgctactgggctctctctttctttgttctga

SEQ ID NO: 11805 - DNA, 945 bp, Oryza sativa
  Clone ID: TFbOSC401056j.C1.o7.fg
atggaaaaaactagtgcaggcaaggaggagggctccgagagtaagacggcggcggccaacaacgatgggagctcgacgagcagtactacggaggaggaggaatccggggagagccagcggcgcacgtcgtcgtcgtcgtcggtgcgcccctacatccgctccaagaaccctcgcctccgctggacgccggagctccatctctccttcgtccgcgccgtcgacaggctcggcggccaagatcgtgcaactcctaagctcgttcttcagttgatgaatgttagagggcttagcataggccatgtcaagagccatctccagatgtatagaagcaagaagatcgatgagtctggccaggtgataggtggtggctcatggagatcttcagatgaacagcagtatcatcatctgcaaatgcaaggtggtggtgacgggggacaagcgtacaaccttggccatctttccttgcctgcagctcttcatcatcgccacatcactgctggctccggtaccatcttgcagtccagggttgccaatgcatggtccccatggagatgccatggatcatactggctccgtgcaggccatcacctgcttgttggatcaaaaccctattacccaccaccaccagctgaagctagagctaataccagcagcaaccatccagattttgtccaaggctcttcttcatctccagatgatcataccatgaaccatcaaagaccagtagtgctgaaagagatgatctacaatgagggtagtaaccatcaaggaggtcctcttaatctcgatctctcactcgatatctgtccgcggggcgagaagaggaagagagaattgatcagctggaggaaacatgaggaagatcatgatcatactactattgctattggtggtgatcaagaagcagagagttgtgctactgggctctctctttctttgttctga

SEQ ID NO: 11806 - DNA, 990 bp, Oryza sativa
  Clone ID: TFbOSC401238j.C1.o21.fg
atggtgaggagggagaggatcgaaggagtgaggcagtacaacagatcgaaggtgcctcgcctgagatggacgcctgatctccatcactgctttgttcatgccattcacaagcttggaggccagcacaaggctacacctaagcgagttcttcagctgatgggagtgggaggactcactatatctcatgtcaaaagccatctgcagatgtacagaaacatgaggaatgatgacctaggtatgcaaggcattcagcagatggatgatcaggagcaaacatttgcaggaggcatgcaaatttggacagatatgcagctgcaggatcatcatcatgagtgcaatggaccctattgcagatgccactcctcatcaaaacatgcaaagggctcactgctgctgctacaccaccaccaccagcagcaacagctgcaaaggccaaatgagatggagacgagacgagcagaggcgagcacccaaacaggctttctcagaagccaaggaatatgtgagagggacgtgtcctccggcctccctgtcccagctgcctactactcctactacacgcccatggcgcacggcgcaccacctgccgccgcagacggtgccggacacgacgacccgccaaggctgctgggcctcgtcgtgatggcgacgacgacaaggcgtggctctcgcgaggagcacaaggcgacgccaccaccggagaacggcgcgatcaggcacgggaggaaggccaggcgtacgacggcggcggcagaggaggaggagcgtgacggcgacggcgacgagctctcgctgtcactgacgctggactcggggctcagttgccggagcagcggcggcgccggcgcatactgctgcagcgaaggcagcagcagcaactggctgatctcgtcgccgtcgtcgacgacgagcctcgtcgccggtggctgctcgcggcggagtactccggccatgcttagcagcgtcgtcagcttggacctgtccttgtga

SEQ ID NO: 11807 - DNA, 1107 bp, Oryza sativa
  Clone ID: TFbOSC900191j.C1.o19.fg
atggccggatcttgtagtgtcgccagtagcaacaaatccaagctcgccgatgaagagttcagtccggtgggcatgagggtactcctcatcgatgagagcaccacctacctcaagataatcaccaaactgctgcttaactgcggttataaaggtctgactgtaacaaattttgagattacgtacgtttggcgtgtggatgaagtgacgcccaagacggcggcgcgagatgctgtggaggagcttcacgagaacccttggagctacgacatggtcctcaccgaggtgcacgcgccggctgggatagacggcttcaacctcctccagtacgccggcaccgacatggatctaccagtcgtcgtgttctctgcggacgacgacaagaggacggtgttgaagtgtgtcaacagcggcgcgtgcgactacctggtgaagcccctgcggcacgaggaactgaagaacatatggcagcatgtgtacaggaggaagctgcgcagcggtggtcgtcgcgctgcagctgcaggaaacagcagcaagggggagatcaagaagaggtttaggtggcctaaggagctgcacgagaggtttgtcagcgtcgtccttcagctcggagttgataaggctactccaaaccagatactaccacttctgaatcgggaagatttaactcgggatcagagattcagaatagctctaactaaatcaaaagccctgccaagctgctccacaataccgataggggaaactgttcatgggataccgcttgctcttcaagctattggaacaggaaacaatcaacatctcattgtccctttcaatcggataacttttgtgagaccccgaggagttgaaattggtcaaaatggagtggtgggaggactggttacgggtaataataatgttgttgtgcccacagctacaagtattatagccagagcatttgggcgagagatagttaatggtgctgatctttttgatcacgggaccctgattagagattcatcttccacaagtcatgatggggcgcaaaatgaacttggcgaaactaatcttgcatttgaactaatggcgaaaaagggaagcgatgtggagccaagaattggtggctag

SEQ ID NO: 11808 - DNA, 1524 bp, Oryza sativa
  Clone ID: TFbOSC400151j.C1.o40.fg
atggcttcttcgtcttctgacctaaccctagacgaccaccaccatctgacggcggtggctgcggcgtcggggcaggcgacgcagaagcttcaggagttcttgtcacgtctcgaggaagagaggctcaagatcgacgccttcaagcgtgagctccctctctgcatgcagcttctcaatcatgctatggaggcgtacaggcagcagctggaggcgtaccagatggggagccagcatagcgccgcggcggcggcggcggcgagggcgccgctggtgctcgaggagttcataccggtgaagaacatcgggatcgacgtcgtggcggcggacaaggcggcggcggcggggggcaacagcgtgtcgtcggagaaggcgagctggatggtgtcggcgcagctgtggaacgcgccggcgtcggcgtcggcggcggacacggcggcgaaggggccccagacgcccaaggagcactcggagcaccacccgctcgacacgagccccaagctgatcaccgcgctcgacggcggcggcggcggcggcggcgcgttcctgcccttctccaaggacaacgccatgggtgacggatcagccgccgccgccgccgcgctgccggagctcgcgctcgcgcccgcggagaaggcggcggacgcgatcaccatcgccgccggcgaggtcgacaagaagccgtacgcccacgacaacggcgtcgtggcgagatcgagagaagcccagaacggcgggaagccgccgtcgacgccatcggacgggcaggccgtcccgccgccgccacagccccaccggaaggcgcgccgttgctggtcgccggagctgcaccgccgcttcgtcaatgctcttcagatcctcggcggcgcccaagtggcgaccccgaagcagattcgcgagctgatgaaggttgatggattgaccaatgatgaggtgaaaagccatctccagaagtacaggttgcacacaagacggccgatgccgtcgccggcgccgccgacggcagcgacgccgcagctggtggtgctgggaggcatctgggtgccgccggagtacgcgacgcaggcggcggggccggccatctacggcgcgcacccggcgacgcagccgcactacacggcggcggtggcggcgcaggagtactaccaccaccaccaccaccacctgcagcaccaccccgccgccgccgccctggtgcaccaccgcgccgtagccccgcccccgccgctgccgcctcagcagcagctggcccctccctacagcgccaagtcgtcggcgtcggcgaggctcgggtccccggactccgacggccgtggcagcggcggcggcggcggcgccgccgcctccggagccggaagggacatgtccgagagcatcgaggaggaaggcgagggcgaggagcgggaggacgacgacgacgacgacgagatggcggcgaccaacaacgcccacgccgtcgacggcgacgacgacaacgacgagatcaacaccaccaccaccacgagcgcgggagcgattaactactaa

SEQ ID NO: 11809 - DNA, 1929 bp, Oryza sativa
  Clone ID: TFbOSC101746j.C1.o5.fg
atgagggcggcggaggagaggaagggtgtggtgccggcggcgaggaggagggaccagttccccgtcggtatgcgtgtcctcgccgtcgacgacgacccggtgtgtctcaaggtgctcgagaccctgctgctgcgctgccagtatcatgtgacgacaacaaatcaggctgctatcgcgctgaaaatgctgcgggaaaacagggacatgtttgatctagttatcagcgacgtccatatgccagacatggacggctttaagcttcttgagcttgtggggcttgaaatggacctccctgtcatcatgttatctgtgaatggagagaccaaaactgtattgaaggggataacccatggtgcctgcgactatctcctaaaacctgttcgaatcgaagagctcaggaatatctggcagcatgttatcaggaggaaattcagtactcgcgaccgtgctaatctcgatttctatgaagagtgcaacaagccaccaaatgcggattcagaccatgtgcatggccatgttacatgtggatcacctgatcaaagtgggaggcccagcaagaagaggaaggagtactgtagtgaagaggaggatgagggtgaggtcaatactcaagatattgatgatccctcggctccaaagaagccgagagttgtttggtcagttgaactacaccggaaatttgtcgctgctgtcaaccagcttggaattgacaaggctgtgccaaaaaggatacttgagctcatgaatgttgagaaactcacaagggaaaatgttgcaagtcacctacaggcaaggaactcatttcactatcttctatttattagcatgtactgtcctagaaacaatccagcagctcttggaactcagggggtacctgcttcaaaatcgattcagactatgagcggaagccatacattgagccattccattaatgatgcaaataagtaccaccttagcttaccaggaaaccagaaaggaaacttgggacaaggtttggcaacatcgcttgggcagacccaaatgcaacagaagtggatccatgaagaaaccgatgatctgtccaccatcctttctgggaatggcctatctaatggtatgtctggcacactccaaagtgtcacaagcagtcctttgctgcctcaagaactagccgagtgcacacaagccaaaattgtcagtcagccatcaattcgaacttcctctgtaagttcagaacatattgaaggcgccgttggagtttcatctggtctgcttgaatctcgtgtatcccagcagagtactattcctttatcaggattttccgccaacgggttgctaatccatggttcgtttaacaatacctgtgcaaacaaattgggtggtacatcttcatcgtgtgcacctgctcgctcttcaaatgaccttatggtagcaagagacacaaaaggtggagctagctcttttggtggcgcgatgcttttacctccagatacagagcaaaagtacttgaattttggaggtggaaacggtttgaaacagaagttcgatgataggactgcagacagtctgtttgatctcaagttcgtatggagttctgtaccgagctctcaattggcaagcaacattggggctcatcatgctatgagccaaagatggaacaatagcagtagtaacagtagcaatattggtgccagaatgattgggcaagcaacctcaagtggttcaacagttatcccacaaatgaagacagatttcctcgtttcgggagatatggcgatgccgaagaacgcctccgatttgagcatcccgaaacttcagagcgaacttagctctagcagctgcagcttcgacggccttctcaattccatagtcaaagtggagaaggatgatgttaccttcagcgacgacctggggtgcggcgatttctactcccttggagcttgcatatga

SEQ ID NO: 11810 - DNA, 6408 bp, Oryza sativa
  Clone ID: TFbOSC400505j.C1.o2.fg
atggcgccgccgcgggagctggacctctccgacgaggtcgagggcgaggaggacggcaccaccgacttcgtcttccgcctcgccggcgaccccatccccctcctccctaccacctcctcgccgctcccgctcttcgacctccagtcgcctccctcgcgcccgctcgccgtctccaaccgccgggccgcggtcttccttgcccaccccaacgggtttatggctgcgacgaccaaggcgttgatcgaggccagcaaggaggcgcgcgagaagggcaagtcgaccacccgctgcgcacgggactgctgcgtcgcggacatccctctccccggggtctctctcctcgaactctcccgtgatgaatcggtgcttgctgcctgcgcaggcagtgtgatccacttcttctcggcttcttccctgctcacagacaaggatgtggaaccactgtcatcatgtaccttggaaggatccagcactgtgaaagatttcaagtggctaaatcatgcttccaaagcctttattgtactctcgaaagacgggttgctgtctcaaggaagtctgggggaaggtctgaaggacataatggaaaatgttgatgctgttgactgctgcaaggaagggactcacattgttctttcaaaaaagaatacacttaacatattatcatcagattttaaggaaatatgttgcatgcccctcttgttccagctatggtctgatgatagtgattcagatgatgctagcatcaaagtggattcgattgggtgggtgcgcgatgacagtattgttgttggttctgtaagattgaatgaagaaggcaatgaagagggttatcttgtccaagtaataagaagcggcggaaatacattttttgagaattcaagcaagtcagttgttttcacctatgtggattttttccgaggcatcatggatgatgttttaccatctggagttggacctaatctgctgctgggctatttgcatcgctgggatctaatggtgacttccaacaaaaagagcattgatgaacacatttctctcttgaagtggtcatctgcaactgatgacaaaaaaactgtagtatatcttgagatgttggaggataaatatagtcctaggattgacctacaagagaatggtgatgacaatgtcatattggggtttggtgtcgagaatgtgtcattatttcagaagatcacagtaacagttggtcctgaacaaaaggaggttgctcctcaacatattctactttatctgactggtgaagggaaactgaatatatattatcttgccaggatttctgatccttctgaattacctcaaacaaagctatctgctattgaagatagcgatgtgatgaaagaaatttcacctgtaactgtatctggaaaagagtttactccaagtgctaccagctcattggacaagagtattcgcccagatggggctgagctttctagtgtacaaccagatagagacctgcatggatcaacagatatgaaaaacagttctccagtttcaaaagccaaggaaatagtggcttcctcacctgcacctgcctctttcttagcaccagcaagcaacttgaaacctggaatatctttcagcttttctactgctaatagcgtcagtttgagtccagctggaagcaacacatctagtgaattaggttcttcctggcaacaaagcagcagtagcaatttcgtaaataaccaacttggtaaaggaagcataccttccactcagccggtgggagcatttggaggatctcagaactcaaagaaagatggtaaccttagctttaataaatcatcagtgttcacttctgatggatctaccctggttaagcctggagaaaggaatgaacctggttttggaagtcacccgctgcaaagcagctacactaccgataagaaagttcctagttcagttggcttaagttccaagtcatcaccatcaatttctccaataaaaccttcctcagctggaccttcatccactggctttcgcacaggaaatcttgaggcatttcctacctcccgtggatcacctctaccacaggaaagcattgacaaaccacatgacagaacacatgcagtagtggaccattctaaaaatttcaagttaggcgcaatgttcgatactgaacaggacctgtctaaaaaattttacagtattaatgatatgaccaaggagttagatacactcctatcatacatagagaaggatggtggtttcagagatgcttgcataaccttccaggaacggcctctttctatgtttgagggtgatttgcaaaattttctggaactgttgcagatcttcaagaacaagatagcagaacagtgttcaagagttgaagacctgcggaataagatgtttcaaggcacgtctactactcgtgtctctgctaggcaagcttacatgaaaggaatcgtcgaccaatcttcagatacccaatactgggatatatggaaccgtcagaaattgagtccagaattcgaagcgaagaggcagaatattctcaaggctaaccagaatttgacaaaccagctggtagagctggagaggcatttcaataatctggagatgaacaaatttggagaaacaggaagagttgcttctagtcgcagagctatttattctagtaaggcacgatccagtcagacacaaatatccagtgtttacaatgcgcttaattcacaattagcagcagctgaacaactgtcagactgcctctcaaaacaaatatctgcactaaatataagttctccttctacaaagcgagggtcagtggccaaagagttgtttgaatcgattggtctagatcacacgatggatgcagccaaattttcaggtggtactccttccaagtcagttaagagatatccatcaacgagagaacacataactagcatatcagggccttccaagactgctgagcctgagactgcaaggaggaggagagagtcactggataggagcctggctagtttggagcctcagaaaactactgttaaaagaatagcgcaacaacagcgcctcaagatcagcagtgacctgccattcaggtcaaataagaaaatatttgattctcagatggcagctatgtcccaggagaagtccagcagtagccccacttcctccatagtagaatcatatgcaaacaagctgcattatccaagtgaagtgctgcacgagaaaacaaagccgtcaggaccccagcacaacacactgttcaaatgggtaaaggaatcggctggaccatctcaaggccctcagcataagtatcctgaattaccagggcagctgaaaagttctgaccagacaccaaagttgggctcatcttcaccgttgtcattcagttattcacataaggatgtctgggataatatcagctcatccaatgttccatcctctggaacaactcataccatgccaaagtcaagtactttgacatttaaaaccactgtcattccaaaaactaataccagtacactcccagatttgtcgcctttgatgacgggctcaaaattctctctgagtccattgaccgtgaaaactttatctggggattctggaggtgcgtcatccattattacaaagaacaaacaaggtggacaggcaatgccatatttgggaaccacaaaaggactggatgtttctccacagaatatgggtggtgcatttagagatcttaacaaaccgtctttgtctcctgaacctcccaagtctgctctgttacaagggaagactgtgcaacttggtaagattactgaaacagtgcagagcccagtgaaagctaaacctgaggtggcattccaacctcctgcatttccaccaacacctgttgcacaatcttctccatgctctattaagccaactgttccctcttcagctacatcatcctcgtcaactatgcaagaatcagctgcaaaaacatcagatgttttgtctccaacaggtccttccattcttccatcaaaggaatcaatgacaaaaccttcatcaccattacctgatggtaccatatctagttccctactatctattccaatgcctgttaaggagtcatcaactggcttgaataaaattgtatctaagcctgaagtggttacatcagaggtaactggaacaaccgtttctgcaagtactagctcaagcgtaccaatcactgaaggcaaaccttcatcgattccagcaaccagtggaagcttaccttcaattcctgtctctgcacctaaagtggtgccagtgtctgcagaatctgttgttgtcacttccaccggaaaagatgtaggaccgagcaatccctcatcagatgaagatgatatggaagaggaagttccttctgcaagttcggatctcaacttgggagcccttggtgggtttggtcttgggtctgtgccttcttcaagtcccccaaaatccaatccctttgggaactcatttactacctctgacaataagagttcaggttcgtcatttaccctgacaaccagtccaggacagcttttccgtccggcgtcactgagtattccctcatctcagccagcacagtcatctcaatcaactagctcaagtacattttctagtgcattctcaagtgggcttagtggattcggacagtctgcacagattggatcagcgcagcagtcagggtttgggcagccttcacaaattggagctgggcagcaggcaggatttggtcagccagcacaaattcagtcaggatttggccaaccagcacaagttggagttgcgcaacagtcaggatttgggcagcctgcacaaattgggacagcacagcagtcaggatttgggcagcctgcacaatttggtgctcagcaagcacttggatctgtcctgggttcttttggacaatcacgccaattgggaagtttcggtgctgggggatttggtggattcgctagtgcctctgcttccgggggcttttctagcaattctggatttgctggtggtgcaacaggcggtggcttttctgcagctgctgctcctgctggcggaggatttgctgctgctgctactggtggagggtttgctgctcttgcctccaaaggtgggggttttgcggctgcggcttcatctggtggcggctttggaggtgcagcccagggaagtggcttcagcagtgtggcccttatgcatgcaccaaaaattgttcttcgtgcattagctgtagctattgtggaactcccagcacctggtatagataccatatcacaggagcactttgcttatcttagtacaagtgatatccgtacctgggttagccaccaagattcccttaccaacttagatgaaattgtatcgaaccaccctactacaagcagacagacatttcagtgcatgactggaactgaacagatgatgtatcatcagcaacaggttcagagtgatagccagcacctgtcttcaaggccgggtttgcctccggagaagcaatttctcctgcaaggcggagcagattcatcatcagggcttgtcctctcgaccgacgctaaacctcggttaaaatggacatcagagttgcatgagcgttttgtggaagcagtaaatcagctgggagggccggacaaggcgacgccgaaaacaatcatgaggctcatgggaattcctggattaaccctttaccatcttaagagtcatcttcagaaataccgacttagcaagaatcttcaatctcaagccaatgcttcccgtgcacaaggtgtcttaggttgtagtacgacagagatagataaaccatgtgaaggaaatggatcaccggctagtcacttggacctagagactcagacaaacagcagttctatgcacataaatgaagccctccagatgcaaattgaggtgcagagacggctgcatgaacaactagaggtacaaagacacctgcagcttcggattgaagcccaaggaaagtacctgcagtcagtgctggagaaggcgcaggaggcactcggcaccatcgccgtagcagaaactgctgcaactgcaaacgcctcctcatcgaaacgcctccaaaacgagcacacccagcttcaccatcaccagcagcagcagcaggtcggcgatggatcggtggacagctgcctgaccgcctgcgactgcgagggctcgcatcactcgcgctctcatggccacagaggagagcaggacatcctgtccatcggcttgccgccatttgagccggcagcagcaagatcaggcaaggagcaccactacctgctgttccccaacgagccgagcaggcgacgatcgtgttcggatgaacggcgccgcgagatgagcacgctgcaggcgtcggagctggacctcagcatcaatggcaggtcgtcgtcccactctcacaggcgcgaaaacatcgatctgaatggtgcaggctggagctga

SEQ ID NO: 11811 - DNA, 1254 bp, Oryza sativa
  Clone ID: TFbOSC400832j.C1.o2.gm
atgttcccgcctgggctgatccaccaccggccggacggcggcgaggcggggcgtgcggcggggggagggcccagcctggtgctgaccgccgatcccaagccccgcctccggtggacggccgacctccacgagcgcttcgtcgacgccgtcgcccagctcggcggccccgagagaatagacccttttcgcgacaccaatgtcattggcgccgtgggggacggtgccaatgtcattggcgccatcatgttggactacagcgtcaatgatgttggcaccgcaaaaagggtctattcctggaaagcaacacctaaaactatcttgaggacaatgggtgtgaaggggctcactcttttccacttgaagagtcatcttcagaaatatagactggggaaacaatctggaaaagaggcatcggagcaatctaaagatgcatcctatcttctagatgcccaaggtggaatgagtgtgtcgcctagagtttctactcaagatgttaaagaaaatcaagaggtcaaggaagcattgcgagctcagatggaaatgcaacgaagactgcatgaacaagtggaggtccagaagcatgtgcagatcagaatggaagcctaccagaagtacatcgacactttactagagaaggcatgcaagatcgtctccgagcagcttgcctcaagcggcttcagcatctcggacaatgatctcccggagctctctggtggtgtcatgtgcggctccgctgacacattgagctcctccatcttccaccagctctctgtcagcccaatcaacctgcatagtcctgagggcaagccgacgccctcgggcatcgaaggccaaatgatcctccagaagtcacctgagcttaagcgcaacctagcgctgccgtcgccgccgtttgtccaaccgtgcgtcgcccccgctccggtcgtcatcgtcgctcagggaagccgccgtcgtgatcgtcaagtcgtcgccgacctcgtccgcccctccgtcgtcgccttaggtcaccggagcaccgccgtcgtcgtcaagccgaaggtcgccgccgcttcttcctcgccgccgtcgccgtccgttgatcttccgccgccgttttggtcaccggtgagttcgccgcgtcgcccgcaacccgtaggtgctgtccgttcgcgccgccgcgccgtcgttcgccggcgagcatgcgccgcccgagccgtcgtcggtgatgacgtcaccgctgacgtcatcgtcgccgtgtcccgtggaccgccgtga

SEQ ID NO: 11812 - DNA, 1254 bp, Oryza sativa
  Clone ID: TFbOSC405556j.C1.o2.gm
atgttcccgcctgggctgatccaccaccggccggacggcggcaaggcggggcgtcgggcggggggagggcccaacctggtgctgaccgccgatcccaagccccgcctccggtggacggccgacctccacgagcgcttcgtcgacgccgtcgcccagctcgggggccccgagagaatagacccttttcgcgacaccaatgtcattggcgccgtgggggacggtgccaatgtcattggcgccatcatgttggactacagcgtcaatgatgttggcaccgcaaaaagggtctattcctggaaagcaacacctaaaactatcttgaggacaatgggtgtgaaggggctcactcttttccacttgaagagtcatcttcagaaatatagactggggaaacaatctggaaaagaggcatcggagcaatctaaagatgcatcctatcttctagatgcccaaggtggaatgagtgtgtcgcctagagtttctactcaagatgttaaagaaaatcaagaggtcaaggaagcattgcgagctcagatggaaatgcaacgaagactgcatgaacaagtggaggtccagaagcatgtgcagatcagaatggaagcctaccagaagtacatcgacactttactagagaaggcatgcaagatcgtctccgagcagcttgcctcaagcggcttcagcatctcggacaatgatctcccggagctctctggtggtgtcatgtgcggctccgctgacacattgagctcctccatcttccaccagctctctgtcagcccaatcaacctgcatagtcctgagggcaagccgacgccctcgggcatcgaaggccaaatgatcctccagaagtcacctgagcttaagcgcaacctagcgctgccgtcgccgccgtttgtccaaccgtgcgtcgcccccgctccggtcgtcatcgtcgctcagggaagccgccgtcgtgatcgtcaagtcgtcgccgacctcgtccgcccctccgtcgtcgccttaggtcaccggagcaccgccgtcgtcgtcaagccgaaggtcgccgccgcttcttcctcgccgccgtcgccgtccgttgatcttccgccgccgttttggtcaccggtgagttcgccgcgtcgcccgcaacccgtaggtgctgtccgttcgcgccgccgcgccgtcgttcgccggcgagcatgcgccgcccgagccgtcgtcggtgatgacgtcaccgctgacgtcatcgtcgccgtgtcccgtggaccgccgtga

SEQ ID NO: 11813 - DNA, 894 bp, Oryza sativa
  Clone ID: TFbOSC900052j.C1.o9.fg
atgtcgtcgcagcagcagcacgccggtgaggcccccgcctccgccgccgccgctgcccgggcgcggctcaggtggaccgggcagctgcacgagcggttcgtcctcgccgtggcggagctcggcggcgcggacagggcgacgcccaagtccgtgctgagggccatggccgtgccggggctcaccttgtaccacctcaagagccacctccagaagtaccggcaggcggtgagccgcggcggcaatggaggcggcggaggcagcggcagcctgaacgaccggtcatcctcgtcggagcgccaaccagccgaccacgacggcgatagcgccgccgatgagccgcgcaccattgcttacgacggcgacagcgatggcgatgctaaagaaggtctccgtgattcatccaggagcatggtgcagatgcagagggaagtccagaggaagctccaggagcagattgaggtcaagaggcatctgcaactgaggatggaggcacaggggaggtacctgcagtcagtgctacgcagggcgcagcaagtcctggccgaccatagcctggcaagctcgccggaggccgccacggcggagctctcggagctcgcctccgccgtggacatcgagtgcatgtcctcctcctccccgccgcggcaccaccgccaatccgccgcaaccgacagctgcgtgactacgacgtcgtcgtcggaggccgagagcaaggccgccgggtccaagcggctccacaccagcgattgcaccgtcgagcagccggtgcagggcaagagggccttcaacttcctgcaaaggcacaaccaggcagatcaagaagaagaacaagaagaagaatatgcaggagcagaggatggaagctcatcagagattgatctgaacagtggatga

SEQ ID NO: 11814 - DNA, 1200 bp, Oryza sativa
  Clone ID: TFbOSC17597j.C1.o2.fg
atgaaggagaaggaagtgctagttgagattgttgaggatgatgagctgaagagatcgattggtagaaatcagctggacctcaacgaggaagttatggatgtcgagagcgaggagggagaagtcggcgatgatgaagatgacgaagatgaggaggatgacgacgacgacgatgatggtggtagcaccaccgatgttgccggaagcaggagctccagcaacaacagcagcaccaataacgtttcagagagcaaattgaagggcgacaaggatagcggtggcggcaggttggaggggatcaacggcggagagcagagggtgccatcggtgcggcagtacaaccggtcgaagctgcctcggctccggtggacaccggacctccacatggcctttgtccatgccgttgagaggctcggtggccaagagagagcaactcctaagttggtgcttcagatgatgaatgttagggggctcagcattgctcatgtaaaaagccacttgcagatgtatagaagcaagaagttggatcacgagggtcgccagatcagaggagccatcgcctcagtgttctctccaatggatttccatctgatgagaggcgatcgacgcttccacgacatgctcctccagcgagccgccgcgctctcctcctccaggcaggagcacggcggtttcttctcctcgagaagcggcggcggcggcggcggcctaccgccggaggccagccggctgtacggactcctccaacaccggcagtctccggcgatagcgacgatgcaaacattagacttcaagaacagcagtttcaggaaccaagagtggtcgttcagcttcaaccaccagcggaaggagacgatgaatccgtcgtcgtcgtcgtcgaccaccgcggcgatcaggcggtggccttcagccgccggcgcggtcgccgtcgtcgccggcgagcgacaaagactagcggagagattcggctactacaccgggaacggtggcgcgtcgtcgacgtctctgccgctcatcacgagggccgccatggcggcgccgccgccgatgtttgcggcggccgtggcgccgccgggacgtgatcaccatcgtcttccgtttggatggcacgccggcggcggcggcggcggcggcggtaataagaacaggtcgtcgtcggatcccgtggtgatcgatgaagccctagattcccgccgcctcgag

SEQ ID NO: 11815 - DNA, 1632 bp, Oryza sativa
  Clone ID: TFbOSC400452j.C1.o14.fg
atgggggaggtgaaggagaatgaggtggtagagatttttgagcatgatcatgacaacaagatcagatctcctgaaaactctgtgccaccagccatggtgctggacctcaacgagggcttcggcgagggcagcgaggaagggggagttggcgaagacggagatgaagaagacgatgatgaggacgacgacgacgacgacgatgacgatggcggtagcacaagcgaagttgccggaggagggaggagctccagcaacaacagcagcaccaaccacaattccgggagcgacaaggaccatgacatgaacagcagcagcagcaaggccgacggcggcggcgacagggtgccgacggtgcggcagtacaaccggtctaagctcccccggctccggtggacgcccgacctccacatggcgttcgtccacgccgtcgagaggttgggcggccaagaaagagcaacaccaaagcttgtgcttcagatgatgaatgtgagggggctcagcattgctcatgtcaaaagccatttgcagatgtacagaagcaaaaagctagaccacgagtctggccacgagagaggagccatctcatcagtgttttcgcccatggagttccacatgaggagaggggaccatcgtttccaccaccacgacatgttcttccagcgagccgccgccgctggcgtctcgccgttctcctccaggatgctgcacgagaacggcggcgggttcttcgcttcgaggaatcccggcttgccggagtccagccggctctacggtctcttccaacgccggcagcaagctcccatgcaaaaattcgacttcaagaactgcaatagcttcagtaggaaccaggagtgggcgttcaaccagcagcacgcggcggcgagggccgccggcgccgtcaacggccacggcccggcgaaagggctcatccacgagatgatcttccggaaggaaggaaagccgacgtcgcatctgttcgacgtgagggacgccatcgcctccacccgggtgacctcggcgaccacggccgccgccgccgaccaccggctagacggcgccgggaaggccggcaactttgattggatcgggagcagctcctcccggccgctcacgaggacaatgtcagcggcggcggcggctaccatgggcgaccaccaccatcttcggtggcgaggcggcgccgccggcagcgggaacacgacggcgtcgtcggatccggtggtcgcaagcgaagctgccctaggttccctgctcgagagggcaaagacgaaagcgaccgaggcgatgcgcctcgagacgccggtgaagatgacggcggcggcggtggcggcggaggagatcaacggcaggacgccggacttgcagctgagtttgagcccgaacgcgggagatcacagatcagccggcgagaagaggaagttcttgagtgagcaggaggtggacagtgacaagcagcagctgccactcacgctttccctgtcgctccggggtggtggcgacaatggcggcggcggcggcgcagaagccgccgggaggttagaggaagagatgacaggtagcagcagtagcaagaaggccgctctggggctgagtactttggatctgaccatgtcgatcaaggcattggagtga

SEQ ID NO: 11816 - DNA, 3591 bp, Oryza sativa
  Clone ID: TFbOSC400657j.C1.o5.fg
atgagctcccagagtgttgttgcagtgaagcagattactgctccggacaaaatagtggaaacctgtccatccacaaaacattctgcacataagctgttcgatgttaaaccggattttcaagggttgatagatgacaatttgtcatcctccagtcagtcctcaagcatcaagattgagctgatcagatcatcaagcttgccaaatatactgccgtttcagaaaagaagctctgaacctgaacctgaaagtccactgtctcatgtttcacatcccaatgtttcagagccagtttactcaaattcttcaaccttctgcacaagtttgttttcgtcgtcgtcgatggagacggagccgtgccggcaattgggcactctaccattcctgcctcaccctcctaagtgtgagcagcaggtttcagcagggcactcatcaagctcctccctgctagtacctggtggtgatggtgatattggcaatgctcatgatgaacctgaacagtcagatgatctgaaggatttcctcaatctctctggaggagatgcttctgatggcagcttccatggagaaaacaatgccatggcttttgctgagcagatggagttccagttcttgtctgagcagctagggattgccatcactgacaatgaggagagccctcggttagatgacatatacggcacgccgccgcaactttcatcacttccagtatcatcttgctccaaccagagtgtacagaaagcaggatctcctgtgaaagttcagcttagctcgcctcggtcatcttcgggatccgcgacaactaacaaggcgaggttgaggtggacactggagctccatgagcgttttgtagaggctgtgaacaagctagatggacctgaaaaggcaactcctaaaggtgtgctgaaacttatgaaagtagaaggcctgactatctaccatgtaaagagtcatttgcagaagtatcgcctcgcaaaatatctcccagagactaaggaagacaagaaggcatcctcagaggataagaaatctcagtcaggtagcagtggaaatgattcagtcaaaaagaagaacttacaagtggcagaagctctacgaatgcaaatggaggttcagaaacagcttcatgaacagttagaggtgcaaaggcaactgcagctgcgaatcgaagaacacgcaagatacctgcagagaatactggaagagcagcacaaggtcagcatcagcagcaactccctctcactgaaacccccagccgaatcgcaaccggaatcgccaaaaccaacatcagaaaagaaggaggccgaatccgaagcaggcgccgccacttcagctcagccatcatccgaggataaatcaccagacgcagaatgcaagtcgtcgccgccggtttgcactacccaagatactcagagaaggaggcttgaaaaggaaaagcatggcaaaactgtcgataaggaaacacagaaggtgagctgtaattactgtgggaaggtggttaggacatacaaccgtctggagcaccacttagcgggcatcaggggcaatgtttatccttgcagcttagtacctgacagtgtcaggcaaagcataaagagttcactagaggctcgcaagaaagattggatagcccgaaaaataggaaaacataaatcttctgagcttcctccagtaagaaatctatccctcacatctgctcatgcctgccgacctcttttgcagccaattacatccggtacggatcaagaaggctctgttagttggcaccgctgctttgttcacttcacaaataatttggtgcagcccggggaaactacacaagtaaatgcccatgatgtttcttgcaatgcaagttcatctcagaagggaggccagactatagaagtaactaggcctccatatcaaaatccgtgtatgatgaataagccaccggaaatatcttcagggcagagaattgatccattgagtttctctatggagaattcttcatcacagatgcaagattcggaatcctcaaaggagccaactaatgattacttgaattctcaggcaagaaagtcaataggcaagctcatctttgaagctggacttgagcctggtattctccacttgccatctttcaaggacatggttgatgtgcttgcctgggcccaggtggcaatccctacttatgaatcgattatggaggagcaactaagagaaattcaatgccatgcaagggatctcaagaaacactgggaaatgaatggctgcagtgtaattttggatacctgggagagtcgatgtggtaaaagcttcattagtgttttggtgcattgcagtaaaggcatgttgttcatcaaatcaatggatgtctctgatatcattgatgacgtggatgagctagcagtaatgcttttccgtgtggtggaagaggttggtgtcctcaacattgttcaggttatcacaaatgatgagtcaccttatatgcaagcagcagagcatgccgtgctaaagagatatggctactcgttcttcttcacactatgtgctgaccattgcatcaaccttctgcttgagaacatagcagcacttgatcatgtcaatgaggtcctaatcaaggcaagagaaattaccaggttcatttatagccatgcagtgccaatggaactgaaagggaagtatattcagggcggcgagattctgagcagttctaatttaaaatttgtggcaatgttcatcacattagggaagttagtatctgagagaataaatttggtggagatgtttagctcgcctgaatgggcttcctctgatttggcttctagaagttcattcaggcatgtctatgaagtagtaaaaactgataatgcattttggagtgctgctgctgatattttgaagcttacggatccacttatcactgtgttgtacaaactggaagctgataattgcccaataggtatcttgtatgatgctatggattgcgcaaaagaagacataaagtgcaatcttcgagacaaacatggtgattattggcctatggttgatgagatatgggatcattacttgcataccccagtccatgctgccggttatattctgaatccaaggatcttttacacagaaagattcagttatgatactgaaatcaaaagtgggaccaatgcctgtgtaacccgtctggccaaaaaccattatgatcctaagaaagtggccatacaaatggataggtatcgacgcaaatcagctccttttgattcagactcagcaattcagcaaacaatggaaataccacaagttcgttggtggtcggcacatgggactgacacccctgagctgcaaacgtttgcgatcaggatcttgagccaaacatgcttcggtgcttccatatacaacattgaccggagcatatccgagcagctgcatgttgtgaagaggacatatcctgagcaagagaggttcagaacgatggagtatctacactacaatcttcgcctcgcccattgtgagccatgcgtacgcggtgcttctggggctcaacagcatagtaggctcactagtcaactgggtgactggatctcatcagggcagaccacctcctattacaagtga

SEQ ID NO: 11817 - DNA, 1020 bp, Oryza sativa
  Clone ID: TFbOSC405552j.C1.o1.fg
atggggctggatttgagcctggacctgaagatgttcgcggcgaggagcgccgtgaggatggcggcggcggcggccaaggaggcgacgggggtggaggcgtgcatcaggagcctcgaggaggagcgccgcaagatcgagatgttcaggcgcgagctcccgctctgcgcccgcctcctcgccgacgtgatcgagctgatgaaggaggaggccgggaagaggaggaaggacggcgacgacgcggaggcgaaggcggaggacggcgacaagacgaaatggatgagcaccgcgcagctctgggtggacagccgcggcagcgacgccgattccgagaatgaccgacggagcgggagcacctcgccggcgtcgaggttgctcggcggcgcggaggagtcgtcgtcgagggccgtcgcgccgccgccgtactttaggagggaggaaagggtggttctacgacccgctatgccgttgctgcctccggcttcccacaggtcgcctcctccggcggcggcggcggctgccaccgccgccggcgatgaccaccggcacgttgtcgcgtcaagctttgccaccgccgtgccgtcacccgtcccggcggcgcttagcttgcaggctcaggcgcagcagcagcagcagcaggcgaggaagtcgaggcggtgctggtcgccggagcttcaccggcagttcgtcgccgccttgcagcagctcggtggcccccaagttgctactccaaagcaaatcagggaggtgatgaaggttgatgggctcaccaacgacgaagtgaaaagccatctccagaagtatcggctgcacaaccggaaatcaccaggcacagcttcagcgagccattcgattgtacttgttggtgatctctgggcttctcaggaagtaagctgctctcaatccggatcacctcaaggtccccttcagctctccggctcaggggtggccgtctcggcggccaccgccggcgacagctgctgcgaggatgatgacaagtcggaaggctatgtccgaaaatga

SEQ ID NO: 11818 - DNA, 1632 bp, Oryza sativa
  Clone ID: TFbOSC401760j.C1.o4.fg
atggcgaccgccgccgccacgcagtcgcagccggtgcgcgtcgtgctgcgggtgcgcccgcacctcccgtccgaggcgaactccgcggaggcgccgtgcgtcgggcttctcgggagccaccccggcggcgaggtcaccgtccagctcaaggaccagtacaccagccggaacgagtgctataagctggacgctttcttcggccaagagagccgtgtctgcgagatattcgatcaggaggtcagcgccgtgatcccgggaatcttcgaggggaccaacgcgacggtcttcgcctatggcgctaccggcagcggcaagacctacacgatgcagggcactgaggatttgccggggctcatccccttggcggtttcgaccgtgttggcgctatgtactggcacatggtgctctgttgagatctcatactatgaggtatacatggagcggtgctatgacttgctagagcccaaggcaagagagatcatggtgctggatgacaaagatggcaacttacagctaaagggcttggcctgggtgcctgtgcgatctctggaggaattccacgagatatactctataggagtgcagaggagaaaagttgcccacacaggcctgaacgatgtttcaagtaggagccatgctgtgctatcgatcaggattactactgatgttgttaaagggaagcttaacctcatcgacttggctggtaatgaggacaaccggagaacttgcaatgaggggatccggctacaagagagcgccaagatcaaccagtcgctgtttgcgttgtctaatgtcatatcggctctcaacaagaaagagccacggataccatacagagagagtaaattgacccgcatactgcaagattctcttggaggcaatagccatgctgtcatgatagcatgccttaatcccgtggaataccaggaggcagtccacacagtaagcttggctgctcgttcgcgccatgttacgaaccacatgagttcagcaagcaagcaagagactcctaaagataaggttgacatggaagccaaattgcgagcttggttggaatccaaggggaaaacgaagagcatacaaagaatggatggacttctctccccaaatgcaatcaagactcctctatccatgagccataagaagcaatcagcatctggcagggtttctggtagagtggtgctcccttcattaactccatgcaaagaggacaaaactggatcatctcttaggaaggcactttcccccatttcttcaaacatggatcctcaaaagcaacggacagctgatgatagcaattgcttgatgttgttggagctgagaactccaatgggatcatgcaacatagtagggaaggtcacaggtgctacaccccttgataaatttattgcacttggctctaacctgaaggaatctcttattcagcaataccttgatttcttaaatgttgcaaacaaggaagaactacagaagttgaaaggcattggtgaaaggagggcagagtacattcttgagcttcgagaagattcgcccagaccatttaaatctctttcagatttgggaaatattggtctatcatcaaaacagatacaagatattttgtgcaagacagcgactggaatcttcaaatga

SEQ ID NO: 11819 - DNA, 2937 bp, Oryza sativa
  Clone ID: TFbOSC410608j.C1.o11.fg
atggcccggatcaaggtgcacgagctccgggggaagaacaaggcggagctgcaggcccagctcaaggacctcaaggcggagctctccctcctccgcgtcgccaaggtcaccggcggcgcccccaacaagctctccaagatcaaggtggtgcgcacctcgatcgcgcgcgtgctgacggtgatctcgcagaagcagaaggcggcgctgagggaggcgtacaagaagaagagcctgctcccgctcgacctccgccccaagaagacccgcgccatccgcaggcgcctcaccaagcaccagctctctttgaagaccgagagggagaagaagcgtgagaagtatttccccatgaggaagctggccggcagtgggaaggaggttgaggatgatgttgtacgacacggcgttgaggtggacgcctcgcttcggggcgagcgggagcatgtccttggtggcatccgcgcgaccattggaaacgagggcgttgaggaacaaatggaatgtggcggcagagtgggagtagaaggctgggacggcgcggaagacgacgactgcagcgtcggggcgagaagcggcgccgaggtggttgatgacaggggcaaacacggtgggccggagtgggccgccgtgggagtgcaatgcggcgaggagcgggggcacgagtgggaagaggcgcgcgcgggcgaggcggtacaacacgcaggcggtgaaggggtggtcgtggagatcgatctccacaaccccaaaaacaaaagaaaaaacaaaattctgggaatggagcagcagcagaagcaggaacccggcggcggcggcggcggcgtcagagtcgtcgcgaggatctgcccctgcgcaccaccgccaccaccacccgacgccgccctcaacttccaggtcgccgccctcaatgaccccgccctaatctccttcatcccccgtcgcccaaccgcatccgccgccaccgccgcggcctctggccgaggagatggccccaaggataagcagcagcagcagcagcagaagtacagggtcgatggctgctacctcagagacgatcccaaccaccgcgtcttccacaacgaggtcaagccgctcattgatggcagaggtggaggaggaggaggacgcggcggcgccaaagcctgcgtcgtcgcctgtggtgatgcggctgccaaacgtcacctcttcatggggtctcctgatcaacctggcttgttcaccatggcaatggcgcaactcctcgactcctccaaagccattggtgccgctgtcactgtctcatcctatcaggtgctccaagatactcacatcctcgacctcttggagcccaagaaccatgaggttctcatactagaggatgccgacggacagactcacctcaagggcctctccagggttggtgtcaactcaatcgaggagttttcgcagctttgttgttgcgctaccaaccagcagaggcaccatcccgctaaagattccacccagttacaggattggggacaccaagggctgattatctacgtctctagctttgatcagcaaggcaaagaatgtgctctagctaagataaacttcctcaacctggcaggctatgtggatcccaagcagaagaagaatgaaggtcttgctctactaaccggtaacaagtctatgcatgccttgatgaatgttgtccaagcactgaacagcaaccagagatttgtaccatatagacaaagcaaagtaactcgtattctgcaagattctttatgcaagagcaagacgagcggtagcgtcctgatagcctgtttgggctgcaccaaagaaaatagttatcaaactagtttgactcttacccatgctgaagattgctgccaagattcagtttctactcttgccttggcttctcgctcgagccaagtggtcaatgaacaatactacagcttatccttgagtgctaaaaaatcatcaaagtcaaatatgaacttacctaccgatgccaaaaccttgtcaaggacgtttattcacaaaacaatgtcgatgcaagagaagaatgcccgacctggattcaataatagtggtgtaaaaggcggacaaactcctactgctaatagaaggactcagccaatcattagttcaacgaaaaaatctggaagctcaatctgtacttcaattaagatgaaggaaaattatgctaaacctaaaataagtggaaggaaattattttgtccaagcaacaattcattgaaggaggagaatgctacggatgttgcttctacagtggtaacagaaactaagtcagcaacagaagtacaaccattagtaggcatggaaattcgagctgcattactaaatgaggactatgccttgtcaaatatggaaccggagaattcatgtactgacatgggattgacctgctcttctatcactgataaccttgttgagaagactcctgccagcagtaccctatcctccccaaagttgagtgaccgactgagagagatttcaaactcattgaagcttcttagcactcggccagtgagcgtgagggcagaaaagtgggacatagaatgtgcccggagaatcaacacgattgcaccagagccaaaaactcctgaagtgcatttgaaatttgagcaagcagaagatcccaaggataaacttacggcccgcagcactgggattaagaaatctctagctcaagagtgcttgacttttctcaacagtgctaataaggagcaattaaaaagcttaaagggaatcggagataaaagggcaaactacatacttgagcttcgtgaggagtcaccagagctatttaaagagataagtgatctgagagacatcatcggaatgaattcaaaagagttgcttctcaagagcgaatgctttggtcaggagttggcattctgtgagagaatcagtgctttgcagtggtttgctgctattatgtgttctttgtaa

SEQ ID NO: 11820 - DNA, 1020 bp, Oryza sativa
  Clone ID: TFbOSC400896j.C1.o31.fg
atggatgggcagtgggaggagccgcagcacgcggggcggcggcggcggcagccggagcccgggaagaacctcatcaagatcccttcctaccaggaggtgttcgggagtggcgcctcatcctccgccgcgccgccctcctacaaccctccacccaccaccgccgcctcctcctcctcctcctcgtcgtcgttttcgcaggccttctccttcctcaaatccaccgagttctactccccgccaccgccgccaccacagacgaccaccccaagtctccggtaccatcttctacaccctgactacttgtattatcggataagagagttgcagaagaatttcaagctccgcgtcattttgtgccatattgatgttgaagatgtcgtcaaacctttacatgaagttacaagaacatcactgctacatgactgcaccctcttgtgtggatggagcctggaggagtgtggtcggtacttggagaccattaaagtgtacgaaaacaagtcagctgacagcattcgtgaacatatggataatgactatttatcaaggttgacgcatgctcttacatccattcggcatgttaacaagacagatgttgtgacgcttggctcatcttttgggtcactttcacaagttatgaatgcttctatggaagaactagctcgatgcccaggaattggtgagcggaaggtaaaacgacttcatgacactttccacgagccattcaaacgggtttccagccgcccaaacattgtagtgcctgacactcctgacagagagaaggcgtcaggccaaccttcatcgacaaatgatggtgcacaggatgctgtggagaagccagacgcatccgtgaacaagaagagttctaatgtaagatcagcccttactgaagcctttgccaagtattcagaaaagatacgcaaccagaatcgtgattcaacaaatgtggctggtgaagatcagacgagaagggctatctctttactagaatccgatatgatagaaggagcagctctagcttaa

SEQ ID NO: 11821 - DNA, 375 bp, Oryza sativa
  Clone ID: TFbOSC34362j.C1.o1.fg
atgtcgacgtcggcggcggcgtcggcggcggcggagcagcagcaggaggagggggagcacgggccgttccccatcgagcagctgcaggcatctggaattgctgctctggatgtgaaaaagctcaaggattctggtctgtacacagtggagtctgtggcctatactccaaggaaagaccttttgcaaatcaaaggaattagtgaagccaaagttgacaagatagttgaagcaggcaaaaatgtactgcttgtgatcattgagcaattctattttgaccaaacaggggggatagaaactggctctatcacagagatttatggtgaattccgatcagggaagactcagctgtgccacacgctgtgtgtcacatgtcag

SEQ ID NO: 11822 - DNA, 1059 bp, Oryza sativa
  Clone ID: TFbOSC401508j.C1.o12.fg
atggcctcttccgcgccgtccgcggcggcgggggcgaccccgccggaccccctccgccgcgaccgcatcctctccagcaagctctacctcgacgtcccgggctccaaggctccggtggtgtactcgccggcgtacgacatcgccttcctcgggatcgagaagctgcacccgttcgattcctccaaatggggccgcatatgcaagttcctcaccaaggaagggcacctggagaagaaccgagtggtggagccattggaagcgaccaaggacgatttgctggtggtgcactcggagtcgtacttgaacagcctcaagagcagcctgaaggttgcgtccattgtagagcttcctcctgtggcattcattcctaattggcttgtgcagcaaaagctactgtaccctttcaggaaacaggtgggtgggtcgattctatcggccaagcttgcacttgagagaggatgggccattaatgttggcggagggtttcaccattgttcggcagagcaagggggcgggttttgtgcatatgctgatatttctctctgcattcagtttgcttttgtccgtctaaatatttcaagagtgatgatcatagatctggatgcccaccaaggaaatggccatgaaaaggatttcgctaatgatggaagagtttacactttggatatgtacaatgctggaatatatccctatgatcatgttgctaagcggtatattgatcaaaaagtcgagctagttagtgggacaaagacagaagactacttggatcaacttgacaaggctcttaaggttgcagaaagtagatttcagcctcagttgattgtttacaatgctgggacagatatcctggatggcgatccattgggaagattgaagataagccctcagggcgtggtgatcagagatgagaaggtgttcaggtttgcaaaggatcaaagcatcccactactcatgttaacatcaggaggatacatgaagtcgagcgcccgagtgatcgccgactcgataatcaatctctcgaataaaaacttgatagagcttggtagccagcttggctga

SEQ ID NO: 11823 - DNA, 1062 bp, Oryza sativa
  Clone ID: TFbOSC28316j.C1.o2.fg
atgctggagaaagacaggatagcctacttctacgatgacaatcttggagaagactgcccagtctttgataatctgtttgagttttgccaaatatatgctggaggaactctagatgcggctcgcagattgaatcataaaacatgtgatattgctatcaattgggctggtggattgcatcatgcaaagaagtgcgaggcatcagggttctgctacattaatgatctggttttgggaattctggagcttctcaagtaccatgccagggttctctatattgatatcgatgttcatcacggggatggagttgaagaagccttttatttcactgacagggtaatgactgtaagtttccacaagtatggtgattttttcttccctggcacaggtgatattaaggatataggagaaagagaaggaaaatattatgccattaacattccacttaaagatgggatagatgactccggctttactcgcctttttaaaacagttattgccaaagttgttgagacatatctgccaggtgctattgttcttcaatgcggggctgattccttggcacgggaccgtctggggtgcttcaatctgtccattgaaggccatgctgaatgtgtgaagtttgtcaagaaattcaatatccctctactggtgactgggggtggtggatacacaaaagagaatgtagcacgctgttgggctgttgaaactggtgttcttctagatacggagctcccaaatgaaattccagacaatgaatacatcaaatactttgctccagattatacattgaaagtatcgaatgtgaacatggacaacttgaatagcaagtcatatctaagttcaatcaaagtgcaagtcatggagagtttgcgggccatacaacatgcgcctggtgttcagatgcaagaggttccaccagatttttatatcccagatattgatgaagatgagctggatcctgatgaacgtgtagatcagcatacccaagacaagcagattcatcgcgatgacgagtactatgaaggtgacaacgacaatgatcatgaggacggggcccgttga

SEQ ID NO: 11824 - DNA, 1872 bp, Oryza sativa
  Clone ID: TFbOSC400432j.C1.o32.fg
atggcgtctgatatgaggtcactcaacagccaaaagggacagagttgtggagtttcagaccaagcttgccacagcaaaagcaaaagcggcaatgatggaaaaccatcacatgctaaagcaaatggagtttcctcgttgagcgggagtcataatgatgagaaaattttgaaagagaactctggagcatgcaatttaaattccgaccatgccaatcctttatcagtagatgggaccaaagtttctacagcaaggtcggaacttattgacagttcaggccatgatggttgtctgcatgtcaagaatgaaagctgtatggcttgtgatgatctgcttcaagagtctgacaaagaacagcctgggggtacactggaggatctattttcctttaatgatgaagaggatgatgacagtgactgggaaccctctgctcgccttgctttgagcaggtggttttgcttgaactgtacagtgccaaacatggaggggtttacacattgtcagaattgcgatgagcttaagggatctgtggtagttggatatgatgctttcaaagctcatcttgcacaggcagctttgttatctgctgacgcagcgctgccatcagtatctacagctgtcggttttgatgaaagaatgttgctccatagtgagatagagattaaaccaaatccacatccagaaaggcctgaccgccttcgtgcaatcgctgccagtcttgctgctgcaggtatcttcccttcaaaatgtgtcatggtacctcctcgagaaatcactaaggaagaactcctaagggtccatacttcagatcacattgacagtgttgagcagacaaagaacatgctttacagttacttcacttcagatacctatgcaaatggacactcagcatgtgctgccaaacttgcagcagggatatgtgctgatcttgctaacttgatagtatctgggcgtgttcgcaatggatttgcaatggtgagacctcctggccatcatgcaggggtgaaacaagccatgggtttttgtcttcacaataatgcagcagtggctgcattagctgcacaaagagctggtgccaagaaagtcttaatagttgactgggatgtccaccatggcaatggaacacaggagatatttgatggggacaattctgtcttgtacatatcattacatcggcatgaggatggaagcttctaccctggaactggggcagcaaatgaggtgggagttatggatggccaaggattctcagtcaatataccttggagccgtggtggtgttggagacaatgactacatatttgcttttaagcatgtggtgcttccgatagctgcagaatttgctccagacatcaccatcatatctgcaggatttgatgcagcgaggggtgaccctctgggttgttgtgatgtcacacctgctggatattctaggatggcgtccatgctaactgcttgttcacagggaaaattgttggttatacttgagggaggatacaatcttcggtctatatcctcatcagctactgaagttgttaaggtcctacttggggatagtcctgtttatgatacagatgcaactgaaccatcagaggagggcatacagactgtcttacaagtcctgagtatccagcagcaattttggccagttttagttccatcctttgcatcagttctggcactgcagcggtcggttttttccagatataccactgaagtaaacaagatgaaaaggaagcatgcaggaggggcaggacccttctggtggaaatgggggagtaaaaggctactgtacgaagtgctatttgagggccgctgtctgaggaaaaccaaggatacaggcaaagaaaaattgaatgatgaagcagagccctaa

SEQ ID NO: 11825 - DNA, 1155 bp, Oryza sativa
  Clone ID: TFbOSC400156j.C1.o3.fg
atggcggcgtccggcgagggggcgtcgctggcgtcggcggcgggaggggaggacgggcggcggcggcgggtgagctacttctacgagccgtcgatcggggactactactacgggcaggggcacccgatgaagccccatcgcatccgcatggcgcactcgctggtggtccactacggcctccaccgcctcctcgagctctcccgcccctacccggcctccgacgccgacatccgccgcttccactccgacgactacgtcgccttcctcgcctccgccaccgggaaccccgccctgctcgacgcccgcgccgtcaagcgcttcaacgtcggcgaggactgcccggtcttcgacggcctcttccccttctgccaggcctccgcggggggcagcatcggcgccgccgtcaagctcaaccgcggcgacgccgacatcaccgtcaactgggcggggggcctccaccacgccaagaagggcgaggcctccggcttctgctacgtcaacgacatcgtcctcgccatcctcgagctcctcaagttccacaggcgtgtgctatatgtagacattgatgtccaccatggagatggcgtggaggaagctttcttcactacgaatcgagtcatgacttgttcctttcacaagtatggggactttttccctggtactgggcatatcactgatgttggagcaggcgaaggaaaacattatgctttaaatgtgcccctgagtgatggcattgatgatgatacctttcgtgatctgttccagtgcatcatcaaaaagactgcagttgctgttggagttgaacctgataacaagttaccttataatgactactatgagtactttggtcctgattataatctccatattcaacccagaagtgtggagaacctgaattcgactaaagacctggagaacataaagagcatgatattggatcatctctcaaaaattgagcatgttccgagcactcagttccatgacagaccatcagatcctgaagctccagagcaggaagaggaggacatggacaagagaccacctcagcgcagtaggttatggagtggaggagcttatgaatctgatacagaggatcctgacaacatgaaaactgagaccaatgacttatctgccagctctgtcatgaaggtttga

SEQ ID NO: 11826 - DNA, 1116 bp, Oryza sativa
  Clone ID: TFbOSC10062j.C1.o2.fg
atgggtcataacaaggaagcgcatccagaaactaacaaaagagttcctgcaatagttgatgctctcgaaaaactggagcttacttcgaagcatcgtggttcacaggttcttgaaattcaagatttccaacctgcttcacttgatgatattgcactagttcattcaagatcatacataactggacttgaaaaggctatgagtagggcttcagatgaaggtttgatattcattgaaggaactggacctacatatgctacccagactgtaatgatctatgcacattccctcttgtttttattcccccaatgcttttctcgttggaagactttccaagaatgtctcctttctgctggtgctggaattacattggttgattcagtggttgcagcatcaaagttgggcccgaagccaccgctcggctttgccttagtaaggccaccaggacatcatgctgttcctgaaggtcccatgggcttctgtgtctttgggaacattgcagtggcagctcggtatgctcagaatcaacatggtttaaagcgggtcatgataatagattttgatgttcaccacggtaacggcacatgtgacgccttttatgaggatccggacatattcttcctctcaactcatcagcttggaagctatcctggcaccggtaagatccaccaagttggccagggcaacggcgagggcacgacgctcaacctgccactacccggtggctcaggcgattacgcgatgaggtgcgcgtttgatgaggttattgccccagctgcccagcggttcaaacctgacatcatcctcgtttcagccgggtacgacgcgcacgcgctggacccgctggcggggctgcagttcacgacggggacgttctacatgctggcggcgaggatccgggaggtggcggcggagctgtgcggcgggcggtgcgtcttcttcctggagggcggctacaacctggagtcgctgtccagctcagtggccgacaccttccgtgcgttcctcggcgagcccagcctcgccgcgcggttcgacgacccggcgatgctctacgaggagcccacgcggaagatcagggaggccatcgacaaggccaagcacctccactcgctctaa

SEQ ID NO: 11827 - DNA, 1620 bp, Oryza sativa
  Clone ID: TFbOSC421577j.C1.o6.fg
atggacccctcgtcggcgggcgccggcggcaactcgctggcgtcggcgtcgtgcggcgacgcgcagaagcggcgggtgtgctacttctacgatccggaggtgggcaactactactacgggcagggtcacccgatgaagccccaccgcgtgaggatgacccacgcgctgctcgcccactacggcctcctcgccccggccaagatgcaggtgctccgcccgctccccgcccgcgaccgcgacctctgccgcttccactccgacgactacgtcgccttcctccgcgccgtcaccccggagacccagttcgaccagatccgctccctccgccgcttcaacgtcggcgaggactgccccgtcttcgacggcctctacgcctactgccagacctacgcgggggcctccgtcggcgccgccgtcaagctcaaccacggcacccacgacatcgccatcaactggtccggcgggttgcaccacgccaagaagtccgaggcctccggcttctgctacgtcaacgacatcgtcctcgccatcctcgagctcctcaagctccatgagcgagttctgtatattgatattgatatccatcatggagatggagttgaggaggcattctacacaacaaacagggttatgacagtctcatttcacaagtttggggattatttcccgggaacaggggacatccgcgatattgggtattcagaagggaagtattactgcctgaatgtcccgctggatgatggaattgatgatgacagctaccagtccatcttcaagccgatcatcagcaaagtcatggagatgtatcgtcctggtgcagtcgtgcttcagtgcggcgctgattcgttgtccggtgataggttgggctgtttcaatctctcaggcaaaggtcatgctgaatgtgttaagttcatgaggtctttcaatgttccgttgcttcttcttggtggtggtggatataccataagaaatgttgcacgctgctggtgttacgagacaggagttgcacttggtgaagagctacgggagaagttgccttataacgagtattatgaatattttggtccagaatacagtctttacgttgcagcaagtaacatggagaacagaaatacaaacaagcaattggaggaaataaaatgcaacattctggacaatctctcaaaacttcaacatgctcctagtgtccaatttgaagagcgaattcctgaaacaaagctacctgagccagatgaagatcaagatgatccagatgaaaggcacgaccctgactctgatatgctgttggatgatcacaaacctatgggacactcagcaagaagccttattcacaacatcggagttaagagagaaattactgaaacagagaccaaagatcagcatggtaagagattaacaactgaacataaagtaccagaaccgatggcagacgatcttggttcctccaagcaagttcctgccaccagctcttatgccacggattcctgcatgctattagttacttactccgaggtgttgtatgactgtttcttctgtaggagtttacaaattacaactgtttcttttgttgaagaattccaaagtgtccaggcaatactggacgtggagacattagtctga

SEQ ID NO: 11828 - DNA, 1908 bp, Oryza sativa
  Clone ID: TFbOSC17824j.C1.o4.gm
atggacgcctccgccggaggcggggggaactcgctgccgacggcgggggccgacggggccaagcggcgggtgtgctacttctacgacgcggaggtggggaactactactacgggcaggggcacccgatgaagccgcaccgcatccggatgacccacgcgctgctcgcccactacggcctcctcgaccagatgcaggtgctcaagccccacccggcgcgcgaccgcgacctctgccgcttccacgccgacgactacgtcgccttcctccgctccgtcacgccggagacccagcaggaccagatccgggcgctcaagcgcttcaacgtcggcgaggactgccccgtcttcgacggcctctacagcttctgccagacctacgccgggggatccgtcggcggcgccgtcaagctcaaccacggccacgacatcgccatcaactgggccggcggcctccaccacgccaagaagtgcgaggcctcgggattctgctacgtcaacgacatcgtcctcgccatcctcgagctcctcaaataccaccagcgtgttctctatgtggatatcgatatccaccatggggatggtgtggaggaggcgttctacacgacggacagggtgatgacggtctcgttccacaagtttggggattatttcccggggaccggggacattcgcgatattgggcactcaaaggggaagtattactctctgaatgtcccgttggacgacggtatcgacgacgagagctaccagtcgttgttcaagccgatcatggggaaggtgatggaggtttttcgccctggcgcggtggtgctccagtgcggtgcggactctctgtcgggtgataggttgggttgcttcaacctgtcaatcaggggccacgcggaatgcgtgagattcatgaggtccttcaatgtcccgctgttgctgcttggtggtggtgggtataccataagaaatgttgcgcggtgttggtgctatgagacaggagttgcacttggtcatgagctcactgacaagatgcctccaaatgagtattttgagtactttggtccagattatacacttcatgttgcaccaagtaacatggagaacaaaaacacacgccagcagttggatgatataagatcaagacttcttgataatctttcaaaacttcgacatgctcctagcgtccaatttcaagagcgaccccctgaggctgagctacctgagcaagatgaagaccaagaggatcctgatgaaaggcaccatgctgattctgatgtggaaatggatgatgtcaaacctttggatgactcaggaaggaggagcagtattcagaatgtgagagttaagagagagtctgctgaaacagatgccgcagatcaggatggtaatagggtcgctgcagagaacaccaagggcacagaacctgcggctgatggagttgcacgacggcaacgacggggcaacgacggttcgacggatttgatggtcgtcctcgtccaccaccaagcctactggtccaatctacccaacgaggatgccatggtgttgcaagatggatctacaaacacgaagcatgtcaaaaccgatctaatcggatgcataggagacggctgcagccacgccgatgtcttcctgccgtcctgcgtcgtgctgatggacaccaacgccgcccgcgactgcgacctccgcctcctccgctccgacgactacgtcgcctccctccccgccgtcctcccggagttgtggatctgttccctctgccgcttcaacgtcgacgaggattgcccgattttccatggcttctacatctactgccagacctgcgcaggggactgtgcccgcgccatcatcgatcgctaccatggcgcacaaaacgtcgtcatcaacaaggctttggatggcaacatggccgacaaatga

SEQ ID NO: 11829 - DNA, 1587 bp, Oryza sativa
  Clone ID: TFbOSC900126j.C1.o11.fg
atggacgcctccgccggaggcggggggaactcgctgccgacggcgggggccgacggggccaagcggcgggtgtgctacttctacgacgcggaggtggggaactactactacgggcaggggcacccgatgaagccgcaccgcatccggatgacccacgcgctgctcgcccactacggcctcctcgaccagatgcaggtgctcaagccccacccggcgcgcgaccgcgacctctgccgcttccacgccgacgactacgtcgccttcctccgctccgtcacgccggagacccagcaggaccagatccgggcgctcaagcgcttcaacgtcggcgaggactgccccgtcttcgacggcctctacagcttctgccagacctacgccgggggatccgtcggcggcgccgtcaagctcaaccacggccacgacatcgccatcaactgggccggcggcctccaccacgccaagaagtgcgaggcctcgggattctgctacgtcaacgacatcgtcctcgccatcctcgagctcctcaaataccaccagcgtgttctctatgtggatatcgatatccaccatggggatggtgtggaggaggcgttctacacgacggacagggtgatgacggtctcgttccacaagtttggggattatttcccggggaccggggacattcgcgatattgggcactcaaaggggaagtattactctctgaatgtcccgttggacgacggtatcgacgacgagagctaccagtcgttgttcaagccgatcatggggaaggtgatggaggtttttcgccctggcgcggtggtgctccagtgcggtgcggactctctgtcgggtgataggttgggttgcttcaacctgtcaatcaggggccacgcggaatgcgtgagattcatgaggtccttcaatgtcccgctgttgctgcttggtggtggtgggtataccataagaaatgttgcgcggtgttggtgctatgagacaggagttgcacttggtcatgagctcactgacaagatgcctccaaatgagtattttgagtactttggtccagattatacacttcatgttgcaccaagtaacatggagaacaaaaacacacgccagcagttggatgatataagatcaagacttcttgataatctttcaaaacttcgacatgctcctagcgtccaatttcaagagcgaccccctgaggctgagctacctgagcaagatgaagaccaagaggatcctgatgaaaggcaccatgctgattctgatgtggaaatggatgatgtcaaacctttggatgactcaggaaggaggagcagtattcagaatgtgagagttaagagagagtctgctgaaacagatgccgcagatcagttgttatggttaatgtgtgctcaaaggtgtgatggtaatagggtcgctgcagagaacaccaagggcacagaacctgcggctgatggagttggttcctcgaaacaaactgttcctaccgatgcaagtgcgatggccatagacgaaccaggctccctgaaagtcgagccagataactcaaacaaattgcaagatcaaccatcggtgcaccagaagacataa

SEQ ID NO: 11830 - DNA, 1059 bp, Oryza sativa
  Clone ID: TFbOSC9612j.C1.o1.fg
atggcgagggcggcggcggcgggtgctccgcctccgggcgctggtcgagtcggctggcggctagggctcgcgtgccttgcctaccttgctctttggcgaatgggtggtgtatttatccatggcggcgggggaaggagcggaggccactggcgagggtggcgtagactagccgacgttagggggaggaggccagtggggcgcgggtcccgcgccaccgcccgccacgtgctccgtgaggtgggccgcgacgacgtcgtcgtcgtcgacggccgcgccgtctctgcccagttcgccatggctggcgtagacccgggcactgcgacggtggcaggaaggcgagtgtatgtgaggaggccggtggggcgaggcgggaccggcgtcaacggggcgaagcggcggcccgtcttcgacggcctctacagcttctgccagacctacgccggcggctccatcgacggtgccatcaagctcaaccacggccacgacatcgccatcaacaccctcgagctcgcctgcgcggcgacaccctccccttctccaacggcgctgcccccgccgacgccgacgtcctcctctttctcccacctcctgggcctctctgaccctaagacggtggggcaggggagagggcgagaaccgcggcgacggcctcccgcgcccaccctcacccgccgccacccagctcctctcctggtaaccatgccgcccgcgccaagctccatgtcgccggctgcgcactactctgcccccgatggccgcaccctgctcctcccccgacggtcgcgctcagctcctcccccggcgacggtggcggcgtgggaggacggcagtgagaggccgtgcggcaccggcaatcggtgtccaacggtctcgccgagggcttctgcctcatcgccctcctcgagttcctctactaggaggcccccgacgccatgcgcagcctcacctccgcctacgccgccctcgccgatggcctcggctgcttcttcgccggtggcctacgccgcccttgctggtggcctccgctccttccccctccgtcctgagaagatagagtga

SEQ ID NO: 11831 - DNA, 1371 bp, Oryza sativa
  Clone ID: TFbOSC28291j.C1.o2.fg
atggccaccggcgggaactcgctgccgtcgccgtcgtgcgccgatgacaagaagcggcgggtgtgctactactacgaccccggcatcgcccacatcaaattcagcgacgaccatgtcatggtgcccgcccgcgtcgccatggcgcacagcctcgtcggcgtctacggcatgctcggcgacatgcgccgcctccgcacgagacccgccacggaggcggagatccgccgcttccactcgccggagtacgtcgacctcctccgcgacctcaccccggagagctacttcaacgacgccgcgcttcggcagaaggcggaggatgaccacggcatcggcggcgacgacgattgccccgccttcgaccgcctctggaagtactgccgcggctaccccggcgggtcgttcgccgcggcgcgcgcgcttgtcgacggcgcctccgacatcgccatcaactggtccggcggcatgcaccacgcgtccgcctgcaaggccaccggcttctgctacgtcaacgacatcgtgctcgccatcaacgagctcctcggcaccttcaggcgagtcatctacgtcgacatcgacgcgcaccacggcgacggcgtgcagaacgccttcttggactccaaccgggtcatgacgctgtcgttccaccggtacggcaaaatcacgccccacaaggacttcttcccgggctccggcgccatcaacgaaatcggcgacggcgccggcgagcactacagcgtgaacgtgcccctggacgccggcgtccgcgacgacgtgtaccacacgctgttcaagccgatcgtgggcaaggccatggaggtgttccagccggaggccatcgtgctgcagtgcggcgccgactcgctctccggcgaccgcctcggcggcatggagctgtcggtgcggggccacgcggagtgcgtcagcttcctccgcgggttcaacctgccgctgctcctcgtcggcggcggcggctacaccatcaaccacgtcgcctccgcgtggtgctacgagacggcggtcgccgtcggcaaggagaggaagctccccgacgacatagagatacccagccacggctacgagctcatgtacaagaaccaggggaacaagctccattacaagacgtcgacagcgacggcggcgagaaaaaggtcgagcagcacggaggtcaccaaggggaaggtgctcgagcacctgtcgcaggtcaagcgcgcgccgagcgtgcagttccaggagcgacgcggcggcgacaatgccgccggagttgggctctactacgagcgccctccgagcctggaagacgacgaacccgcgcagaggctgcaccgcctctgcttccctggcctgacgaagcgtatcaggctcaatgactga

SEQ ID NO: 11832 - DNA, 1029 bp, Oryza sativa
  Clone ID: TFbOSC24451j.C1.o3.fg
atgaagccccatcgcatccgcatggcgcactcgctggtggtccactacggcctccaccgcctcctcgagctctcccgcccctacccggcctccgacgccgacatccgccgcttccactccgacgactacgtcgccttcctcgcctccgccaccgggaaccccgccctgctcgacgcccgcgccgtcaagcgcttcaacgtcggcgaggactgcccggtcttcgacggcctcttccccttctgccaggcctccgcggggggcagcatcggcgccgccgtcaagctcaaccgcggcgacgccgacatcaccgtcaactgggcggggggcctccaccacgccaagaagggcgaggcctccggcttctgctacgtcaacgacatcgtcctcgccatcctcgagctcctcaagttccacaggcgtgtgctatatgtagacattgatgtccaccatggagatggcgtggaggaagctttcttcactacgaatcgagtcatgacttgttcctttcacaagtatggggactttttccctggtactgggcatatcactgatgttggagcaggcgaaggaaaacattatgctttaaatgtgcccctgagtgatggcattgatgatgatacctttcgtgatctgttccagtgcatcatcaaaaagactgcagttgctgttggagttgaacctgataacaagttaccttataatgactactatgagtactttggtcctgattataatctccatattcaacccagaagtgtggagaacctgaattcgactaaagacctggagaacataaagagcatgatattggatcatctctcaaaaattgagcatgttccgagcactcagttccatgacagaccatcagatcctgaagctccagagcaggaagaggaggacatggacaagagaccacctcagcgcagtaggttatggagtggaggagcttatgaatctgatacagaggatcctgacaacatgaaaactgagaccaatgacttatctgccagctctgtcatgaaggtttga

SEQ ID NO: 11833 - DNA, 1533 bp, Oryza sativa
  Clone ID: TFbOSC421577j.C1.o3.fg
atggacccctcgtcggcgggcgcgggcggcaactcgctggcgtcggcgtcgtgcggcgacgcgcagaagcggcgggtgtgctacttctacgacccggaggtgggcaactactactacggtcagggccacccgatgaagccccaccgggtgaggatgacccacgcgctgctcgcccactacggcctcctcgccccggccaagatggaggtgctccgcccgctccccgcccgcggcatcgacctctgccgcttccactccgacgactacgtcgccttcctccgcgccgtcaccccggagacccagctcggccaggtccgcgccctccgccgcttcaacatcggcccggactgccccgtcttcgacggcctctacgcctactgccagacctacgcgggggcctccgtcggcgccgccgtcaagctcaaccacggcacccacgacatcgccatcaactggtccggcgggttgcaccacgccaagaagtccgaggcctccggcttctgctacgtcaacgacatcgtcctcgccatcctcgagctcctcaagctccatgagcgagttctgtatattgatattgatatccatcatggagatggagttgaggaggcattctacacaacaaacagggttatgacagtctcatttcacaagtttggggattatttcccgggaacaggggatatccgcgacattgggtattcagaagggaagtattactgcctgaatgtcccgctggatgatggaattgatgatgacagctaccagtccatcttcaagccgatcatcagcaaagtcatggagatgtatcgtcctggtgcagtcgtgcttcagtgcggcgctgattcgttgtccggtgataggttgggctgtttcaatctctcagggaaaggtcatgctgaatgtgttaagttcatgaggtctttcaatgttccgttgcttcttcttggtggtggtggatataccataagaaatgttgcacgctgctggtgttacgagacaggagttgcacttggtgaagagctacaggagaagttgccttacaatgagtattatgaatattttggtccagaatacagtctttacgttgcagcaagtaacatggagaacagaaatacaaacaagcaactggaggaaataaaatgcaatattctggacaatctttcaaaacttcaacatgcacctagcgtccaatttcaagagcgaattcctgaaacaaagctacctgagccagatgaagatcaagaggatccagatgaaaggcacgaccctgactctgatatggtgttggatgatcacaaacctacgggacactcagcaagaagccttattcacaacatcggagtaaagagagaaattactgaaacagagaccaaagatcagcatggtaagagattaacaaccgaacataaaggaccagaaccgatggcagaggatcttggttcctccaagcaagctcctgagtttaccattgtttcttttgttgaagaagtccataatgttcaggcaatactggacgtggaggcattagtctga

SEQ ID NO: 11834 - DNA, 501 bp, Oryza sativa
  Clone ID: TFbOSC401324j.C1.o28.gm
atgctggagaaagacaggatagcctacttctacgatggccatgctgaatgtgtgaagtttgtcaagaaattcaatatccctctactggtgactgggggtggtggatacacaaaagagaatgtagcacgctgttgggctgttgaaactggtgttcttctagatacggagctcccaaatgaaattccagacaatgaatacatcaaatactttgctccagattatacattgaaagtatcgaatgtgaacatggacaacttgaatagcaagtcatatctaagttcaatcaaagtgcaagtcatggagagtttgcgggccatacaacatgcgcctggtgttcagatgcaagaggttccaccagatttttatatcccagatattgatgaagatgagctggatcctgatgaacgtgtagatcagcatacccaagacaagcagattcatcgcgatgacgagtactatgaaggtgacaacgacaatgatcatgaggacggggcccgttga

SEQ ID NO: 11835 - DNA, 396 bp, Oryza sativa
  Clone ID: TFbOSC401369j.C1.o85.fg
atggtgcccgcccgcgtcgccattgcgcacagcctcgtcagcgtctacggcatgctcggcgacatgcgccgcctccgcacgagacccaccacggaggcggagatccgccgcttccacttgccggagtacgtcaacctcatccgcaacctcaccccgaagagctacaccaatgacgtcgtgcttcggcagaaggcggaggatgaccacggcatcggtttactcggcgacgacaatgattgccccgccttcgaccgcctttggaagtactgccgcggctacgccggtgggtcgcttgccgcggcgcgcacgctcgtcaacggcgcctccggatctcaccgccgccgcatcgtgatgttcctgttcccgttccgcagccacatcgccccgatgctctag

SEQ ID NO: 11836 - DNA, 555 bp, Oryza sativa
  Clone ID: TFbOSC33840j.C1.o1.fg
atggacccctcgtcggcgggcgcgggcggcaactcgctggcgtcggcgtcgtgcggcgacgcgcagaagcggcgggtgtgctacttctacgacccggaggtgggcaactactactacggtcagggccacccgatgaagccccaccgggtgaggatgacccacgcgctgctcgcccactacggcctcctcgccccggccaagatggaggtgctccgcccgctccccgcccgcggcatcgacctctgccgcttccactcggacgactacgtcgccttcctccgcgccgtcaccccggagacccagctcggccaggtccgcgccctccgccgcttcaacatcggcccggactgccccgtcttcgacggcctctacgcctactgccagacctacgcgggggcctccgtcggcgccgccgtcaagctcaaccacggcacccacgacatcgccatcaactggtccggcgggttgcaccacgccaagaagtccgaggcctccggcttctgctacgtcaacgacatcgtcctcgccatcctcgagctcctcaagctccatgag

SEQ ID NO: 11837 - DNA, 1446 bp, Oryza sativa
  Clone ID: TFbOSC10030j.C1.o2.fg
atggccggcggcggcggcaattcgctgccttcgccgtcgtgcggcgacgacaagaagcggcgggtgtgctactactacgacccggggatctccaccgtcgactacggcgagggccacgtcatggtgccgcaccgcgtcaccatggcgcacaacctcgtcgccgcctacggcatgctcggcgacatgcgccgcctccgcacggcgcccgccacggcggcggagctcgccgacttccacgacgagggctacctcgccctcctccaggacctcaccccggacggctgcggaggcgacgacggggtcggcgacatggcgcgcgccaggggcatctacgccgtcgagggcaagggcggcggccgcggcgtcgacaacccggtgttcgaccgcctctgggattactgcctccgctactccggcgggtcgctcgccgcggcgcgcacccttgggagcggcaccgccgacatcgccatcaactggtcgggcgggatgcaccacgcgtgccgcggcggcgcgaggggcttctgctacgtgaacgacatcgtgctcgccatccgcgagctgctcgcccacttccgccgcgtgctctacgtggacatcgacgtccaccacggcgacggcgtccaggccgccttcgaggcgtcgaaccgggtgatgacggtgtcgttccaccagcacggcggcggcttcttcccgggctccggcgccgtcgccgacgtcggcaagaagggccccggccgctactgcgcgctgaacgtgccggtgagcgtgggcatcggcgacgaggagtaccaccggctgttcgagccgatcatggcgagggtgatggaggtgttccagccggaggccgtcgtgctgcagtgcggcgccgactccctcgccggcgaccggctcggcgagctgaacctgaccacgcgcggccacgcccagtgcgtcagcttcatccgcagcttcaacctgccgctcctcctcctcggcggcggcggctacaccatcaaccacgtcgcctcctgctggtgcaatgagacggcggtggccatcggcaaggagatccccaacgacatacccaagcatggtttcgacgtgttctacaagaaccaggagtacaagctccactacaagttggagacgaagcacctgcaccgcaaccgcaacacggcgaactccatagacggcatcaggatggcggccatggagaacctctccaaactgaagctggaggcggcggcgagcgtgcagttcgaggagcgccgccaccggagcatcaacgtcggcgacctctactacgacccacgcgagcaggaagaggaagaggagagccccacggcgaggctgcaccggaagctctacttcgagcccaccggagatcaggagagcccctacactaagcacaggtgcaacgtgcagccaggggagtcgagtagtagaaagcagcgtaagctaaagtga

SEQ ID NO: 11838 - DNA, 237 bp, Oryza sativa
  Clone ID: TFbOSC33846j.C1.o1.fg
atggagatgtatcgtcctggtgcagtcgtgcttcagtgcggcgctgattcgttgtccggtgataggttgggctgtttcaatctctcaggcaaaggtcatgctgaatgtgttaagttcatgaggtctttcaatgttccgttgcttcttcttggtggtggtggatataccatagaaatgttgcacgctgctggtgttacgaggaacacctgttgctacagctatggttttatcctctga

SEQ ID NO: 11839 - DNA, 372 bp, Oryza sativa
  Clone ID: TFbOSC418633j.C1.o11.fg
atggacgccgttggtggcgggaaggtgaagaaggcggcgggcgggaggaaggccggcgggccgaggaagaaggcggtgacacgctccgtcaaggccgggctccagttccccgtcggccgtatcgggcgctacctcaagaaccgtcggccggtcgatctcatctccgccgctccttccccgttagccgccccgaccctcttccccaccacgtcggtgacgccgtcgaccctctttcccatcgcgtcggtgacgccgccgccgccaccgcattgggccctcctctctgcgtcagtgatgatggccgcagccgcgtgtcgccgtcgccgaccgcacgagggggacggggaggccggcgagctcacaccgccttga

SEQ ID NO: 11840 - DNA, 3351 bp, Oryza sativa
  Clone ID: TFbOSC400014j.C1.o15.gm
atgacgatggccgacggtgcggggcgtgatcgctccggcctcgggccggggaagaggaaggagagggtgcgcccggagtccacgtcacgcgtcctcgctcgtgccggctcctccgacacaacaggcctccagtgtccatacgggcagtatgaggccccgaactgtgcagtcgcggtcagctgtcggctgtcgagcgggcaccgcgcggggagaactacaacaaggttttcacccgccagctataacagaaaaaagggatggctcgacaacgtcctcaagaaggaagatgatactcgaagtgccgtcgttgtcgtccgggcggtggccggcccggagctcggcggggcgaggcaagagagactgcgcgagctcaagacgtggttctccggaccactccacgcggagtcggcgccgggctgcgggcggagcgcggcgggcgagagcggcgatgggcgggcggcgggcaagctccaggtcgctccgtgcgagtcacgtcaccgggggcgcggcgactggtgggtgtgggcggccgccctcctccgactttgccccctactcctcgcacatcacctcctgccggaggcaggcaggcgcggactgggcggcgatgacgacgactcgccctcctcatctccccgtctcccgccggcctcctctcccacttctcccgccggtgaagaaggcgacaggcgggaggaaggccggcgggcgaggaagaaggcggtgacgcgctccgtcaaggccgggctccaattccccgtcggccgtatcgggcgctacctcaagaaaagccggccggtcgatctcctctccgccgctccttccccatcggccgcgccgaccctcttccccaccgcgtcggtcacgccgccgaccctctttcccaccgcgtcggtgacgccgccgaccctctttcccacacacgcacctcaagatattcctctctacccatcctcagcagacatggcgagaaaggagggggaagggctggatctggtagcgatggaagaagagctggatctgtattcttgggaacccgtggtgacgcttgccatatctttgctggacagagccatatcctacttgggtgaggacactagctgggcggaggggcggaacaagaacagatttggtggtttcagcagtcaaatgttttattatctccaacctgccagaggaaggtttcaagacttccgtctgcgtctgattaattggccaaagtcgtactgttgtggctatgaggaaatctggaagttcaggattgcggttgagctattggaggatttgatcgaggagatcgaacaccgccggctggaggaagatggtcgcattcctgccttgttcatgaatgctaaggcaaagatcgccttcaagtttgcgacaaatgattatttcagggaggagtgggacaggctgttccaggagttcacaaccttcaggctagaggacttgatcacggatatcgaacaccttagactggaagagagtggaaaaaagatctccaacaagaagtttgcgagatctcctgatcagtataaacaacaggctaggctatttttcctgctagagagaggtgtatcacgtttacgcgaccaattaccagcggtggtcgaacatgtggttagccaagatagggagctggttgaccttgagaaggaggagttgcatgcagagctggttggccgagatagggagaagaagcagatagtgcagtgcctcatcatcagcacagcaggcgcagaaatcaagcgtgtagcgagcgcaggccacatccaggagtatctttcagtccggatctcgaggcactgtcacaatggtaaaacccccgtcatcgccaacgagcctggctccgcgggggcggacaccgccgccggcgccgcggcgagcattgcccgcgcggaacttccgctccccgaacccgagcgcgtctccgatcccgcggttcccctccctccgcctgccctcgtctcggagccgccacctaccaccgctactgtcgccaaagtggaagatgaggagaagcccacggccgtcgcccaccaggaggcggcgcccagggattacgcgttccagcgagcgctcaagaccgcggagaacaagagcgacccgtgcggcggccggtacatctacgtgcacgagctgccgccgcggttcaacgacgacatgctccgggagtgcgagaggctcagcctctggaccaatatgtgcaagttcatgagcaacgaagggcttggtccgccgttgggcaacgaggaaggggtgttctccaacaccggctggtacgcgacgaaccagtttatggtggatgtcatcttcaggaaccggatgaagcagtacgagtgcctgaccaaggactcgtccatcgctgccgcggtgtttgtgccgttctacgccgggtttgatgtggcgaggtatctttgggggcacaacatttcgacgagggatgccgcgtcgctggatttgatagattggctgaggaagaggcctgaatggaatgtgatgggcgggcgtgaccatttcttagttggcggcaggattgcgtgggatttcaggcgcttgacggacgaagagtcggattggggcaacaagctgcttttcatgccggctgcgaagaatatgtcgatgttggtggtggagtcaagcccatggaatgccaatgattttgcgataccatatcctacttacttccaccctgccaaggatgctgatgttttgctttggcaggatagaatgaggagcctggaacgaccatggttgttctcgtttgctggggctcctcgtcctgatgatcccaagtctatcagaagtcagcttattgatcaatgcaggacatcaagtgtctgtaaattgctggagtgtgatcttggggagagcaagtgccattcccctagcgcaatcatgaatatgttccagaactctttgttctgcttgcagccccaagatggcgtccgtaagggaaatgtcagcattgaggacaggcttaaaagtatccatccagatatggtcaagaagatgagggaagaggtcattagtctcatcccaagggtgatatatgctgatccaaggtcaaagctggagaccctgaaggatgcattcgatgtttctgtagaggcaataattaacaaggtgacacagttgagaagagatatcatcgaagatcatgaagataaagattttgttgaagagaatagctggaagtatgatctgttggaagaagggcagaggacaattgggcctcatgaatgggacccgttcttctctaagcccaaggacaagggtggagattctactaatccatctactaatgctgccaagaactcctggaaaaacgaacaaagaggtcagaactaa

SEQ ID NO: 11841 - DNA, 462 bp, Oryza sativa
  Clone ID: TFbOSC33599j.C1.o1.fg
atggcgcccaaggcggagaagaagccggccgcgaagaagcccgcggaggaggagcccgcggcggagaaggccgagaaggccccggcggggaagaagcccaaggcggagaagcgtctccccgccggcaagggcgagaagggcagcggcgaggggaagaaggcggggcggaagaaggggaagaagagcgtcgagacctacaagatctacatcttcaaggtgctcaagcaggtccaccccgacatcggcatctcctccaaggccatgtccatcatgaactccttcatcaacgacatcttcgagaagctcgccggagagtccgccaagctcgcgcgctacaacaagaagcccaccatcacctcccgggagatccagaccgccgtccgcctcgtcctccccggcgagctcgccaagcacgccgtctccgagggcaccaaggctgttaccaagttcacttccgcttag

SEQ ID NO: 11842 - DNA, 453 bp, Oryza sativa
  Clone ID: TFbOSC414554j.C1.o2.fg
atggcccgtaccaagcagaccgctcgtaagtccacaggaggaaaggctcccaggaagcagcttgccaccaagagtgatttcgacagatggtcttacatcaccatctctgtgcaggctgctcgtaagtctgctcccaccactggaggagttaagaagccccaccgttaccgccctggaactgttgccctccgtgagattcgcaagtaccagaagagtactgagcttttgatcaggaagctgcccttccagaggcttgttagggaaattgcacaggacttcaagaccgatctgcgtttccagagccatgctgtccttgccctccaggaggctgcggaggcataccttgttggtctcttcgaggacaccaacctgtgcgccattcatgccaagcgtgtgaccatcatgcctaaggacattcagctggctaggaggattcgtggtgagagggcttaa

SEQ ID NO: 11843 - DNA, 698 bp, Oryza sativa
  Clone ID: TFbOSC100615j.C1.o3.np
cagacccgcacgaagcagacggcgtgcaagtcagggactcgaggaagcagctggcgaccaaggcaacgtgcaagtcagctccggccaccggcggcgtgaagaagccgcaccgcttcaggccaggcaccgtcgcgctccgtgagatccgcaagtaccagaagagcacggagctgctcatccgcaagctccccttccagcgcctcgtccgcgagatcgcccaggacttcaagaccgacctccgcttccagagctccgccgtcgccgcgctgcaggaggccgccgaggcgtacctcgtcgggctgttcgaggacaccaacctgtgcgccatccacgccaagcgcgtcaccatcatgcccaaggacgcggcgcgcaagtcggccccggccaccggcggcgtgaagaagccccaccgcttcaggcccggcaccgtcgcgctccgtgagatccgcaagtaccagaagagcacggagctgctcatccgcaagctccccttccagcgcctcgtccgcgagatcgcccaggacttcaagaccgacctccgcttccagagctccgccgtcgccgcgctgcaggaggccgccgaggcgtacctcgtcgggctgttcgaggacaccaacctgtgtgccatccacgccaagcgcgtcaccatcatgcccaaggacatccagctcgcgcgccggatccgcggcgagcgcgct

SEQ ID NO: 11844 - DNA, 462 bp, Oryza sativa
  Clone ID: TFbOSC21552j.C1.o3.fg
atggcgcccaaggcggagaagaagccggcggcgaagaagcccgcggaggaggagcccgcggcggagaaggccgagaaggccccggcggggaagaagcccaaggcggagaagcgcctccccgccggcaagggcgagaagggcagcggcgaggggaagaaggcggggcggaagaaggcgaagaagagcgtcgagacctacaagatctacatcttcaaggtgctcaagcaggtccaccccgacatcggcatctcctccaaggccatgtccatcatgaactccttcatcaatgatatcttcgagaagctcgccggagagtccgccaagctcgcgcgctacaacaagaagcccaccatcacctcccgggagatccagaccgccgtccgcctcgtcctccccggcgagctcgccaagcacgccgtctccgagggcaccaaggccgttaccaagttcacttcctcctag

SEQ ID NO: 11845 - DNA, 125 bp, Oryza sativa
  Clone ID: TFbOSC401577j.C1.o1.hg
ccgccgaggcctacctcgtcggcctcttcgaggacaccaacctctgcgccatccacgccaagcgcgtcaccatcatgcccaaggacatccagctcgcccgccgcatcaggggcgagagggcttga

SEQ ID NO: 11846 - DNA, 357 bp, Oryza sativa
  Clone ID: TFbOSC420432j.C1.o1.fg
atgtcgcaacgcatccacttcctctctcgttgccaattcgagtcttctcaacctctcgatccgggcgtgatggtgccgaaggcggagaagaagccggcagagaagaagccagcagaggagaaggtgcatccagacataggaatctcctccaaggccatgtccatcatgaattccttcgtcaacgacattttcgagaagctcgagcaggaggccgcgaggcttgccaggtacaacaagaagcccacaatcacctcccgcgagatccagacctctgttcgtctcgtcctccccggcgagcttgccaagcacgccgtctccgagggcaccaaggccgtcaccaagttcacctcctcctaa

SEQ ID NO: 11847 - DNA, 411 bp, Oryza sativa
  Clone ID: TFbOSC400405j.C1.o21.fg
atggcgcgcacgaagcagacggcgaggaagtcgaccggcgggaaggcgcctcggaagcagctggcgacgaaggcggcgcggaagtcggcgccggcgaccggcggcgtgaagaagccgcaccgcttccggccgggcacggtggcactccgggagatccgcaagtaccagaagagcacggagctgctgatccggaagctcccgttccagcggctggtgcgggagatcgcgcaggacttcaagacggacctccggttccagtcgtccgccgtcgccgcgctgcaggaggccgccgaggcctacctcgtcggcctcttcgaggacaccaacctctgcgccatccacgccaagcgcgtcaccatcatgcccaaggacatccagctcgcccgccgcatcaggggcgagagggcttga

SEQ ID NO: 11848 - DNA, 617 bp, Oryza sativa
  Clone ID: TFbOSC400405j.C1.o24.gp
tttgccaagaacagattgtattccatcaatgcgaacccaattcaagcgagtgattacaggataacacagatccatgggttaattaacacttctagatctaacaagccatgaactcgaacaataacggcatcaagccctctcgcccctgatgcggcgggcgagctggatgtccttgggcatgatggtgacgcgcttggcgtggatggcgcagaggttggtgtcctcgaagaggccgacgaggtaggcctcggcggcctcctgcagcgcggcgacggcggacgactggaaccggaggtccgtcttgaagtcctgcgcgatctcccgcaccagccgctggaacgggagcttccggatcagcagctccgtgctcttctggtacttgcggatctcccggagtgccaccgtgcccggccggaagcggtgcggcttcttcacgccgccggtcgccggcgccgacttccgcgccgccttcgtcgccagctgcttccgaggcgccttcccgccggtcgacttcctcgccgtctgcttcgtgcgcgccatggatgatggattgatggatctctctctcgatctctttgctgcgaaattcgaatggattttttgaattgaggcgtggg

SEQ ID NO: 11849 - DNA, 468 bp, Oryza sativa
  Clone ID: TFbOSC401685j.C1.o36.fg
atggcgcccaaggcggagaagaagccggccgcgaagaagcccgcggaggaggagcccgcggcggagaaggccgagaaggccccggccgggaagaagcccaaggcggagaagcggctccccgccggcaagggcgagaagggctccggcgaggggaagaaggaccgcgctgggaggaagaaggcgaagaagagcgtcgagacctacaagatctacatcttcaaggtgctcaagcaggtccaccccgacatcggcatctcctccaaggccatgtccatcatgaactccttcatcaacgacatcttcgagaagctcgccgccgaggccgccaagctcgcccgctacaacaagaagcccaccatcacctcccgcgagatccagacctccgtccgcctcgtcctccccggcgagcttgccaagcacgccgtctccgagggcaccaaggctgtgaccaagttcacctccgcttag

SEQ ID NO: 11850 - DNA, 408 bp, Oryza sativa
  Clone ID: TFbOSC13637j.C1.o1.gm
atggtggaccccaccgagacctacaacgtctgcctcttcaaggtttcaaaaggagtgtcgagatctactgaatctacatcttccaggaagagtgtcgagacttacaagatcatcttcaaggtgctaaagcagacactgacggataccggggtcttgtctaaagctatgcccaccatgaactccttctttatcaacatcttcgagaagctcatccaaaacacaataaaatctatctttggcaatatgagcgcgctcgagtgggcaagggttatagttattgagaccggactagtccaaccgtcggtatggttcggtcttaataactatggcgggggtgccctgaggattcgaggtgacccaagcacggtggctagtcgaacacaagttttcaatcccttggggacctga

SEQ ID NO: 11851 - DNA, 1254 bp, Oryza sativa
  Clone ID: TFbOSC401232j.C1.o26.fg
atggcgcccaaggcagagaagaagccggcggagaagaagcccgcagccggcgaggagaagtcggcggagaaggcgccggcggggaagaagcccaaggcggagaagcggctgccggcgtcgaaggcgtcgtccaaggagggcggcgccggcgacaagaaggggaggaagaaggcgaagaagagcgtcgagacctacaagatctacatcttcaaggtcctgaagcaggtgcacccggacatcggaatctcctccaaggccatgtcgatcatgaactccttcatcaacgacatcttcgagaagctcgcgcaggaggccgcccgcctcgcccgctacaacaagaagcccaccatcacctcccgcgagatccagacctccgtccgcctcgtcctccccggcgagctcgccaagcacgccgtctccgagggcaccaaggcgggctatcattttacacaacagaggaagaacttaaaaatgtcttctcaccatttggcgctgttgaggaaggtgattggcgacggcggtgacgcggtgattggcgatggcggcggcggcttgcaacggttacctcgacgacggccatggagcagaggtggaggccgcgcggcccccgaatccaccccgccggccaaatacgcgcggggccggaggccgcgcagaggcagtggaggtcacgccccccaccctgaatccggcggcggtggaggcggcggaggcggcgctagggagtggcgcgacgttgggacgacgatgcggggaggcggcggacgcggacgcggcaaatcggcgcaggcagcggaccgctgttgccgacgcatgccgatggacggcggccccccaacgccgacgctcgccgaggtgctctccctctccccgccaactactccccgtagtcgagcgccgtcgagctccagacggcgaaggatggcggcccagaccttggcgacgacagcagctggcggccagacggcggcggaggtcgcgcggccccctgattccacgccgccggccgaatccggcgaggaaggaggcgtaggagtccacacgggggaagaaggcaaagcggctgccgccggagagggatccgaccccttcttccccatcatcgctgctccctcgttgccgtcgccaacacagcctcccttgctcctgcctcgtcatcgcggagctctcttggtgacggaggaaatcggacggcgacgacggtgcaggtgggaggcggcgacagcgcgggacggcgatggcgcggataggtaa

SEQ ID NO: 11852 - DNA, 300 bp, Oryza sativa
  Clone ID: TFbOSC3090j.C1.o1.fg
atgaggaggagaggcggtgcattggagtatggcgggtacaagaggtacgtgtggcgcgtgctgaagcaggtgcaccctgacttgggcgcctccgcccaaaccatggacgttctcgacatgatgatggccgacatgttcgagcgcctcgccgacgaggcctctcgcctcttcaagctctccggccgccttaccctcaccttccgtgaggttcagtccgccgtccgcctcgtcctccccgccgacctcgccaaccacgccatctccgagggcaccaaggccatctctaactacctttcctaa

SEQ ID NO: 11853 - DNA, 441 bp, Oryza sativa
  Clone ID: TFbOSC402805j.C1.o30.fg
atggctcgcacgaagcacccggcggtgaggaagtcgaaggcggagcccaagaagaagctccagttcgaacgctcccctcggccgtcgaaggcgcagcgcgctggtgggacgcctaggcagcaaacgaagcagaggaagccacaccgcttccgtccaggcacagtggcactgcgggagatcaggaaatttcagaaaaccaccgaactgctgatcccgtttgcaccattttctcggctggtcagggagatcactgatttctattcaaaggatgtgtcacggtggacccttgaagctctccttgcattgcaagaggcagcagaataccacttagtggacatatttgaagtgtcaaatctctgcgccatccatgctaagcgtgttaccatcatgcaaaaggacatgcaacttgccaggcgtatcggtgggcggaggccatggtga

SEQ ID NO: 11854 - DNA, 462 bp, Oryza sativa
  Clone ID: TFbOSC401685j.C1.o34.fg
atggcgcccaaggcggagaagaagccggccgcgaagaagcccgcggaggaggagcccgcggcggagaaggccgagaaggccccggcggggaagaagcccaaggcggagaagcgtctccccgccggcaagggcgagaagggcagcggcgaggggaagaaggcggggcggaagaaggggaagaagagcgtcgagacctacaagatctacatcttcaaggtgctcaagcaggtccaccccgacatcggcatctcctccaaggccatgtccatcatgaactccttcatcaacgacatcttcgagaagctcgccgccgaggccgccaagctcgcccgctacaacaagaagcccaccatcacctcccgggagatccagaccgccgtccgcctcgtcctccccggcgagcttgccaagcacgccgtctccgagggcaccaaggccgtcaccaagttcacttcctcttag

SEQ ID NO: 11855 - DNA, 375 bp, Oryza sativa
  Clone ID: TFbOSC400544j.C1.o6.gm
atggtggaccccaccgagacctacaacgtctgcctcttcaaggtttcaaaaggagtgtcgagatctactgaatctacatcttccaggaagagtgtcgagacttacaagatcatcttcaaggtgctaaagcagacactgacggataccggtgtcttgtctaaagctatgcccaccatgaactccttcttcatcaacatcttcgagaagctcatccaaaacaacaataaaatctatctttggcaatatgagcgcgctcgagtccaaccgtcggtatggttcggtcttaataactatggcgggggtgccctgaggattcgaggtgacccaagcacggtggctagtcgaacacaagttttcaatcccttggggacctga

SEQ ID NO: 11856 - DNA, 963 bp, Oryza sativa
  Clone ID: TFbOSC419721j.C1.o9.fg
atgtccgtgcagggccttgatctgaaaaccgacttgagcttgtgggtttttggccatacctctgtattcagatgttgcaagcctgaacagtcggcggcggccattgttagcttttctctcttcaggaattgcggcggcgacatcgagcctggaccttggagggcttatgaagttaaaaaacgtatgggttcttggattgtgaatgatagtcagcagataagattctgggaggataaatggctaggtgttacatgttatatgactgcaaatcttttagctactgctcatgttttgggggaactgaagattaggttcgtaattttagaaactggtgtgggagtgccggtaatgcttttcttcactgctagagatggcaatggggaatcactgcagttggtatattttagtatttggaaaagctatcgtagtcctatgattgttactggtaaaccaaagttctttttccgatggctcgtactaagcaaactgctcgcaagtcaactggaggaaaggctcccaggaagcaacttgccaccaaggtatgtttttcgacatgataccctgcacatatcaattgccaaggtgttaatactgttgaactgtgctaaacttactgctagcgttttgattatgtcagctgctcgtaagtctgctcccacaactggaggagtgaagaagcctcaccgttacccgccctggaactgttgctcttcgtaccagaagagcactgagctgctcataaggaagcttccattccagaggcttgttagggagattgcccaggattttaagactgatcttcgtttccagagccatgcggtgcttgcccttcaggaagctgccgaggcgtacctggtgggtctcttcgaggacaccaacctgtgcgccatccatgccaagcgtgtgaccatcatgcccaaggacattcagctggctaggaggatccgtggtgagagggcttag

SEQ ID NO: 11857 - DNA, 1182 bp, Oryza sativa
  Clone ID: TFbOSC400542j.C1.o17.fg
atggcgggaaaaggaggtaagggcttgctcgccgcgaagacgacggccgccaagtcggcggagaaggacaaggggaagaaggcccccgtctcccgctcgtcccgcgctggtctccaggaaggtggtagtatgccagtggcaccaactgtggtggtttcagctaccatggaagccaaccatgataggactctgttccctgttggccgtatccatcgccagttgaagcaaaggactcaggcaaatggacgtgttggtgctactgccgcagtttactctgctgctattctggagtacttaacagctgaggttctggaactggctgggaacgctagcaaggatctgaaggtcaagcgtatcacccctcgccatctgcagcttgccatccgtggagatgaggagctcgacactctcatcaagggtaccatcgctggtggagtggtcaagagctttgttttctttgtcacttttcattattttacactccaggctgactggatccagcatagatatacggtacgtggaggatggtctactactcaaatccgagctaaagctactaaccctaatgaaaggttatcattctgttccaagtcaattcttgcatcaataaccaatacaagttgcccccctgctgtttatccccagaaacttacttaccctttactttcacccttggctgtcattcagtggtgtgactgtgaaggtggcggagcctgcatggaagggctgacgagcgagcagatggtggcgttccaggaggcgttcttgctcttcgacaagaacggcgatggatgcatcaccttggaagagctggctgcggtgactcgttctcttggccttgagccgaccgatcaggagctcaacgacatgatgagggaagttgatacagatggcaatgggatcatagattttcaggagttcctgagcctcattgccaggaagatgaaggatggggatggcgacgaagagctgaaagaagctttcgaggtcctagacaaggatcagaatggttttatctccccaactgagctgaggacagtgatgaccaatcttggggagaagatgacagacgaggaggttgagcagatgataagggaggcggataccgatggcgacgggcaggtgaactacgatgaatttgtgataatgatgaaaaacgctgaacggaagatatctgggtga

SEQ ID NO: 11858 - DNA, 447 bp, Oryza sativa
  Clone ID: TFbOSC415633j.C1.o2.fg
atggacgtcggcgtcggcggcaaggcggcgaagaaggcggtggggcggaagctgggcgggccgaagaagaagccggtgtcgcgctccgtcaaggccgggctccagttccccgtcggccgcatcggccgctacctcaagaagggccgctacgcccagcgcgtcggcaccggcgcccccgtctacctcgccgccgtgctggagctcgccgggaacgcggcgcgggacaacaagaagaaccggatcatcccgaggcacgtgctgctggcgatccgcaacgacgaggagctcgggaagctgctcgccggggtcaccatcgcgcacggcggcgtgctgccgaacatcaacccggtgctgctcccgaagaagaccgcggagaaggccgacaagccggccaaggcgtccaaggacaaagccgccaagtcccccaagaagcaggcgcgctcctag

SEQ ID NO: 11859 - DNA, 462 bp, Oryza sativa
  Clone ID: TFbOSC21547j.C1.o2.fg
atggcgcccaaggcggagaagaagccggccgcgaagaagcccgcggaggaggagcccgcggcagagaaggccgagaaggcccccgcggggaagaagcccaaggcggagaagcgtctccccgccggcaaggccgagaagagcagcggcgaggggaagaaggcggggcggaagaaggcgaagaagagcgtcgagacctacaagatctacatcttcaaggtgctcaagcaggtccaccccgacatcggcatctcctccaaggccatgtccatcatgaactccttcatcaacgacatcttcgagaagctcgccggggagtccgccaagctcgcgcgctacaacaagaagcccaccatcacctcacgggagatccagacctccgtccgcctcgtcctccccggcgagctcgccaagcacgccgtctccgagggcaccaaggctgtgaccaagttcacctccgcttag

SEQ ID NO: 11860 - DNA, 462 bp, Oryza sativa
  Clone ID: TFbOSC21552j.C1.o8.fg
atggcgcccaaggcggagaagaagccggcggcgaagaagcccgcggaggaggagcccgcggcggagaaggccgagaaggccctggcggggaagaagcccaaggcggagaagcgtctccccgccggcaaggccgagaagagcagcggcgaggggaagaaggcggggcggaagaaggcgaagaagagcgtcgagacctacaagatctacatcttcaaggtgctcaagcaggtccaccccgacatcggcatctcctccaaggccatgtccatcatgaactccttcatcaacgacatcttcgagaagctcgccggggagtccgccaagctcgcgcgctacaacaagaagcccaccatcacctcacgggagatccagacctccgtccgcctcgtcctccccggcgagctcgccaagcacgccgtctccgagggcaccaaggctgtgaccaagttcacctccgcttag

SEQ ID NO: 11861 - DNA, 453 bp, Oryza sativa
  Clone ID: TFbOSC413661j.C1.o12.fg
atggcgcccaaggccgagaagaagcccgcggagaagaagccggcggaggagaaggccggcgagaaggcgcccgcggccgggaagaagcccaaggccgagaagcggctgccggcgtccaagggggagaagggcggcgagggcaagaaggagcgcggcaggaagaaggccaagaagagcgtcgagacctacaagatatacatcttcaaggtgctcaagcaggtgcacccggacatcgggatctcctccaaggccatgtcaatcatgaactcgttcatcaacgacatcttcgagaagctcgccggcgaggccgccaagctcgccaggtacaacaagaagcccaccatcacctccagggagatccagacctccgtccgcctcgtcctccccggcgagctcgccaagcacgccgtctccgagggcaccaaggccgtcaccaagttcaccagctcttag

SEQ ID NO: 11862 - DNA, 411 bp, Oryza sativa
  Clone ID: TFbOSC900046j.C1.o14.fg
atggcccgcacaaagcagacggcgaagaagtccaccgccagcaatgtgccgaggaagctgctggtgatgaaggtggcacgcaagtcagcaccgacgatggcagggctgaagaagccacaccgcttcaagccagggaccgtcgcactccgagagatccgcacataccagaagagcacagagctgctaatccgcaagctccccttccagcggctggtgcaggagatcgcgcaggacgttaggtcctatgttcgcttccagagctctgccgtggttgcgctgcaggaggctgccgagacctaccttgtggggctcttcaaggacaccaacctctgtgttatccatgccaaacgcgtcaccatcatgcccaaggacatccagctcgcgcgccgcatcaggggcgagaaggcctag

SEQ ID NO: 11863 - DNA, 507 bp, Oryza sativa
  Clone ID: TFbOSC900015j.C1.o22.fg
atggcccgcacgaagcagacggctcggaagtcgaccggcgggaaggcgccgaggaagcagctggcgacgaaggcggcgcggaagtcggcgccggccaccggcggcgtgaagaagccgcaccggttccggccgggcaccgtcgcgctccgggagatccgcaagtaccagaagagcacggagctgctgatccgcaagctccccttccagcggctcgtccgggagatcgcgcaggacttcaagacggacctccggttccagagctccgccgtcgccgcgctccaggaggccgccgaggcctacctcgtcgggctcttcgaggacaccaacctctgcgccatccacgccaagcgcgtcaccatcatgcccaaggacatccagctcgcccgccgcatccgcggtctccatccatgtcttgagcagaagatgtcacttgccacctgtcttataagtctggctcccaactgcagtcttcttcgatttacttccaacttctgcaaagatgcctag

SEQ ID NO: 11864 - DNA, 392 bp, Oryza sativa
  Clone ID: TFbOSC100615j.C1.o8.gp
gcgcgctcaccgcggatccggcgcgcgagctggatgtccttgggcatgatggtgacgcgcttggcgtggatggcgcacaggttggtgtcctcgaacagcccgacgaggtacgcctcggcggcctcctgcagcgcggcgacggcggagctctggaagcggaggtcggtcttgaagtcctgggcgatctcgcggacgaggcgctggaaggggagcttgcggatgagcagctccgtgctcttctggtacttgcggatctcacggagcgcgacggtgcctggcctgaagcggtgcggcttcttcacgccgccggtggccggagctgacttgcacgttgccttggtcgccagctgcttcctcgagtccctgacttgcacgccgtctgcttcgtgcgg

SEQ ID NO: 11865 - DNA, 672 bp, Oryza sativa
  Clone ID: TFbOSC401217j.C1.o40.hg
atgaggggactaggaaaccgtgcgcgcctaccggaaccacgaaattttcaatctctccccacaccgcaaaacgcgaaattttccacggcccccgcgcgcgggctccactccaccgaaaacccagccaaacgcgccagatccgcgcctcctccactcacacgcggatcgctccccgatccaacggcaggcgctgcccccccgcaccactcacgcggatcgctccccgatccgacggctgcccactcccctcccaactctatatatatccacccctcccaaaccaaaaatcctccacatccaaatctcgccaccaaaaaaatccccaattccgccgtcgtcttcgtcgccgtcgccgcgaggatgtctgggcgcgggaagggagggaagggcctgggcaagggaggcgcgaagcgccaccggaaggtgctccgcgacaacatccaggggatcacgaagccggcgatccggaggctggcgaggaggggcggggtgaagcgcatctcggggctcatctacgaggagacccgcggggtgctcaagatcttcctcgagaacgtcatccgcgacgccgtcacctacaccgagcacgcccgccgcaagaccgtcaccgccatggacgtcgtctacgcgctcaagcgccagggccgcaccctctacggcttcggcggctag

SEQ ID NO: 11866 - DNA, 831 bp, Oryza sativa
  Clone ID: TFbOSC420396j.C1.o17.hg
atgcctcaggtcctccccggggggtcccttttatatcgcagtcttgtccgagtaagactcttcccatccgtagacttcgtgaaggatttccttagtgtacgcgggaagtatccatatgcgcgtggtgaaaaaaatctctcaaaggccaaacgccaagtccctactcccatagtcccatggccgcgccgcaggccaaatttggcggcgcctgcaggtcaaaattttgagctggccgcctctcagaccacgaaaattcccactatcccgccaaatcaccgatccgcgcctcacgccacgtcaacgatccgctcctccccccgcgatccagatcctcaccgtccattccctcccccatccaacggcagccgcctccccactccatcctctcgtccccttttaaaaccccctcccctttcttccccaaatcccactccaatcaccaccacctcttctccaattccactcgcttttctctctctctcgtgcgtcgagccaccggaatcgtcgtcgtcggcggccatgtcggggcgcggcaagggaggcaaggggctcggcaagggcggcgccaagcgtcaccggaaggtgctccgcgacaacatccaggggatcaccaagccggcgatccggaggctggcaaggaggggcggcgtgaagcgcatctccgggctgatctacgaggagacccgcggcgtgctcaagatcttcctcgagaacgtcatccgcgacgccgtcacctacaccgagcacgcccgccgcaagaccgtcaccgccatggacgtcgtctacgcgctcaagcgccagggccgcaccctctacggcttcggcggctga

SEQ ID NO: 11867 - DNA, 462 bp, Oryza sativa
  Clone ID: TFbOSC27706j.C1.o2.fg
atggcgcccaaggcagagaagaagccggccgcgaagaagcccgcggaggaggagcccgcggcggagaaggccgagaaggcccccgcggggaagaagcccaaggcggagaagcgtctccccgccggcaaggccgagaagggcagcggcgaggggaagaaggcggggaggaagaaggcgaagaagagcgtcgagacctacaagatctacatcttcaaggtgctcaagcaggttcaccccgacatcggcatctcctccaaggccatgtccatcatgaactccttcatcaatgacatcttcgagaagctcgccggagagtccgccaagctcgcccgctacaacaagaagcccaccatcacctcccgggagatccagacctccgtccgcctcgtcctccccggcgagctcgccaagcacgccgtctctgagggcaccaaggccgtcactaaattcacctccgcttag

SEQ ID NO: 11868 - DNA, 462 bp, Oryza sativa
  Clone ID: TFbOSC21545j.C1.o1.fg
atggcgcccaaggcagagaagaagccggccgcgaagaagcccgcggaggaggagcccgcggcggagaaggccgagaaggcccccgcggggaagaagcccaaggcggagaagcgtctccccgccggcaaggccgagaagggcagcggcgaggggaggaaggcggggcggaagaaggcgaagaagagcgtcgagacctacaagatctacatcttcaaggtgctcaagcaggtccaccccgatatcggcatctcctccaaggccatgtccatcatgaactccttcatcaatgacatcttcgagaagctcgccggggagtccgccaagctcgcccgctacaacaagaagcccaccatcacctcccgggagatccagacctccgtccgcctcgtcctccccggcgagctcgccaagcacgccgtctctgagggcaccaaggccgtcactaaattcacctccgcttag

SEQ ID NO: 11869 - DNA, 783 bp, Oryza sativa
  Clone ID: TFbOSC900138j.C1.o3.gm
atgaacattaaaaagattaacatcaagaagacgatggcagccgacatccttctccacccttgccatcgttgcaacatggtgagggcgcagccgccgtcgccaaggtgcaccgtctcccctcccgctggagctggcggaggggagaaggggagggcacaaccactgccgctgccatcaccgtggtccgccgcttcccctcccaccgaatctggtggaggggagggcacggctgccgccaccgtcatcaccagaggccgccgtcgcctcccatcccgctacccccctcaagctggatctggcgaaggggagggaggaggtaaaacctcagaatcatcattggttgtcaaatcaattgcatcattgtgtgccaaggcaccagcagtaggagaagtgtcctgcgtagctgccgtagcatggcttggaggtgctgggagttgcaaaactggagatgatgcagtggtacttgcagctgcacttgcactacttgcactaccagactccatcaccaatctagacacaaaggagatccgaaagtatcagaagaacacagagctgctgataaggaagctgccgttccagaggctcgtcagggagatcgcacagctcttcaagcacgacatgaggttccagagccacgcggtgctggcactgcaggaggcggcggaggcgtacctggtgggtctgttcgaggacaccaacctctgcgccatccactccaagcgcgtcaccatcatgtccaaggacgttcagcttgccaggaggattcgtggcgagaggctctaa

SEQ ID NO: 11870 - DNA, 312 bp, Oryza sativa
  Clone ID: TFbOSC400999j.C1.o2.fg
atggcgcctcgttcggtagccatttctgggcgcggtacaagtggtgctaggcgccatcggattgtctttcgcggctacatccaaggcatcgccaagccggtgatccgacgccttgcaaggaagggtggcgtgaagcgcatctcagggttgatctacaaagagactcgtggcgtgctcgagatcttcctcaagaatgtcatctgcgatgccattacctacaccgagcatgctcaccgcaagactgtcatggccatggatgtcgtatatgcgctcaagcttcagggccgcaccatctatgacttcggcggttga

SEQ ID NO: 11871 - DNA, 411 bp, Oryza sativa
  Clone ID: TFbOSC400785j.C1.o27.fg
atggcccgtacgaagcagaccgcccgcaagtccaccggcggcaaggccccgaggaagcagctcgccaccaaggcggcgaggaagtctgctccgaccaccggcggcgtgaagaagccccaccgctacaggccggggacggtggcgctccgcgagatccgcaagtaccagaagagcacggagctcctgatccgcaagctccccttccagcgcctcgtccgcgagatcgcgcaggacttcaagaccgacctccgcttccagagccacgcggtgctcgccctccaggaggccgccgaggcctacctcgtcggtctcttcgaggacaccaacctctgcgccatccacgccaagcgcgtcaccatcatgcccaaggacatccagctcgcccgccgcatccgcggcgagcgcgcgtaa

SEQ ID NO: 11872 - DNA, 1953 bp, Oryza sativa
  Clone ID: TFbOSC21550j.C1.o1.fg
atggcggctctgacggaggacatcctcctccagatcttctcccgcgtgggcagcatcaaggacctcttcaagttcgccgtgacatgccggcggtggctgcgccgcttcaccgacccggccttcctccgcgggctgtgcctggacagcggcgagggccaccgcgcgcgcctcctcggcttcttcttccagcagacgagattctatcgctgcgaaaagatgatcaagatgcgggtgacgcagcagagctcggtctgtccgcccaccttcctgccggcgccgtggtcgccgctcggcctcacggatcgcaccctcacctccttcctcgccgccgacgacgacaccttcaactacgccgagcccctcgcagcgcgctgcggcattgtcctgatgcggcttgtcccccgcaccgcgctgatgatagcgtgcagccacctcctcggcgtctgcaacccgatcaccggggaatgccacgttctcccgcctctgaatctctccggcctccatcgctacttgaccagctacgccatcatcacgtccaccgacagcgacctagatgggaagcagccgccatcatcatcatcgtcagggcgctccacgttctcgcagctgtacctcgtcgtccaacacaagaaagactgtaacgagtacttctactcctactctgctgctacgtgcagctggagcgctcccaccatgtgcgtggacggccgccgcttctccctggtgggtgagagatccgccgtcgttcacaagggcgcggcgcactggctgtttattgatcgtgtatctagcgcaacccaagatgacatactgtacaaactcaccgcggcggtggacacctcagaaatctccttgacaaggctcccctttgtgctggaggctcaccgctcctctgcgataccattggcggtgccttacccagactattcccatatatgtcagccccgcgagaagtggtttaacttcaacaggggatcaatgctcgtgctgtacaggagcaacggcgtcttcatcctcgacctcgagaagaaggtgatggaaaagctattgtctagacatggaaaagctactgctgaaaggccttcgagttctgaaggatacatatggaaattgagtttgttggtgatcacagttacaggtctgactccatggcaaaaagcccaaaacctgaacccaaagaaagaacagcccaccaccacagcgctccaaaaacggggcccactgcacatttttctttgcaacgtcagcgatccgcacggaaacgcatcgcagccgtctaaccgaaaaggcaccggacgtcacacattcatccacgtcatcgatccgcgggacaagcctctccaccaatcagcgcccacttttacccactataaactcaccgcacccgtgtcctccttccacaccgcaatctcgcaacacatcagcacacaccgctccaaagcaaaacccacggacccgcttcccctccccgagaagaagagagaagcatccatggcgcccaaggcggagaagaagccggccgcgaagaagcccgcggaggaggagcccgcggcagagaaggccgagaaggcccccgcggggaagaagcccaaggcggagaagcgtctccccgccggcaagggcgagaagggcagcggcgaggggaagaaggcggggcggaagaaggggaagaagagcgtcgagacctacaagatctacatcttcaaggtgctcaagcaggttcaccccgacatcggcatctcctccaaggccatgtccatcatgaactccttcatcaacgacatcttcgagaagctcgccggggagtccgccaagctcgcccgctacaacaagaagcccaccatcacctcccgggagattcagacctccgtccgcctcgtcctccccggcgagctcgccaagcacgccgtctccgagggcacgaaggccgtcaccaagtttacttccgcttag

SEQ ID NO: 11873 - DNA, 2109 bp, Oryza sativa
  Clone ID: TFbOSC21552j.C1.o1.fg
atggcggctctgacggaggacatcctcctccagatcttctcccgcgtgggcagcatcaaggacctcttcaagttcgccgtgacatgccggcggtggctgcgccgcttcaccgacccggccttcctccgcgggctgtgcctggacagcggcgagggccaccgcgcgcgcctcctcggcttcttcttccagcagacgagattctatcgctgcgaaaagatgatcaagatgcgggtgacgcagcagagctcggtctgtccgcccaccttcctgccggcgccgtggtcgccgctcggcctcacggatcgcaccctcacctccttcctcgccgccgacgacgacaccttcaactacgccgagcccctcgcagcgcgctgcggcattgtcctgatgcggcttgtcccccgcaccgcgctgatgatagcgtgcagccacctcctcggcgtctgcaacccgatcaccggggaatgccacgttctcccgcctctgaatctctccggcctccatcgctacttgaccagctacgccatcatcacgtccaccgacagcgacctagatgggaagcagccgccatcatcatcatcgtcagggcgctccacgttctcgcagctgtacctcgtcgtccaacacaagaaagactgtaacgagtacttctactcctactctgctgctacgtgcagctggagcgctcccaccatgtgcgtggacggccgccgcttctccctggtgggtgagagatccgccgtcgttcacaagggcgcggcgcactggctgtttattgatcgtgtatctagcgcaacccaagatgacatactgtacaaactcaccgcggcggtggacacctcagaaatctccttgacaaggctcccctttggtgctggaggctcaccgctcctctgcgtcagtggagacggcaaactttcggtcgcttgcgtgtttcccatccacatgagagtttggactcagcaagatgacacccctgcaacgtggctccgcactgtgatcaggataccattggcggtgccttacccagactattcccatatatgtcagccccgcgagaagtggtttaacttcaacaggggatcaatgctcgtgctgtacaggagcaacggcgtcttcatcctcgacctcgagaagaaggtgatggaaaaggtcatggactgcttactgcccctattcagtgataaactgaacaggacggctgtggcgtatgagatggacttggttgagttctttgtgctccagctcagtggatacatatggaaattgagtttgttggtgatcacagttacaggtctgactccatggcaaaaagcccaaaacctgaacccaaagaaagaacagcccaccaccacagcgctccaaaaacggggcccactgcacatttttctttgcaacgtcagcgatccgcacggaaacgcatcgcagccgtctaaccgaaaaggcaccggacgtcacacattcatccacgtcatcgatccgcgggacaagcctctccaccaatcagcgcccacttttacccactataaactcaccgcacccgtgtcctccttccacaccgcaatctcgcaacacatcagcacacaccgctccaaagcaaaacccacggacccgcttcccctccccgagaagaagagagaagcatccatggcgcccaaggcggagaagaagccggccgcgaagaagcccgcggaggaggagcccgcggcagagaaggccgagaaggcccccgcggggaagaagcccaaggcggagaagcgtctccccgccggcaagggcgagaagggcagcggcgaggggaagaaggcggggcggaagaaggggaagaagagcgtcgagacctacaagatctacatcttcaaggtgctcaagcaggttcaccccgacatcggcatctcctccaaggccatgtccatcatgaactccttcatcaacgacatcttcgagaagctcgccggggagtccgccaagctcgcccgctacaacaagaagcccaccatcacctcccgggagattcagacctccgtccgcctcgtcctccccggcgagctcgccaagcacgccgtctccgagggcacgaaggccgtcaccaagtttacttccgcttag

SEQ ID NO: 11874 - DNA, 1317 bp, Oryza sativa
  Clone ID: TFbOSC413661j.C1.o14.gm
atggctcgtggcctcgccgttgcgtcgctgctgctggtcgccctcgccgtggtagcacggccgccgctcgccctggcagtgaaggattacccggccgacgcgtcggcggtggctaagaaatctccagccagtaaggctgacacgcctaccacgggtaaagaatccgtcgctggcaagaccgacgtggtcacggtggctaagaaatctccagctggtaaggcagacacgtctgccacatataaggaatacgccgctgcaaaggccgacgcggtcacggtgactaagaaatccccagccgccaaggctgacacgcctaccacgagtaaggaatctgccgctggcaaggccaacgcggccacggtggctaagaaatctccagctggtaaggcagacacgtctgccactgccacaggtaaggaatacgccgctgccaaggccgacgcgatcacggtgactaagaaatcaccagctgccaaggctgacatgcctgccacgggtaaggaatccattgccaaggtcgacgcggccacggtggctaaggaatccaccgccggcaagaccggcaagaaggctgcggcaaaggaattcacgatgtccggcaagaccaacactgaggccgacgcggccacggtggctaagaaatccctagccggtaaggctggcacacctgccacgggtaaggaatacgccgttaccaaggctgacgcagccacggtggctaagaaatctccagccgataagacgggtaaggaatctgtcgttgccaaggccgacacggctacggtgacaaagaaatccacagctggcaagaccggcaagaaggttgcggcaaaggaatcccccgcatcccacaagaccagcatggaggccgcaacaaagaaatccactgctaacaagaccggcacggagaccgcagcaaaggaatccacggtatccggcaagaccgacacagaaaccgcggcaaaagaatctacagcgcccggcaagaccgacacgacggccgcggtcaaggaatctacagccggcaaaggcgatgcacccgccatggctgagaaatccgcggcaggtccaaaggttgataagatgcggacgtgccagactggcgagcgacgtgacgtggtcacccaccacgaggagatcgacggcatgtttgagaagcttgtcggtgaggccgccaagctcgcccggtacaacaagaagcccaccatcacctccagggagatccagacctctgtccgcctcgtcctcctcggcgagctcgccaagcatgccgtctccgagggtgctaaggccgtcaccaagttcactagctcttag

SEQ ID NO: 11875 - DNA, 309 bp, Oryza sativa
  Clone ID: TFbOSC420440j.C1.o11.fg
atggcgcccaaggcagagaagaagccggtggagaagaagcccaaggcggagaagcggctgtcggagtcgaaggcgtcgtccaaggagggcggcgccggcgacaagaaggggaggaagaaggcgaagaagagcgtcgagatctacatcttcaaggtcctgaagcaggtgcacccggacatcggcatctcctccaaggccatgtcgatcatgaactccttcatcaacgacatcttcgagaagctcgcgcaggaggccgcccacctcgcccgctacaacaagaagcccatcgccacctcccgcgagatctag

SEQ ID NO: 11876 - DNA, 2721 bp, Oryza sativa
  Clone ID: TFbOSC401115j.C1.o25.gm
atggagatggaaacattgcagctgcgtgctgggacaggctgcttatgggtttgcctcctcctctgtgttgcgccgtcgctcgtggactactccatcccgctcgccagcgtgcaccggcgatcgggagagcaggtctccggaacctctgccttcgacgtcctgcaccgggagaaggcggcaataaggtttttgggaagcgcttcgtgcgactgctccctgttcaaccgcgacggttcgccttcctctccgctcgcgtgctgcacgccttcgtcgacgctcgcaaccgcaagtagttcatgccgagcaaccggtctttccgccacctcgatcagggtcaatctgtggctgacagctatgaaatgcttctgggtaagtactggcaagcctatgggcgttcttaatgctgatcagcagaaagaattcgatgaggccactactctttttgtgggatgcattcttagcgtgcttggcgatcgtctggtcgaggtgtatatgcatatgaccgacgctacggagttgtgggatgcactgaatactaaatttggtgctactgatgctagtaatgatctgtatatcatggagcagtttcatgtctacaagatggctgacaaccgttctgtagtcgaacaggctcataagatacaaaccatggctaaggaactcaaactccttaagtgtgtcttacctgacaaatttgtggccgggtgcattattgcgaaactatctccatcttggagaggtttcggtactgcactcaaacacaagagacaggaatacttcgttgaggggttgatagcgtctcttgatgttgaggagaaagctcgggaaaaagatgtcgcgtctaagggcgatggtgggcagtccagtaccaatgttgtgcacaaggcccaaaacaagagcaaggggaaatacaaagctcagcagaccaccaacttcaataagaagaagaaaaacaacaatcctaatcaggatgagaggacttgctttgtgtgtggtcaacctggccatctggccaggaagtgtccacaacgcaaggggatgaaggcacctgcaggacagacctctaagtctgctaatgtgaccattggcaacactggagatggaagcgggtatggtcgcacggggttccaccgtcctaatggggaatgggtcacatgcttctgttcatggtgttggcacggtagatctgaagtttacttcgggaaagatcgtgcagctgaagaacgtgtagcatactactggaaggaggatgtccgtagtgaaatggattccattatcgctaacgggacttgggaggtgacagagcgaccctatgggtgtaaacctgtggggtgcaagtgggtgttcaagaagaagctcaggcctgacgcctcacatggtcttctcattcatcaaatggacgttaagacaacttttcttaatgaagagctggatgaggagatctatatggatcaacctgatgggtttgtagttgaaggctttgcagtcaatgaggcagataaatatgtgtactatcgccatggtgggggtgagggagttattctgtgcttggtttgcctcctcctctgtgttgcgtcgtcgctcgtggactactccatcccgctcgccagcgtgcaccggcgatcgggagagcaggtctctggaatctctgccttcgacgtcctgcactgggagaaagcggcaataaggtttttgggaagcgcttcgtgcgactgttccctgttcaaccgcgacgagggtgatgctgcagatagggcgagcaacttgacagatgccactgttgacagcttgattgagtctatcatcattaaagatggggtgaaagccaagtttttctttaacattatgtctcttgctaactctgcaggagagaagttgcttgccttcagtcaatatatacttcccatgaaatttttggaaaggttgttggttaagaggctgggctggcatgtagggaaggagattttcatgatatctggtgatactagtgcagacgacagagaagtggcgatggatcagtttaacaactctgccgatgcaaaagttttgtttggttccatcaaggcctgtggagagggaatctcccttgttggtgcatctcgagtcatcattctagatgttcatttgaacccatctgtcacccgtcaagcaatcggacgtgcattcaggcccggacagcagaagaaagtgtttgtgtacaggcttgttgctgctgattctccagaggtgaagttccatgaaactgcattcaagaaagaagttatcccaaagctatggtttgaatggagtgagctctgcactactgaagacttcaaactgaatcaagttgatattgatgactctgaagatgaactattggaggctaatgctattcgccaggatatcaaggctttgtatagaagggttggcaagggcctgtcggcggcagcggcggcgtcgaagcggagatggacgttggcgttggcagcgaagaaggtagtggggcggaagctgggtgggccgaagaagccggtgccacgctccgtcaaggccgggctccagttcctcgtaagccgctacctcgagaacggccggcacgcgcaacgcgtcggcactggcacccccgtctacctcgctgccgtcctcggcgtagctgtggcggccgcggcgaggaggagggaggggagtagcagcagcgcggggacacccatggctgtcgcggcgacggcggcgaggtggtag

SEQ ID NO: 11877 - DNA, 843 bp, Oryza sativa
  Clone ID: TFbOSC4904j.C1.o4.gm
atgcctagcctcacctacgccgtccgattggcctcaggccgatctgtaccgtcggtcccgtggaccggcggtggaccactcatgtggtcccggtccacggtggaccggccacctcgagccgctgagatgtggggcccgcttaccggcgccgccccctcccttgatgacctcgaccctttcctaggcaccggtggtgagggtgggcatgatggagttgggtcagccggggtgtccagttgtccagctgccggattcaccgcggcgcaagaggggaccgcccactgcccgttgggggtgcgggcgccggcgccggcggatggagttgaggtcggaaccggccacggcggctccggcggcagggaagaagcagcggctccggcagcggggatgcggcgacagtctacgcggggaagaaacaccggctccggcgatggggaagaatcagcggcgccggcggcggggatgcggcgacaatccacgcggggaagaagcactggctccggcgacggggaagaatcagaggctctggcggcggcagtccacgcggggaagatctccagagaggatgcagcggcgcggcgggagatccgaaagtatcagaaaaacacggagctgctgataaggaagctgccgttccagaggctcgtcagggagatcgcacagcacttcaagcacgacatgaggttccagagccacgcggtgctggcgctgcaggaggcggcggaggcgtacctggtgggtctgttcgaggacaccaacctctgcgccatccactccaagcgcgtcaccatcatgtccaaagacgttcagctcgccaggaggatccgtggcgagaggctctga

SEQ ID NO: 11878 - DNA, 801 bp, Oryza sativa
  Clone ID: TFbOSC414180j.C1.o16.gm
atggacgacgttggcggcgggaaggtgaagaaggcggcgggcgggaggaaggccggcaggccaaggaagaaggcggtgacgcgctccgtcaaggccgggctccagttgcccgtcagccgtatcgggcgctacctcaagaaaagccggccggttgatctcctctccgccgcttcttccccatcggccgcgtcgaccctcttccacgccgcgtcgatgatgccaccgaccctcttccgcaccgcgtgcctccggaactccgtccgcttgagaacttgcacgggtaggcgggcgatcaagtttttgggtagtgcttcaagcgcgactgctcttgttcttcgcggctactgctgctgcatcggcgccttcaccaagatgtcaacggagattggagacaagaagatgaacgacatcaacggaggcaatactgccttaaaatccagcgcgccgtcgcagccgccgaaaaagggcatgaaggggtatgggtcggcgacggctgcacgccctcttcctcgcctccacctcaccaacctcgccgccgcggctgctcccgatttgcggtgcccctcgcgcgccgcccgttgtccaaggccatcacgggcatcgacgacggcgtctcgctcctcgccgacgcgccgtccgccgccaccgggaggcccgtcgccactcccgccgcctacgggaggtccgccccgcccccgcctgagggcgcgccgctacgacgtcgtcgacgagtccggcaccgacaacggcgaggagtacgacgccaccgacgacggcgagtgcgacccaaagacccaatag

SEQ ID NO: 11879 - DNA, 348 bp, Oryza sativa
  Clone ID: TFbOSC4904j.C1.o5.fg
atgcaggccgccgctcgtaagtctgctccgtgcattggaggagttaagaagccacaccgataccgtcctgggaccgtagcccttagggagatccgaaagtatcagaagaacacagagctgctgataaggaagctgccgttccagaggctcgtcagggagatcgcacagctcttcaagcacgacatgaggttccagagccacgcggtgctggcactgcaggaggcggcggaggcgtacctggtgggtctgttcgaggacaccaacctctgcgccatccactccaagcgcgtcaccatcatgtccaaggacgttcagcttgccaggaggattcgtggcgagaggctctaa

SEQ ID NO: 11880 - DNA, 942 bp, Oryza sativa
  Clone ID: TFbOSC421349j.C1.o3.fg
atggctgcatgccagcagcagatttggcaagaagggaagcagcagcagcatctgcaccacggtggctatgatgatctttcttcagtgtacagaggcacggttgtgctgccacggcggcagggcggcctggcgccggagccgccgccgccgcggccgtcatcgtcgtcggggaggagcgcggcggctcaggcgacggcgatgacgatccacagcgaggctgagaggcggcggcgggagaggattaatgctcacctggctacactgaggaggatactccctgatgctaagcaggattctgacaggaatacaattgtaaaacagaggattacaaaacacaggaattgccgtttgattggaccacaggaaaaacgcaggaatcagatgagagagatagactcagaggaaatgttccaagagatggacaaggccaccttgctagccagcgtggtgaaccaagtgaagcacctcaagacgagagccaccgaggccaccacgccgtcgacggcggcgaccatcccaccggaggccaacgaggtgaccgtccaatgctacgccggcggcgagcacaccgcggccgcgcgcacctacgtccgcgccaccgtcagctgcgacgaccggccgggcctcctcgccgacatcgccgccacgttccgccgcctccggctgcggccgctgagcgccgacatgagctgcctcggcggccggacgcggcacgccttcgtgctctgcagggaggaggaggaggaggaggatgctgcggcggaggctaggcctctcaaggaggccgtgaggcaggcgctggccaaggtggcgttgccggagacggtgtacggcggcggcggcaggagcaagaggcagaggctgatgatggagtcgcgttactcgacggcggtcgtgcacacgcacgttgatcctcaatattgctggtacaatagtcgttag

SEQ ID NO: 11881 - DNA, 1152 bp, Oryza sativa
  Clone ID: TFbOSC400522j.C1.o16.fg
atggagcaccaccacctcctgctgcaactctcgccgccaccgccgccgccgccgctgccggcggcgcacctcatgatgagcccgagcttcttcgacgccggcgtgttcgccgatgtcggcggcgactggatggaggacctcatgcatctcggcgagctgttcggcgtcggcgtcggcggcgacgatgatgataatggcggtgtcgacggcggcgtgggcggcggtgatgatcggatgcaagagtggcagaataattgcgagggcgccggctcgccggaccaccagcctagctgcggtgatggggatggcgatggcgatggcgacgtgagccctcgtgatggggagctcggcgacggcgacggcgacaactcggcgacgaggaagaggcgggaccggtcgaagacgatcgtgtcggagcggaagcggagggtccggatgaaggagaagctctacgagctccgagctctcgtccccaacatcactaaggtacgtactcagtgcttgattgctcgcgtcggcgtcgccatggcggcgccgccatgcgccattgccaacacaagcttaatgattgcttggcagatggacaaggcgtcgatcatcgccgacgcggtggtgtacgtcaaggacctgcaggcgcacgccaggaagctcaaggaggaggtcgccgcgctcgaggaggcgcgcccgatcaggccgcctccgccgtccgccgccgcgcaacggccgcagagacagccacgccgcgtggcggcggcggctgcccagctggcgagggccgcggacgccgccgccgtgacgacagcggcggcggcgccgcacggcgcgagggtggcgcacgtcggcgcggcgcaggtcggggaggggcggttcttcgtgacggtggagtgcgagccggcggcggccgcggcgagaggaggaggaggaggcgtggcggcgccggtctgcgccgccgtggagtcgctgtcgtgcttcaccgtggagagctccaccgtcgggtgctcgccggaccgcgtcgtggcaactctcaccctcaaggttagtgaagcagaggaggatgtgtcggcgatcagcgagtgcacggtgaagctctgggtgatggcggctcttctcaaggaggggttccggccgcaaccgacggtccagatctcctga

SEQ ID NO: 11882 - DNA, 795 bp, Oryza sativa
  Clone ID: TFbOSC419674j.C1.o5.fg
atggccgggcagcagccgcagcagcagggcccaccggaggacgactttttcgaccagttcttctccctgaccagctccttccctggcgccgcgccgggcggccgcgccgccggtgaccagcccttctccctcgcgctcagcctcgacgccgccgcggcggccgaggcgtccgggagcgggaagaggctcggggtcggcgatgacgccgagggtggcggcagcaaggcggatcgggagaccgtgcagctcaccggactcttcccgccggtgttcggcggcggcggcgtgcagccgccgaacctccgccccaccccgcctacccaggtgttccacccgcagcagtcgaagcagggcggagcagccgtcgggccgcagccgccggcgccgaggccgaagctaagaagagagagaatagcagaaaggatgagggccctacaggaattggtccccaatacaaacaagacagatagggcagctatgctagatgagatccttgattatgtgaaattcctgaggctgcaagtaaaggttttaagcatgagcaggctgggtggcgcgggtgctgttgcacagctggttgctgatattccactttcagttaagggggaagcaagcgatagtgggggcaaccaacagatttgggaaaagtggtcaacggatggcacagaaagacagcctgcacaatggttgacggaatttgaacacaagatgaaatggaagatgattttgatggtgatgttcatttatctccatttttccaaagtggaggcggaggctttggtcaatggaggctga

SEQ ID NO: 11883 - DNA, 1587 bp, Oryza sativa
  Clone ID: TFbOSC400961j.C1.o12.fg
atggagctttgcctcttgttggcgccgtccttgaagccttgccaaggcctgcctctcaccaacaccgccattgaagcctcatcgagctctcttaccaacgccgatctaaagcttcacctctatcggcttcggctcagcgacggaggccacaccatggggaagagggaaagaggggacacaaagcagaaagaagatgttggtctctggatcaggccattgagggggaaagaaaaggtgcgggttttggggggaggttgttcttgcgggaggccgttgatttcgccgtgtgatcggagattttggtcttcagggagtgaaaaggagatgaatgagaaggacgccactgatttggaggagaggagtgaggccagtgagcacggccaagctctgagtttccatggtggtgccatgttcttgcaagaggctcagattgcttctcctgcagctgcaaataatgcattgacctccatggcgaatcctttccctatccctcctgggttgtggaatccaccttcacacaacatgggtttaggcgaaaccagtttttcatccttgttggggatgctgtcggccggcgcgccgccaccgtttgtggctactcccgggtttgtagattccacggcggggtttccttgctacaatggaggcaatcttggagccatgatcaatcaccctttccctggtatccaccagcctttgggtgatttccaaaacggcgtcgagccatgtagggagattgaggatattgagattgaaggatccaagaatgtgtcacaaactggtgagaagcagcaaggggatggtgagacaacgcatgccgtcgattcctcctccaaggagctaagcatgccagggcgcaatggtggcgctggccatgatgaggggactagggtgtcttgttccaagaagaggaaaagatcaggacaggatggtggggtgaagcatgcagaaggtggtgagcaattagcaactgtcggttcagcgcagaagaatgaggatgatgaaaagggtgaaccaaagaggtcttctgtggcgtccgggaaatccagtgggaagcaaataaaggataatgcaggttcaccaaaggaagactatatacatgttaggagggagaagatcagtgaaaggatgaaatatcttcaggatcttgttcctggttgtagtaaagtaactggtaaggctgttatgctggatgagataattaactatgttcaatcattacagaggcaggttgagtttttgtcgatgaagctagcaagtgtcaatccaacactggacttcaacatagaacgcattttatctaaagatatttttcaatgtcgaggcactactgcatcatctgcctttggcttcttcccagacattgttcatccccgattacacccaccaaaatatacacaagttgggatgcccagcattgtgaaccccactgatgcatttggaagagtaatccatgctccattaggaactaacagtgcattcaaagaacctaaacatcagatgcccaacaatttgaatggagagttccaggacgtcattgagatgccttttactcatgaccatcatggatcaaatgatcaaccctga

SEQ ID NO: 11884 - DNA, 208 bp, Oryza sativa
  Clone ID: TFbOSC32507j.C1.o1.fg
gtccgactgcggcggcgggcggaagccagaggccggcggcggcgagaggaagaaggagcggatgaagaagatgatgcggactctcaaggggatcatccccggcggcgacaggatggacacccccgccgtcctcgacgaggccgtccgctacctcaagtcgctcaaggtggaggtcaagaagctcggcgtgcgtggctcaagcagctag

SEQ ID NO: 11885 - DNA, 993 bp, Oryza sativa
  Clone ID: TFbOSC401478j.C1.o51.fg
atgccgggggagctcaacttccacctcctccactcgctcgacgccgccgcggcggctgcctcctccaccgccgcctcggcctcctcccagcccaccgtcgactacttcttcggcggcgccgaccagcagccgccgccgccggcggcgatgcagtacgaccagctggcggcgccgcaccaccaccagacggtggccatgctgcgcgactactacggcggccactacccgccggcggcggcggcggcggcggccaccgaggcgtacttccgcggcgggccaaggacggccgggtcgtcgtcgctcgtgttcggcccggccgacgacgagtcggccttcatggtcggacccttcgagagctccccgacgccgcggtccggcggcggcaggaagcgtagccgcgccaccgccggcttccacggcggcgggccggccaacggcgtcgagaagaaggagaagcagcgccgcctgcggctcaccgagaagtacaacgccctcatgctcctcatccccaaccgcaccaaggaggatagagcgacggtgatctcagacgcgatcgagtacatccaggagctagggaggacggtggaggagctgacgctgctggtggagaagaagcggcggcggagggagatgcagggggacgtggtggacgcggcgacgtcgtcggtggtggcggggatggatcaggcggcggagagctcggagggcgaggtgatggcggcggcggcgatgggcgcggtggcaccgccgccgcggcaggcgccgatccggagcacgtacatccagcggcggagcaaggagacgttcgtggacgtgcggatcgtggaggacgacgtgaacatcaagctcaccaagcgccgccgcgacggctgtctcgccgccgcgtcgcgcgcgctggacgacctccgcctcgacctcgtccacctctccggcggcaagatcggcgactgccacatctacatgttcaacaccaaggtcacaacaaccaactaa

SEQ ID NO: 11886 - DNA, 534 bp, Oryza sativa
  Clone ID: TFbOSC415729j.C1.o2.fg
atggccgaggaggacaacctggcgctctctgtcgtctgcgagcgctcgccggggacggccgtggaggcggcgtccgggcggccgccgaaggccggcagcgagcgcgcgcgccggcagaccatgtccaggctctacgacgagctgggcgcgctgctccccaacctccccccgcgggcgtcgacgacgcggatcgtggaggaggccatcgcgtgcgtgggggagctgcgggcgaggacggcggagctcgaggcgtacagcgcggtggcggcggcggccgggcgggccgcgcgcgacggaccagccgaggtggtcgcgtccgggaagacgtcgtgcttcgccgtccggctgcgggcggcccgcgcccggccgggggcgctgacgcgcgtgctcgaggtgttccagcgccacggcgtggccgtcctcgcggccaccgtggcgcgcgacggcgaggagacggcggtcacggtcaccacggcggcggtggcgccccgggtcctggagacgatcaaggcggagatcatctgcgccgcatga

SEQ ID NO: 11887 - DNA, 954 bp, Oryza sativa
  Clone ID: TFbOSC400284j.C1.o34.fg
atggtgaaggaggaggagatcatcacagaggcagcaggagcaagaggctacatggagatgcttgggcttggagaggaggccgccgactacctgatgtgcctgtctccttcttcctacctgtcttctcctgctgcttccaccaccacagctgtggcttctcctacctgtgcctcgtacttggctcctcacccttaccaccacctgctaagcttcagtggtcaggatcagtaccacggtgatgacgtctttgggttacagtattacggcggcgatcaagtaattccggcggtggttccgcagaagtccagcccgaccaccgagtgctcctcctccgtctcctccatgtcgtcctcgccgacggccaccgccatttccagctctaagtcaccggccttcaagaagaagggatcgagaggttgtgatcagaggaaggctactgctcctgctgctgccacaaccacaaacaagagacccagggtgaggagggagaggctcggagagaggatcatagcgctgcagcagctggtttctccgttcgggaagtctgatacggcctccgttcttcacgaggcgttgggatacatacgcttcctgcacgaccaggttcaggtcctgagctcgccgtacctgcagcgcctgcctccctctgctcgcgtcccggagcaggagagaggcacgccggcggcggaggagcaaccgccggcgctgcggccgagcgacctgaggagccgtgggctgtgcctggtgccgatctcgtgcaccgagcatgtcgccggcgccggcgccggcaccggccacggcaacggcgccgacctatggtcggtggcggcgggcatggcgaaggcgacggcgaccgtgacggccgccgtggagaggagcaaggaggcagccgccgccgccgccgccactgccgcattgctgcgtgctgatcgtccagggcagcagctggcctaa

SEQ ID NO: 11888 - DNA, 1059 bp, Oryza sativa
  Clone ID: TFbOSC400996j.C1.o33.fg
atggccgacgagtggtggagtgcgtctcagaggagccacggcacgtcggcgtgctccgcggcgccgtcgccgctcacagctgacagggtctcctgcggctggacgtcccccgccgccgctgccgccgccgagtcgacgagctccataacgttccaggaccccagcaggagcagcgccgctcatcatcagcctctgtccgatgccgcttcctctcttggcgatccccacatggtggactggacgcaggccttcctgagcgggagaagcgacgctagctttcaggccgtgctccaggacgacatggcggcatccacgagaccgttccgagcccagccgacggcggccgacgaggccgtgatgaccaatccattcagggacatgggcgtgggccaaggcctgctcctcgatcaggcgtcggcgccgttgcacggcctgtcgttcgacgccggggagccagcagtggcgccggcgacgcatagcatcacgacgtcgttcggggattaccagcactcggcaagctacgacgccgcggcggcggtgatgcagttctcgcagacgccgagggcgccctcgttgccggcggctgcccagatgcagttcttgtccggcagctaccagctgcctttcggcggtgcgccgccgctgccgtcgcagcttctcttgcaggccatgcagcccaagcctagctgcagctctaacgctaacaccctcctggcgaaggtgaggaaagagaagctaggggacagaatcactgcgctccagcaactagtctcgccttttggaaagactgataccgcatcggttcttcacgaggccatcgaatacatcaagttccttcacgaacaagttgcgtctttgagctctccgtacttgaagaatgggaacccattgcagcacttccagcagaagggttctgagagcacgaaggacgcagagcagccgaagccggatctgcgcagccgaggcctgtgccttgtgccggtggcaagcacttatacggtggcgagcgagacggtgccggagttctggcacccaacattcggaggcacgtttaggtag

SEQ ID NO: 11889 - DNA, 972 bp, Oryza sativa
  Clone ID: TFbOSC900243j.C1.o6.fg
atggcggatgagcatgagtggtggaatagcccttgctctgcgcgcaccggcgacgacgaagccgcgtgctcgacggcggacgccgatgagtcagcggttgggagtactccgatgagcttcggccatggcggccagcctgctagtttatctgacgccgccgcctcctcgtcgtcgtcatcgttccttcttgccggacaacacatggattattggacgcaggacttcatgggaggtagagcagcggcagcggccaccgcgagcttcgacacgctgctccagctccagctccaaggcggcgacgcggcgagccgccgcttgctgctcggcgaccacgccgcagcgccgccgcgtcacctcgtcgtgccaggggcgccctacggcggcggcggcggtgatgacacggcggcgccgccgcgaggcttgtcaccgacaccgtacgaggcggccgacaacctgcagcagcagcaatcgttccccggcggccaccacgtcgtctccaacacggatcgcctccatgatcatcatcaggacgccggctcgccgtcgccggcgacgagaagctctcctggctcgccggcggcagcgaagaaaccacggatcgaggcgccgtcgccgatgccgactttcaaggtgaggaaagagaagctcggggacagaatcactgcgctccagcaactcgtctcgccttttggaaagacggataccgcatcggttcttcacgaggccatcgaatacatcaagttccttcacgatcaagttgcctctctgagctcaccgtacctgaggtgtgggcgccctgtgcagctacaacaccaacagggttcccataaggtgaatggtaactgtgaggggaagcagctggacttgcgcagccgaggcttgtgccttgttccggttgcgagcacttatactgtggccagtgagactgcgacagagttttggcaccctacctttggaggcacatttcggtag

SEQ ID NO: 11890 - DNA, 264 bp, Oryza sativa
  Clone ID: TFbOSC4514j.C1.o1.fg
atgtcgagccggaggtcgtcgcgctcctccgtgtcggaggaggagatcaacgagctcatctccaagctccagtccctcctccccagctcccgccgccgcggcgccaaccaggcgtcgacgacgaagctgctgaaggagacgtgcagctacatcaagagcctgcaccgggaggtggacgacctcagcgacaggctctccgacctcatggccggcatggatcacaacagcccaggcgccgagatcatccgcagcctcctccgctag

SEQ ID NO: 11891 - DNA, 822 bp, Oryza sativa
  Clone ID: TFbOSC407994j.C1.o7.fg
atggtgcccagggacagggtgaatgccgctgccgctggtggcggcggcgaggggaggctggtccagagcggtatagtgaacaagaagtgtgataagaaggctccaaagagaatccataaatcagagagggagaaacttaagcgggacaagcagaatgacctctttaatgagctgggaaacttgctagaacctgacaggcagaacaatgggaaggcatgtgtactgggtgaaactacacgaatactaaaagatttactttcacaagtggaatctctccggaaggagaatagttcactgaagaatgaatctcattatgttgcattggagagaaatgaactgcacgacgataacagcatgcttcgtactgaaatcttggagcttcaaaacgagcttaggacgcggatggaaggcaatcctgtttggagtcatgtaaacaccagaccagctctcagggtaccttatccgacaaccggagtgttcccagtacagcacctgccacatttaccagtcaccacgacggcagcatttcctcagcagctaccggttatcatcgagcagcactatgccgccacgccaagagaacttcagctcttccctgagtctgcgaccagcgaagacagcgaaccgtcacaagaacacgggatttctgaccatgtaacacggcctcagccaagtaaggacgcttggcaaaatcggtcccgtgatgctcccacggtggccgcgcgtgaatcgtctctcaaccgtaaaattgggtataaagtcactctattcgttctcaccgttttttcggagatgggcaagtctttatactcggttttgtga

SEQ ID NO: 11892 - DNA, 1314 bp, Oryza sativa
  Clone ID: TFbOSC401215j.C1.o9.fg
atgggggatcatcagatgatgcacgcagctccggcggcgatgtacaacggcggcggtggtacgacgagctctcatggcgtgtggtggagcaacgcggtgggggtaccggcggcggcgacgtgctcgacgacgacggagctcgccgggtacaccgcctggtcgtcggctctggccgctggatacgatggcatggtagctgacaacggcggcaagcaggcgaagagcaccaccacggcgtcgtcggagtcgcccggcaacaacagctcggtgaccttccaagagccggcgagcatccccgacccggccgccgtcgccgccgtgccgcagccggggctcgccggcttcaccgactggacccagcctttcatgaacaacggtgctggtctgcatgagtttctgcaagatggccaccatgacatgagcgcgtcgagcttgatgaatcactcatcaaataacctagcactgcagcaagcaggtcaccaccacgagctgctgtccagcttcggctcagacctgctcttgtcgccgacgtcgccgtacggcggattccagtcctcgctgctgaggagcctcatggagccgacggcgaagcagcagcagcagcagccggctttggctggactccagcagtatcatcagtaccagcagcagatgggacacgcaccagcagctgctgccaagttcgcgcaggcagttggggccagggattcactccagttcaccaacgacgcgccgttctggaacccttctgccggattcggcatgccggcggctgtggcggtggcggcggcggcggcgcaagatcaagctagcgttcgctctgccaaacgctcgtcgccggcgccgccgcgtgcggcagcaacccttgcattaaagactgctatggaaggagtaggggactctagctcagtgatcaccaagaaggagacagcgttcaagaaaccgagactcgagacaccgtcgccattgccgaccttcaaggttaggaaggagaagctaggggacaggatcacagcgctccaacaactagtctctccttttggaaagacggataccgcatcggtgctccatgagaccatcgagtacatcaagttcctgcacgaccaagttggtgctcttagtgctccatacttgaagaacggtgcccatcaagtgccccacttgaagaactcaagtcctgacaagtccaagcacggcgagatatcactgaagggccgggggctttgtctggtgccgatatcgagcacgttcgccgttgccagcgaggtgcccgtcgagctgtggactccatttggtgccaactttattaggtag

SEQ ID NO: 11893 - DNA, 1593 bp, Oryza sativa
  Clone ID: TFbOSC401217j.C1.o16.gm
atgccgcggcgcgcgagggcgaggggcggcggcggcggcggcggggaggaggtgaaggtggaggatgacttcatcgactcggtcctgaatttcggtggaggtggtgggggagaggaggacggcgacgacggggaggaggagcagcagcagcagcaggcggcggcggcggcgatggggaaggagttcaagtccaagaacctggaggccgagcggcggaggagggggaggctcaacggcaacatcttcgcgctcagggcgatgagcaaggaggccaccttgtcggacgcgatcgaacacatcaagaatctccagaacgaggttcttgagctgcagcgccagctcggcgactcacccggtgaggcttgggagaagcaatgcagcgcgtcctgctctgaatccttcgtccccactgagaacgcccattatcagggtcaggtggaattgatctctcttgggtcatgcaagtataacctgaagatcttctggaccaagagggcaggcctcttcaccaaggtgctggaagcactctgcagctacaaagtgcaagtgctcagcctgaacaccatatccttctacggctacgcagagagtttcttcaccatcgaggtgaagggtgagcaggatgttgtgatggtggagctgaggagccttctctccagcattgtggagggagaatacagtggtgggctctttggacacccggtgatggatcacgcggagctgaccaccgagcaggttctcaagagggatattccatgggaatcatacatggcaaataagctgatttccgggacatgccttcagcttttgcgacgttatgaccacaaaccagaaagccaacgaggtcctttgcttgatgaggatgggccatcctatgttcgagtgttcctgaatatcttgcggaacatctccaaggaagatactgttgaatatgtgcttgccctgattgatgagatgcttgcagccgttgattatttgtccactacaagggttatgccaagacttgtagaggttgtgaaaggttcaacaaaagagaaggttgtcagggtcgttatcatgtctatccgtaacttgcttgcaaagggtgcgtttgctgcccaaatgattgatcttggactgccacacatagtacagaatttgaaagctcaagcatggactgatgaggatttattagatgcgctgaatcagctagaaataggactcaaagacaaccttaagaagttgagttcatttgagaagtacaagcaacaagttcttcttggccatcttgactggtctccaatgcacaaagacccaagtttctggcgcgagaacattaataattttgaagaaaatgatttccagattctacgtgtgcttatgacaatcatcgacacatcggccgacacgactgctcttgctgtcgcctgctatgacctctcacagttccttcagtaccacccttctgggcgcattgtggtggcagatctgaaggcgaaggaccgagtgatgaagctcatgaaccacgagaacgccgaagtgaggaagaatgccctgctctgcgtgcagaggcttttccttggtgcgaagtacgcgagcttcctgcagacctaa

SEQ ID NO: 11894 - DNA, 912 bp, Oryza sativa
  Clone ID: TFbOSC401884j.C1.o3.gm
atgccgtgggtgcgcttcctcgtccggttggtcgtcttcttccgcgtcatcgtgaggagtagcagcgagacgagcgccgccgacgcggtgatgagaagtggcgccatcgcgtactaccacacgctgaccaaggtttgccagaagaagatgcagggagaccacgggtactacggcgggagggactcgccgccgcaggggtacggctacggcggcggctacggctacggaggcgggtatggctacgacgccggtgggtactactccggcggcggcggcggctacccgtcggctggggcggcggcggcggcgtacgaggacccgatggtcgggaggaggacgcacgacttcccggcgccgatgaacgagctggagttccagccgtcggccacgtgccccaagaactacgtcatcttcgaccagacgtgcaccaagagccgggtcatgttccacccctcgctggcgcacaagttcggcggcgggtcgtcggcgtacgacaacaacgtgtacggcggcggcggagcgcacgacgccgccaagggcgcgtacagggacagcgtcggctacgacgacgacgacagctgctcggtgcggcagaaggaggacacggacgagatcgacgcgctgctgagctcggaggacggcgacgaggacgacgtggtgagcacggggcgcaccccggggtaccgggacggcagctccccggactcgacgtgctcgtccagctacggcggcgggcaggcgaggcccgggcgcaagaaggagcgcatgaagaagatggtgcggacgctcaagggcattatccccggcggcaaccagatggacacgccggccgtgctcgacgaggccgtccggtacctcaagtctctcaaggtcgaggtcaagaagcttggcgtgcgcggctccgacaactga

SEQ ID NO: 11895 - DNA, 1089 bp, Oryza sativa
  Clone ID: TFbOSC401860j.C1.o50.fg
atggatcaggagaaggcggacggcggcggcaggaggaggaggagcagggcgacgagtagcagcggcagcggcgcgagcagcacggcggcggcggcggcggcggagaggaaggagatggagcgcaggaggcggcaggacatgaagggcctctgcgtcaagctcgcctctctcatccccaaagaacactgctccatgtccaagatgcaggcggcgtctaggacccagctgggcagcctggacgaagcggcggcctacatcaagaagctcaaggaaagggtggacgagctgcaccacaagaggagcatgatgagtatcacatcatcgcgctgccgctcaggaggaggaggaggaccagctgctgctgctggccagtcgacgagcggcggcggcggcggggaagaagaagaagaagatatgacgaggacgacggcggcggcggcggtggtggaggtgcggcagcacgtgcaggaggggtcgctgatcagcttggacgtggtgctgatctgcagcgcagcgaggccggtcaagttccacgacgtcatcaccgtcctcgaggaagaaggcgccgacatcatctccgccaacttctccctcgccgcccacaatttctactacaccatctactccagggcctttagctcaagaattggcatagaggcttcgaggatttctgagagactacgggcattgtatactgctcttgcaacgtggagtaaggacacatatatagctccaacttctaagtttggtgttgggtctggagtggagttgagctctccatgggtgccggtgtggtcggatgcggcggcgggtggtggcggtggagatgcgagatccgaagaccggtggatgaatcgacggaaaaggctggttccttgcggcggcggcggcggctacatcgtcgtcggcaatcgggagaagccggctccttgcggcggcgccagttgcttcgtcgtcggcgtccgggatgtcactgtcctgatgaatcgacagaaaaagctggctccctgtggcagtgtcagtggcttcgtcatcggtgtccgggaggtcgctgccccgttcctagagacggcggcggcagcttcttga

SEQ ID NO: 11896 - DNA, 797 bp, Oryza sativa
  Clone ID: TFbOSC403865j.C1.o1.fg
atggagtcgtactacggcgcgttccacgccgacgaggccgcgttcttcttcccccaccacgtgccggcgtcgccggagctgccgttcggcctcattgcgtcgccggagccggagccggagccggagcaggcggcggcggaggcgaggcagagcgcgttccaggagtacggcggcgcggtgcacgccggagcgccggcggcggcgggggctgtcaccaccggtgggacgaacatccaccggagggtgatggacgtgctgggcaggatgggcggcggcggcggcgggggggagaagggggagggtgaggagatggaggaggaggaggaggtgccgcagcggcggcggcgcgggcagggcgccgacgtggagagcagccgcggtttccgccacatgatgcgcgagcgccagcgccgcgagaagctcagccagagctacgccgacctctacgccatggtctcctctcgctccaagcttcagaatgttcgaaatccccctttaatacctcttaaatggagtgtttaccaaaatcgggctgacaaaaaaccgttcgtgtcactgcagggggacaagaactcgatcgtgcagtcggcggcgatctacatccacgagctgaaggtcgcgagggaccagctgcagaggaggaacgaggagctgaaggcccagatcatgggccacgacgagcagcagccgtgcgtcacggtgcagttcgaggtcgacgagccgtcgtcgtcgatcgactccatgatcgccgcgctccggcggctcaagggcatgagcgtcaaggcgcgcgggatccg

SEQ ID NO: 11897 - DNA, 1080 bp, Oryza sativa
  Clone ID: TFbOSC401860j.C1.o28.fg
atggcctcctcctcttcctcctccagcctctgtgataatcatctcttgcaagatgacctgatcccatggccttccatgccctttgctcctgctcccaacacctttggattgaaccaccaatggagccagcctccaatgctaagcagcagtactgatcagttaagctcatatgagcttgaatcactccaatcagttgaaagtcagctggcagctgctgctcctccgacattaagcccccatctgcaggctcatcaactcagcacggtgctaatgatgcaggagctagggttccaatggagcagctgcgctgcgccagcagatcaacatagtattgcaagctccacgaataataatagtaatgtgatgatgaacgaggaggagctacggccacgtcctgatcaatccctaatcagcaatccaaggtcatgcagcgccaccacgcttcttcctccgccgcatctacatctggacggcgctgtgctcccgagcatcaacgtctcgcggctgcagaagctggccgccggcgatgagccgctgcagatatgttgcaagaggcaggctgctgctgctgcagtggtcggccatagcagcataagagatgagcatgtgccctgcccctatgctggccctcctgctcatctaattcaaggaccatccaacaccctgcagcttttaagggtgacatgcgtcatctttttgccccaaaaagtactgatgaagaggaatacgaatgcagcagctcaagggagaggtggccgccatgggagttcaacggagcacagatcatcaacagcgctgccgccatcgtcaaagaagccccggctcgagtcacactcctcctcaatgcttccttcattcaaggtaaggaaagagaaactaggggatagaattgccgcccttcagcaactggtctcaccctttggtaagactgataccgcatcggtactcatggaggccatcggttacatcaaatttcttcaggaccaagttgagactttgagcggtccatacctgagatcatccaagaacagcaagaaattagcctgcagggcagcacaacaacaacgggtaaaaagataa

SEQ ID NO: 11898 - DNA, 1608 bp, Oryza sativa
  Clone ID: TFbOSC400570j.C1.o4.fg
atgattgttggggctggttactttgaggattcccacgatcaaagtctcatggcaggatctttgatccatgactcaaatcaagctcctgcaagcagtgaaaacacaagcattgatttgcagaaattcaaagtgcacccgtactcaacagaagctctctcgaatacggccaatctagctgaagctgcaagagcaattaaccaccttcaacatcaactagaaattgatttggagcaagaggttcccccagtagaaactgcaaactgggatccagctatctgcactataccagatcatatcatcaaccatcagtttagcgaagatccacaaaacatattggtggagcaacagatccagcagtatgattctgcactttatccaaatggtgtttacacacctgcaccagatctccttaatcttatgcagtgcacaatggctccagcattcccggcaacgacatccgtattcggtgacacaacactgaatggtactaactatttggatcttaacggtgaacttacaggagtagcagcggttccagacagtgggagtgggttgatgtttgctagtgattcagctctccagttagggtaccatggtactcaatctcatctaataaaggatatctgccactcgttgccccaaaattatgggttgtttcccagtgaggacgaacgagatgtgattattggtgttggaagtggagatctttttcaggagatagatgacaggcagtttgatagtgtacttgaatgcaggagagggaagggtgagttcggaaagggcaagggaaaagctaattttgcaactgagagagagaggcgggagcagctaaatgtgaagttcaggaccctaagaatgctcttcccaaatcctaccaagttcatcagtatgatgttctttactgataacagtgccatgttattaagggttgttttggttttaagccaaattatgccctaccaaattgttggcattttgaaaagttatttggcaaagtttggcttgccaccaaagttggtcaagttttggcactaccaatatattgacatggtaacaaatcaaaacacccctaattgtgttcatcctaaccaaaatgacagggcctcaatagtaggtgatgccattgagtatatagatgagctcaatcgaacagtgaaggagctgaagatcctggtggaacagaagaggcatggaaataacaggagaaaggtgttaaagttggatcaagaggcagccgctgatggcgagagctcatcgatgaggccagtgagggatgatcaagacaatcagctccatggagccataaggagctcatgggttcagaggaggtcaaaggaatgccacgttgatgtccgcatagtggacgatgaagtaaacatcaagctcactgaaaagaagaaggccaactctctgcttcatgcagcaaaggttctagatgagttccagctcgagcttatccatgtagtgggtgggattataggtgatcaccatatattcatgttcaacactaaggtatcagaaggttcggcggtttatgcatgtgcagtggcaaagaagctccttcaagcagtggacgtgcaacaccaggccctcgacatattcaactaa

SEQ ID NO: 11899 - DNA, 885 bp, Oryza sativa
  Clone ID: TFbOSC401768j.C1.o7.fg
atggcgacgggattcgtcgtcgtcgtcgccatgtgtcagctcgctggcgtccggatcacccaagtgtgcgggaaccagaatctgggcatggtggctgacacggagagctcggggtcactgggtggcagctcaaatgctgcttctgacaaggctgttgatgggtctcttgacaaaagatctcaggaaaaggctccaaagaaaactcataaagctgaacgagagaaacttaagcgtgaccagttgaatgacctttttgttgagctcagcaatcctgaacgacaaaatagtggaaaggctactgtgttaggtgatgctgcacgagttctgcgggatcttgtttctcaagtagaatctctcagaaaggaacagtccgctcttctaactgagcgtcaatacgttggttcagagaataatgagctgcaagaagagaatatcatgctcagagcccaaatattagaactgcataatgagatttgtgcaaggatgggaaacaaccacctcaatcaaagcaatcttgcgatgtcacaaccagtagccaacaatggcagtaactcagcaactcaacccgttccacatcacatatggggcaatggtccgaatttagctatggtgcacccaacaaacacattatctccgttgcacaatcagcaccatcagtctgctggtgccagccaggtttatgcgtcacggcctcaggagctgcagctctttccagggacctcagtatcaacagagcgagaacgatcccgagctggaagtggaagcaccccggctacttcttcaggcctgacggattctttgccagggcagcttcgcctcagcctcccgcaatcttctcaagaagaaaacagcagcggcagcaagaaaggtcgaaaaaagggctag

SEQ ID NO: 11900 - DNA, 1296 bp, Oryza sativa
  Clone ID: TFbOSC418704j.C1.o1.fg
atggcgagtaaaaaggcgagtcctatcctctatctctctctctctttctgtgggccccacgctataggtgaaagcgagagaaactattcagctaaccaaattttcctcttaatgcagtctctgaagtttgggattgaagatctggttgctggcattgctgtttgggtttctgtggttgcctggcaattctttcaaggagaacgggcaggagtactaatggtgtggcaaccggtggctcagacgagattccgcgtgtttaaacatgagaatggaatcgctgtgagagttatagcttgcttccagccatcccaagattgccagaagatcctgtttgctggttgtttcttgatgggggagaaggttaatccctggtgccattggtctaatcccccatggaccgagagctctgcaaacaatctccacccacccgatgttagcctcgacaacacaaattcagtggcgttgccaacatatctgaacagcgatggctacatttattctggagttgctgcatctatgccgtctattgcagcatcagttactgacagacctgtttcattctcttctagatttgtcacaacattggtacccagtgtaggcttatcaacagctgagacactgagaaagagacctctggttttctttcataatgtgaataataccttcactgtaggtcctctcctgagcaaggggacattggatacagttccagagctccaaggtagcaatgagaccaatgtaactgatgttggagcacaaaatactgagtgtatgcatgagaatactgaggagattgatgcactcctgtgttccgactcagatgaagggtgcttgaaagtgcaagaactcaacaacagagtcaggaaatacccaatgcagaatgacaccatgagtgtggagtcggtagcaagcgctggtgcttcccaaccagcaaagaaaagaagactaagctctggtaccgacagatctgtggttgacacagccagctcagcaaggcctgaccactccgttgatcagaaacatctcagccatgacgacgacgcacagtcgtgttgtattggtgaagtggaaagcgatcaccagtttgctctgagggaaggtgaagaagcagaaggtgatgatggccccgatgatcggaagcggagaagagagaggatccaagagactgttgctgcactcagaaagatagttcctggaggcattgccaaagatgccacagccgttcttgatgaagcgatatgctatctcaagtatctaaagctcaaggtcaagacactgggagctgtttccctctag

SEQ ID NO: 11901 - DNA, 789 bp, Oryza sativa
  Clone ID: TFbOSC402160j.C1.o8.fg
atggtgccgtcggagaggggggacgtcgccaccgccatcagacccgccgctgccgacaagctcgtccatgggcctatctctgacaagaagtgccggaagaaggtcccgaggaaggttcacaaatctgagagggagaagcttaaacgcgggcatctcaatgatctgttcggcgagctgggtaatatgctagcatctgatcaaatacaacaaccttctgcagaagcggataggcagagtaatgggaaggcatgcatactaactgacaccacccggatcttaagagatctgctttctcaagtaaaatctctccggcaagaaaacagcaccctccagaatgaatctaattatgttacgatggaaaggaatgagttgcaggatgaaaatggtgcgctacgcagcgaaatctctgacctccaaaacgagctgaggatgcgtgcgacagggagtccaggttggggccatggcgcgactggatcacctctccccgttcctccctctccaggcacggttttcccatcgcagcagccaatgcagccatctcccatgacaacaagcacagtgttccccttgcagcagccactgccacaaccaacagtcattgagccctctgcaagacagccactggaactgaagctcttcctagaagcaccccccgccgaagaccctgaaccatcagaagaccaggaggctccgaacaatgtggcacgaccgcagccgaggtacccaacagaggcatcttcttggcctattagcctgggacttccaagaatggaagatgagcaaatgtag

SEQ ID NO: 11902 - DNA, 1404 bp, Oryza sativa
  Clone ID: TFbOSC401495j.C1.o1.fg
atgtacggcggcggcgcggcagcgggtggtgctacgacgacgacggggagccacggcggcggcggcggcgactggtggagcgccgcggtgtcgtcgtgctcggcgccggcgccggagacgatgcaagggttcggcggctggtcggccgcggtggtggccgtcgacggcggtggcaacacgtcgaggtcagctgctggtaacactgcttcgtcggagtcgcctggatcgctcgccaccggaagctccatcactttccaggagcccgccggcggcgtcgccgacccggccgccatcgccgtgcacgcgcagacggtggccggcggcggcggcggcggctggaatcagcagcctttcttggatgggagtggtttccatggctacatgagctcatcaagaaatgatcaccataccaatcatcatcatcatcagatcaacacgccgagtttgatgagcaactcatcatcaaataacggcgtgatgctgcaagagcaccaacatgaccagaattaccagttcctctccaacctcggcttcgagctgctctcgtcgccgacctcgccgtacggcggcggtggcggcttccgctcctcgctgctcagaagcctcacggagccggcggcggcagcgaagcctaatgactcgccggggtttcagcagtatcatcatcatcagccggcgatgaacctgcagccgccggccgccgccgccgggagagagccactgcagttcaccaacagcacggcggcgccgttttggaacccttcctccaggttcaccgtcgcggcggagggtacagcactaggtggtgccggagcatcgccggcgcagcctacgccggcgagccttgcagctaagagggcattagaaggagtaggagactccagctcaatcatcacgaagaaggcgaaggctgattccacgccactaaagaaatccagaaccgggacgccatcgccattgccgacgaccttcaaggcatgtgtctacatatatataatatttaatttgtcccaaatggtgattgatttccttccaataaagttccatgtgaggaaagagaagctaggggacagggtcacagcactccaacaactagtctccccttttggaaagacggacacggcatcggtgctccacgagacaatcgagtacatcaagttcctgcacgatcaagttggtgcacttagtgctccttacctaaagaacaggcaacaagtgccccacttgaagaactccaccggcgtcgacaacgatggcggcggcggcggcggcgaggcgacggcggctagcaagagagacctcaccggaagagggctgtgcctggtcccgatatcgagcaccttcgccgtcgccagcgagacgccggtcgatttctggacgccgttcggtgcagccttccggtag

SEQ ID NO: 11903 - DNA, 303 bp, Oryza sativa
  Clone ID: TFbOSC18429j.C1.o2.fg
atgtcgtcgagccggcggagccgtacatcgtcgagattggcggcggcgccgccgccgacggatgagcagatggcggagctcatctcgaagctgcaggccgtcctccccacccgcggcggcgaggccaatgccaaggcgtcaagtgccgaggtgctgcaggaggcgtgccgctacatccggaggcttcaccgggaggcggacgccctcagcgagaggctcgccgagctcctcctcctccagccgtccgatctcgccatcaacggcgcagatgtgcccgacctcatccgtagcctactcatgtaa

SEQ ID NO: 11904 - DNA, 1053 bp, Oryza sativa
  Clone ID: TFbOSC401762j.C1.o12.fg
atgtctcaagaaggagccgacctctctcaagatgtcgatgaaagcccatatcacaccgccgttgtcaccaccaataatctggtaaggtcgattaaagcagagaaatctaactctagctctagctccggcaagcctgtcgagacagacatcggtttaaaggtagcaagccctactatgtttgggttcaacacaaagatagagggaacgggaaagaacatggccgtcaagagagaggaaggagaaggtggtggtcgtcctggcgtcagcagtggtgtcagcacacgggataccaacggaaaaggcaagaacgctatggacatggagcacgcgttgcatatttggacggagagagagcggaggaagaagatgaagaacatgttcagcaccctacatggcctcctccccaagatcccaggcaaggttgcaaatgcaattgagaagttctatatatccttgatttaccaggatttgactgacaaggcctccattgttggggaggccattggctacatcaagacgttggaggacgtcgtccagaagctggagaccatcaagacggagcgcgtgcgcgcgcaccagtgggcggcggcggcggcagccgccgtggcagccaacggcggcggcgaggggtcctctcactctcactctcagccgccgcgccacgccaccgccgtcacagtcgccgtcgccgagcctgcgccggtggcggcggcggtgaacgcgcaggcgccgcagaagaaggcggcggcggcggcggcgccgacgctgcagacgtggtcggcgccgaacatcacgctgacgatggccggcgtggacgcgttcatcaacatgtgcctcccgcggcagagggcgtccttcaccacggtggcgttcgtcctggagaagcaccagatcgacgtcgtcacctccaccatctccgccgaccatgacaagagcttgttcagcgtccatgtccgcctcaacgaagcatcccttcagagcacagagggtctgacgcctgaagccaaatacaagctcgcagtgtcagagttgatggtcaggctcgccgaatga

SEQ ID NO: 11905 - DNA, 333 bp, Oryza sativa
  Clone ID: TFbOSC401615j.C1.o29.fg
atggttgcacacgccaccatcaacaatggccgttgcgacgccgcgccggcggcggcggcgaagtcgaggccggcggtgatgccgccgccggcgagtaatcatggggcggcctgcaagaactccggtagcaacaaggagaggaggaggatgaggcggtgcgtggaggtgaggaggaagatggaggcgctgaggagactcgtgccgggcggcggcggcggcgaggattccggcgaggagctcctgttccgcgccgccgactacatcgcgcggctgcaggtgcaggtgaaggtgatgcagctcatggtggacgtgctggagcaaacgaaagattga

SEQ ID NO: 11906 - DNA, 1189 bp, Oryza sativa
  Clone ID: TFbOSC401232j.C1.o30.fg
gcatcgacttcagaaacagcagttatgtagatggatacgccatgatgatctggacatgctaaccgatgagctagaaaggaaacgataccgaacattgatactcatggctgacacatttctggctaacgatttgcgtcagtttccctctgctaaacgtaaagcttctctttatacgtcaacacttgcaaacattttcatcttgatgttgaagggttctactggcattcagttattatcattattttctggttacatgaaagacgacgtgtcatcagctgttgagactcagcttgcagaatcttgtcgcctcgagagtggtgttgaaacctgcaggcttctggtttcttcagttgcagtgaaatgcgaagcgtctaattcaccttccacaactgtaggctttgacagaatgatcgccgcggactatgacctgttccatcacatgagcttctcgccgtcgcttcagaatcttcagtcaccaacgtttttcaccacgagaagttcagagagctacttgggagagagctcgatctatggcggaggcgccaggcctgcactcgcgcagttcagctattcccagccaattgctgctacttctgctgctcatttggtgagatggacggcggccggggagccgatgaccggcgacggcggtttcaggagctccaagaggctcaagacagcaactacggcgacgacacaacctccaaggcatggggtgaagtgccatgcaaagccaagaaatcaaactacgaaggcaacatgtaagaagaggagccagaaactgggcgacagaatcacagctctgcagcagttagtttcaccttacggcaagacagacaccgcatcggtgctccacgaagcagccgcctgcatacggcaactccaccaacaaatccagattctgacagcgccttaccctggaacaagctcctcctctgcatcgtcgcagcagcaggtcgtattttctgttcttgaaagttgcagccatgtcatgtccttctttactgcaattgcaacagttttgtggctgcaggatgccggaggaggaggaggcacggcgacggagcttcgccggcgaggcctgtgcgtggcggcgctgtcgccggccgtcgtgagcctcgcggcagagggcggtcgccgccgcacggacgtcgaggatcagaagaggatctggttcagtaatcagtag

SEQ ID NO: 11907 - DNA, 561 bp, Oryza sativa
  Clone ID: TFbOSC401860j.C1.o53.fg
atggagcgcaaggatgtggagaagaatcggcgcctccacatgaagggtctctgcctcaagctctcctccctcatccccgccgccgctccccgccgccatcaccaccactactccacctcctcctcctcatcgccgccctcctccaccaaggaggctgtgacgcagctggatcacctggagcaggcggcggcgtacatcaagcagctcaaggggaggatcgacgagctgaagaagaggaagcagcaggcggcggcactcaccaccagcaccagcaatggcggcggcggcgggatgccggtggtggaggtgcggtgccaggatgggacgctggacgtggtggtggtgagcgaggcgatcagggaggagagggagagggcggtgcggctgcacgaggtgatcggcgtgctggaggaagaaggcgcggaggtggtgaacgccagcttctccgtcgtcggcgacaagatcttctacactctccactcccaggcgctctgctccaggatcggcctcgacgcctccagggtctcccacaggctgcgcaacctcctcctccaatattaa

SEQ ID NO: 11908 - DNA, 3366 bp, Oryza sativa
  Clone ID: TFbOSC900050j.C1.o1.fg
atgtcccgtgattttttctctttcgccgtggatccatggctgcgtcgcctaattcggcaaaagccgcgtcggtctcgtgttgctcgcaacgcagggaacaaggcgacgacgcgcgagcacgacttcctctcgctgtacaccaccgccgctaaggatccgtctctccagctccacgacgccaagccgccgcctccttcccaaggtttcttcctgaggacgcacgacttcctgcagccgctggagaagccgacgccggcgccgacgccgcctccgacgagccagctgcagcagcagcagcagcaagcgttccccggcggcatcggaacgttcagcatcagccacgtcgccggcgcacgcccggtcgcggctgccgtcgtcaaggccgagccgacgccgttcgttctctggggccagcccgccgccgccgccgccgcgcacccggtcgccgcactagggcaccaccaccaccaccaccagtggacgctccccttcgccggcgtcgggcaggtggccgccaccgcggcgaggcagcagcaggagtggaaggggcgagtcgggggaggcgggttcatggactctggctccagatccagtggcggcgccgggttcgacgacgacgatggcgtggccgcgcggcgtgaggtctcgtcctcgctcaaaggtagtgtttgtgtagcagagaggaggagggagggtaggggggaagaagggaggaggaggtcgcgtgagctcatggagatggagatggagatgtactcgcggtgcgcgcggccatcccacatccaccagctgcatgcgcgcctcgtggtctccggccgcctccgctgcacctcgccgtcgctcgcgctcgcgctgctccgcgccgcgtgccgcgtgcgcgcgtcgccgtgcctgcgtcccctcgcccaccacctgctcgaccatatcccgcgcccgcacccgcatctgctccacgcggccgctcgcctcgcgtaccgtctgcgcctgccttccctcgcgctccgccactatgtcgccctccgcacgcaccacccggtgttcctccctcccgcagcggccatcgcggacatgctcaagtctgtccgtggccgcgccgcgcatgcccacgcgctacgcgtcaccgcccacgcaggggacactaggttcctggataacacacttgtcgcgatgtactttgcctgtggagatgtccagcgcgcacggcttgtgtttgagggaatgtgtgaccgggatgtcatctcatggacatcgctaatctcaggactagtgcaaaatggcagccccttgcaaggtatacagcagtttgcaacgatgatgcactgtgatgtacgccctgactttgtggtgctagtgaccgtcgccaaggcgttcatggagcttgataacctgccaggtgctgaatcagctcattccttagttgtcaagggcggtttccatgatgaacaagatgtgatgatcacattgacagccatgtatgccagctttgggtgcttagtagctgcgagggcgctttttgacatggtcccaccccagcaggtgaatgtgatcctgtggaatgccatgatatcaggttactccaagaatggatttgccagtgaggcagtgcatttatacaagcatatgcagctggttgctaggaacttggctcccgattctatcactttgcgatcagtaatatttgcatgtgctcagcttggctccactgagcttgcggcatggatggaggattgtgtatgccgcagtgagtacagggaggatgtgcttgtgaacacagctttgattgacatgtatgccaaatcagggagcatctctcatgcacgtgcagtctttgaacggatgcatgtggatgaccgtgatgtggtagtctggagtgctttaatcacgggttatggtgtgcaaggccttgtcaatgaggcttgcactttgtttcaggacatgaagcttgctggagtaagaccaaatgacgtgacattccttggacttctatcagcatgcaaccatgcaggtgctgttgagaaaggatggagctactttcactctatgaaacctgactatggaattgagccccagcaccagcactatgcttgcgtggtagacctgctttctcgtgctggacagcttgatagagcctaccaatttatactgaatatgcccatcaaaccagagatgactgtctggggcgctttactccatggttgcaagatgcacgggcactcaaacatggccatggctgaatgcgcagcacagcacatttttgagttggagcagtccaatgcagggcactatgttcagcttgcaaacatgtatgcatctgcagggatgtggagccaagtcgctggcatgcgagtcaccatgagagagaggggtgtcaccaaggcaacggggtttagcttcatcgaggttgatggagagatgcactcattccatgcttgggatcactcgcacccgagggccaccgagatattcgccatgctgtgccttctttctccaactccaaccggagttggaggagttgacagtgagggtggatgggaagggtgggagctgcagtggaagtggtttcagatacttagggagctgttacctcatagcgaccaaaagagagacaaagcaacatttctgttagaggttattgaatacatacgctttttgcaagagaaagtgcagaagtttgaagcttcagtccctgaatggaaccaagaaaatgcaaagatacttccatggtcaaacatatattttagatcgttctggaaaaattcacaaagtaaaggtcagaaccctggagatgatttgcctgatccttcacagttcatccggaatgggtcctcttctgggtataatttcactggcaaacctgatgataaccacaacatggtgacatcagcagctgcctcaggggcacaagaactggtggaaactgaccatgcagctagcgtgtcctacagatcagcagaaactccgacaaacattaccaacaatgttacatcccaagcccaagcccagtgggctagtccggctggtgtggatgactgtgcaatgaacagcgaaatgttaaataaccaacagttggcaattgatgaaggaacaataagcttgtcaagccaatattcccaacagctacttggtacgttgactcatgcccttgaaagctcaggtgttgatctgtcccaatccagcatatctgtgcagatcaaccttggcaagcgagctgttaagagacctggtgctgatggatcctccagttctaaggagctccccagtacatcagcgaacaacgaaaacatgggtcaccagctgacgatgttagggggtggtactgaagaacttccacacccaacgaagcgccataaatcgggcaacagctga

SEQ ID NO: 11909 - DNA, 1350 bp, Oryza sativa
  Clone ID: TFbOSC400070j.C1.o12.fg
atgcagcttttccaaggagaggagccggctcatgacttcctctcgctccgcgccggcggcggctcgtcgtcgccgccgttccagcaccgggaggagcagcattccagccattcatcgcgaggatacggtatggagatccgcagatcactgaggccactggacctggccaagcagcgcggccgcagcagcggcaatggcacggcggcggggagtgccgtcgacggcgcgtcgccggcaggttcggactcggaggagcacgtgctaccgggcggcgtcgggacgttcagcatcaggcacgcgtccggtactccgtcgagagaagaggccggtagccatggcggcgtcaggaggagtgcgttcgcatttgcacctgcgcttcatggcgccaggatggagaatgcacatgaaacaggaggaagatctgggagtagggctcaccgtgcgccgtcgacgatgtggcaagattctgccattgatcaaagatccataggccagacaccatatgaagcatttaattccaagacaatttcatataagtatatggtgcaagaaatgtgttctaaaatgcaattcttcatgctctccttcaggcttgaaatacttcgtgaactcctgccacacactgatcagaagagagacaaagcttctttcctttcggaggttattgaatacataaggtttttgcaagagaaagtccaaaagtatgaggaagccgatccagaaaggaatcacgaggattccaaatccatgccatgggcaaaagtctactatagatcatgctggagaaacacaaagaacaccagtcaagtccagggggaagatttgtcaccatccacacaggacatgaacaacgaacagtacggtcccaagcacatatcggcagcacaacctgctctcttcaacacacagagtgtaaccagtacaaccaccagttcctcccacatggcaacaggcacaccacaaaatttggaaaagaacagcacacccagcaatcagccaccatggctgagcatgtcaacaatgcgccaagagtctgaaccaggcaacaaaatgccgaacaagcatgagaaacagacccttcacgatgaaaaccatagtatttctagcgcttactctcaaggattattcaacagattgacagaagctcttaaaaagtcaggactagatccatctcaagctaatatagctgtagagatcaacctggccaaacgagcaagagataatactagtgacaactcaaagatcgtctgcttaataattattttgtacctttgtcctgacttcacatcacagatcaatgaagatgaagagcccatccaaataaccaagaggcggtgcaataaaagctag

SEQ ID NO: 11910 - DNA, 399 bp, Oryza sativa
  unsure (1)..(399): unsure at all n locations
  Clone ID: TFbOSC5610j.C1.o1.gm
gcgatggagctccttctccccaccgccgcngcntcngggcngcggccncggccggcgttcccgccgannccgcacctcgtcgncgcgcaagccgggttctcngcgtttgcttcccnttngngcctcnnnnnnngctcttttccccctcccccttcctcctcctccaagcgcaagcccgaccccgcctccaaggggaaggcggctgcgaagaaggggaagacggcggcgagcggcgaggacggtggcgacggcggcgaggacgagaagccggcgtacgtgcacgtgagggcgagaagagggcaagccaccgacagccacagcctcgccgagcgggcgagacgcgagaagatcaatgcgaggatggagcttctcaaggagctggtccccggatgcagtaag

SEQ ID NO: 11911 - DNA, 750 bp, Oryza sativa
  Clone ID: TFbOSC400099j.C1.o2.fg
atggagatgacaagctacaacgacgtcgacgccggcgacatgttcgctgctgctgattactactcggctggcgccggcggtgatctcttcgatatggtgtggcctggacgacgacgacgggaagaagacaacaccagcggctgcctccccttgtcgccgccgccgccgcctgagctcgccgtggatgatcagctactggctggaggcgatggcggcggcggcaaaccggtggcggtggcggtggcggaggacgacgactccggtgagcggtggacggaggaccaggttccgacagacgaagggatatgcgtcatggagaaacgaaggtgcaagataaacgagaacctgaagaccctgcaacagctcgttccagtttgcgacaagtccaataaccaggcctcaacgctggacaaaaccatccgctacatgaagtcactgcagcagcatgcccaggccatgtcagttggatgcagcatgaagacggcagaagcagcaggagtgacgtgccccttccttccaccgccgccaagcagcgccttgctggttatcgtggaggagggtcccaccagaccctgggatgcaactgctagatctacctctgccgctgctacctcttttgaccaccaccaccatggcgcactcattgaaaagctcctccaggtggtgcagccttacatgctgtcgcttaagacgtccgtccgcgaaaataatgctatggtgatgcagaaaccgaatttctaccattcttaa

SEQ ID NO: 11912 - DNA, 2511 bp, Oryza sativa
  Clone ID: TFbOSC411335j.C1.o13.gm
atggacgccttcgggtggagcgcgccagccgcgccgtgccagccgagctgcggccccggcggcgacgacgacgacgacgtcctcctcgccgccgtcttgggcgcgagcttcgagctccactccctcgtcgacggcggcggcaacggcgccgccggcgccgttcgctctgacgatgcctacggcctcgacgtcgacctgccgtcccaccagatgagcctcctgcgttgccaagatggtctgagtgctcttcacggcgacgcgtccccgacggcggcggcggcggcgttccttgactcggtggatgtgttgccagtgccggccatcgccggcgcgacgcacgacgacggcgggctcctcgataggttcgcgttcccgaacgttgccgagacgacgaccgtgcaagccgccgcgtcgaacaccgccttctccggatacagcagcaacaccaccggcggcggcaacatctcctccggcgagtcgaacacctacacggaggtggcgtcgacgccgtgcgccgtgtcgacgacgacgacgacgacggctctgcccccgtcgaagcggaagctaccagagaagtaccccgtcgtaggcacatcaccaacgacgaagaccacgacgacgtcggagacagccgcagagcgccggagcaccaagagaggggccgggggcagcagcagcatcacgttcggcggcggctgccacggcgccggtgcggcggcggcgctgctcggctacggccgcgggtacgagccggacacggaggcgatagcgcaggtgaaggagatgatctaccgcgcggcggcgatgcgcccggtcaccctcggcggcgccgcctccgcctccgaccccgacccgcagacggtggcggcgcggctgcggcgggagcgggtgagcgagcgcctgcgcgtgctgcagcggctggtccccggcggcagcaagatggacacggccaccatgctcgacgaggccgccagctacctcaagttcctcaagtcgcagctcgaggcgctggaaaccctagggaatggcaatggcaacggcaacctgttgcaccatggctactacactggatcaagaaatgctactgctactgctgctactgagcctgtttatgaggactctggatatgctgctcttctaggtgcacatcgtggcctaatccttcttccctaccgcctcgccgtcgccgctcgccaccggcgccggagccggccgctggatccgccaaaccaccggcgccagagcctcggcggcctcgcttcctatcttcctcctcccatggctccactggattccggcggcgtcaccgcctcatcgcccctcccccccgatccccaaagccacccgtcgaatcgagtccgaataatgcgcgcgccaaaccccacgccgccgcgcgactccgccatggctaggaggaggaaaggttcgtcctatcgccgccgccgccgccgccgccggcgggcgcccgcggcttgcggcgacaaccgcatcgacgacctgacggacgatctgctgctgatcatcctgcggaggctcgacacccgctccgcgctcgccaccgcggcgctctccaggcgctggtccggcctcgcgcgcgcgggcctcgaggctctcgatttcatggtcggcgacatcctcccgccgcgctaccaccggtgcatccagctccacgagtccgccagtggtgtgttcgatggcgccgacgagctcagaaccatcgttgctagcatcaggcggcacgagcgcctcgccatgcgaaacatggtcgcctccatcaacaacttcctcgacgccgatgatggttttgcccatggcgacggcggcggcggagctccacggaggaggatcagtaggctgcgggtggagttcatcgccacacactaccacgactgcatcaaccgcttggtcgccaaggctgttgatacttggggagttgaggatctagaggttcttggggttccaagctctcaccaagctggtcctgcaagacttgcgggactccacacccgcggcagcctacgaagcagtgtgttcagctcatgcctacagttgcaagaggtgcacctcaagtcctgcccctgcaagcgcggcagtagtgttttcgttgatgcccccaggtcaatgatcaggcagcttgttctggagtgttgtggcgtccctgggtttgagctgcacgctctgccaatgcttgagagtatagttgtcatgcagacctgggtacggtacaagcttggatccttcccgcgcctcgtgcgcctgaacctcaaacgcgatggtctcaggcataaacttaacttttgcttgcctgcgaacttggatctcaagccgcatcttggattcactccagacataactgaccagccatccaagttgcagcacaaacggctaaaggagttggtgatcattggttttgaaggaacagagagacagatttactttgttaactttgtcattgaagtgtcaatggtactggagcttgtttccttgagtatggccgtgttcaggaaatag

SEQ ID NO: 11913 - DNA, 636 bp, Oryza sativa
  Clone ID: TFbOSC412549j.C1.o7.fg
atggagttcgacatggcaatggacatgatgagccaggagcagctcatgcacatcatctcacagctagacagtgcactggcgagctcgccttctccatccacgtcgccgtcggcgtcgccgccgcgacagtcaccggcggctcatgttccagtacctccaggtctactcaacactacgatggtttctacttctcgagctcaagcggcgccgtcggcgccgttgcatccggtcgccgccacggctgcggtgcagtcgtcgtcgcggggcattatgtacacgacgacgcgccagggcgtcatcgacgcggcggaggaggaggaggcggcggcgccgcggccgcggcggcgcaacgcgcgggtgtcgagcgagccgcagagcgtggcggcgaggctgcgtcgggagcgcgtgagccagcggatgcgcgcgctgcagcggctcgtccccggcggcgcgaggctggacacggcgtccatgctggaggaggccatccgctacgtcaagttcctcaagggccacgtccagtcgctggagcgcgccgccgccgcgctgcacatgcacggcggccacgccgccgccgccggcttcgccggcgacgcgggagacgccgtctactcctgcccgtcgtactacgcctag

SEQ ID NO: 11914 - DNA, 576 bp, Oryza sativa
  Clone ID: TFbOSC400622j.C1.o23.fg
atgaagttaaggtttgtgcgaaagaataatcacaaacgacgggacaggatcaaccaaaagatgaaaacattgcagaagctcgttcccaattcaagcaagactgacaaggcgtcgatgcttgacgaggtgatcgactacctgaagcagctgcaggcgcaggtgcaggtgatgagccggatgggcagcatgatgatgcccatgggcatggccatgccacagctgcagatgtccgtcatggcccagatggcccagatggctcagatcggcctcagcatgatgaacatgggccaggccggcggatacgcgcccatgcatatgcacacgccccctttcctccccgtctcctgggacgccgccgcatcctcctcctccgccgccgccgccgaccgaccgccgcagcccaccggcgccgccacctccgacgccttctccgccttcctcgcctcccaagcggcgcagcaaaacgcacagcaaccgaacggcatggaggcgtacaaccggatgatggcaatgtaccagaagctaaaccaccagcagcagcagcagcaggaccagccaagcaactccagacaatga

SEQ ID NO: 11915 - DNA, 1017 bp, Oryza sativa
  Clone ID: TFbOSC400431j.C1.o55.fg
atggcgccaccgccaccggcgccggcaaccacggcttcacctgtggctatgctgccagcagttacgtatatggttatagctgcggttcttgggagttcgagcaaagggagcagcagttcatcagctcgcagattcagcaccatcagcatgcacctgagcatggatgatgacgatgatcagtccgcggtgtacggcgtcgccatggtggacgacctcctgacgccttcgccgtcgacgcaccacgccgtcgccgccgccgccggcagcttcccttcctcgtcatcctcctcggcctccttccgctccgcctccgtgtcgtacagcccggacacctcgtcgtcggcggcagcggcggcggcgacgggattctacccggagttgtcctcgcaggtggcgccattattaccaccaccacccttggtgcgcaacgagccccagcccggccgttacaccgccggcctgccgccgccaccgccgccgccggtgaccggtggcgcgttcaggcggtacgcgcggcacctcggcccgaggagggcgcccaagccgggggcgtgcgggcagaggatgttcaagacggccatgtcagcgctggccaagatgcacatggagacgacgtacaggcgccgccagtactactaccagcaagcggcggcggcggccgaggcggcgccgccgccgccgtccggcaacaaccagctgcagcacacgatgtcggagcggaagcggcgggagaagctcaacgacagcttcgtcgccctcaaggccgtcctccctcccggctccaagaaagacaagacgtcgatactgatcagagcaagggagtacgtgaagtctctcgagtcaaagctgtcggagctggaggagaagaaccgggagctcgaggcgcggctgtccacccgccccgacgacaccaagaacgacgaagaggaggtggcggcgccaccggaggccggcggcgaggtgaagagagaggatccggtagagatcgaggctttagataatttttttataagatga

SEQ ID NO: 11916 - DNA, 1662 bp, Oryza sativa
  Clone ID: TFbOSC102138j.C1.o7.fg
atgggaagaggagaccacctgctgatgaagaacagcaatgctgctgcagctgcagctgctgtcaatggaggtggcaccagtttggatgctgcattgaggcctctagttggttcagatggctgggattactgcatctactggaggctctctcctgatcagaggttcttggagatgacaggattctgctgcagcagtgagcttgaagcacaggtctcagcactgctggacctgccttcttcaatcccactggactcctcctccatagggatgcatgcgcaggcattgctgtcgaaccagccgatctggcagagcagcagtgaggaggaggaggctgatggcggcggtggcgccaagacgcggctgctggtccccgtcgccggcggcctcgtcgagctcttcgcgtcgagatatatggcggaggagcagcagatggcggagcttgtcatggcgcagtgcggcggcggcggcgccggggacgacggtggggggcaggcgtggccgccgccggagacgcccagcttccagtgggacggaggcgccgacgcgcagaggctgatgtacggcggctcgtcgctgaacctgttcgacgccgccgccgccgacgacgacccgttcttgggtggtggtggtggtgacgccgtgggcgacgaggcggcggcggcgggcgcgtggccgtacgcggggatggcggtgagcgagccgtcggtggcggtggcgcaggagcagatgcagcacgcggcgggcggcggcgtggcggagtccgggtcggaggggaggaagctgcatggcggtgacccggaggacgacggcgacggcgaggggcgctccggcggcgccaagaggcagcagtgcaagaacctcgaggcggagaggaagcggaggaagaagctcaatggccacctctacaagctccgctcgctcgtcccaaacatcaccaagatggatcgcgcgtcgattcttggagacgcgatcgactacatcgtggggttgcagaagcaggtgaaggagctgcaggacgagctggaagacaaccatgtccaccataagccgcccgacgtgctcatcgaccacccgccgccggcgagcctcgtcgggctcgacaacgacgacgcctcgccgcccaacagccaccaacagcagccgccgctcgccgtttccggcagcagcagcaggaggagtaacaaggacccagcaatgaccgacgacaaggtcggcggcggcggcggcggtgggcaccggatggagccgcagctggaggtgcgtcaggtgcaggggaacgagctgttcgtccaggtgctctgggagcacaagcccggcgggttcgtccgcctcatggacgccatgaacgcgctcggcctcgaggtcatcaacgtcaacgtcaccacctacaagaccctcgtcctcaacgtcttccgcgtcatggtagtgagggacagcgaggtggcggtgcaggcggacagggtgagggactcgctgctggaggtgacgcgggagacgtaccccggcgtgtggccgtcgccgcaggaggaggacgacgccaagttcgacggcggcgacggcgggcaggctgcggcggcggcggcggcggccggtggagagcactaccacgacgaagtcggcggcggataccatcagcacctgcattacctcgcgtttgattga

SEQ ID NO: 11917 - DNA, 1510 bp, Oryza sativa
  Clone ID: TFbOSC900412j.C1.o23.fg
gttacctggaagggcatttgcaaggagaggccatgtatggctcactggagcaaatgaagttgacagcaaagtattcctaagagcaattcttgccaagacagttgtgtgcattcctgttgtcgatggcgtcctggaaattggaactacggaaaaggtggaggaagatatgggcctgattcagtatgcaaggggcatcttcatggatcaacatggcatccacatgaagcctaccctctcacagcactcaacatccaacccagtcacccactgtactcatcagcatccaatccaggttcagatgcaactaggtatcaccagccaaacaaagtttgattattcagatgagctcaatgcagatgaggagaatgatgacacagaagaagagggcatgtcaggttcagacactaacaacactgacactgaaaggaattcaggccagctgcaacttcaaatgcaagaccaactgaacatggtgagcaatgaccaccagacaataccaaataatgcagtttccagtgagctaatgcagtgtgagatgtcagaagtggtaagagatggctgctcaaataatattttagaggatgaaatccaaatgctgatggattgccaaaacagtaattgtcagttaaatttgcaagggccagatgagccttgtcactcttggcattttctctgcgaggagttacaaaatgattaccagccagctactgaagatcaagtggcatcacctgaaaatacccattacccaaaaacactcatgacaatcctacattacaacacgctgcgacagcaagagatgaacatcaagaactacttgccagtttcagagaaatcatcattctccagatggactactcctgaaggaatagtcactgcagttacaggggagcagaaacacctgaatcaaggggcgggaaaggcgcaagtggatgccatccaaggtgatttcagtgccaaccatgtgctgaaagagaggagaagaagagagaagctcaatgagaagttcataattctgcgatctttggtacctttcatgacaaagatggacaaggcgtcgatactaggcgacacgatcgagtacgtgaagcagctaaggaaccgcatacaagagctcgagtcgtcgtcgtcgtcgtcacgagcagccgcccgggcgccatcggcggcggccgccgggaggcggaggaagagatccgccgccgccgccactgccacggcggcggaagggatgagcagcagcaatggccgcaatggcggcgaggcggcggaggtggtgcaggtgtccatcatcgagagcgacgcgctgctggagctccggtgcggttgcggcggcggcggcggcggtgtggtgctgctccgggtgatgcaggcgatgcaggagctccagctggaggtcaccgccgtccaggcctcgtgcgccggtggcgagctgctcgccgagctgcgcgccaaggtcgtcgttatgatcctgatctgcatgaaaatgcaaatgcaaatgcaaatgcagaattaa

SEQ ID NO: 11918 - DNA, 948 bp, Oryza sativa
  Clone ID: TFbOSC400903j.C1.o11.fg
atggacgagcagcggggacgcggggggttcgacgaactggtgctcttgcatcagcagcaggagcagcggaggcggagggagcagcagcaggaggaggaggaggaagaggaggtgcggcgccagatgttcggcgcggtggtcggtgggctagccgcgttccctgcggcggcggcggctctgggacagcagcaggtggactgcggcggggagctgggcgggttctgcgacagcgaggcgggcgggtcgtcggagccggaggcggcggcgggggcgcgcccgcgcgggggatccggcagcaagcggagccgcgccgccgaggtgcacaacctctccgagaagaggaggaggagcaagatcaacgagaagatgaaggcattgcagagcctgataccgaattccaacaagactgacaaggcatccatgcttgacgaagccatcgagtacctgaagcaactgcagctccaagtgcagatgctctcaatgagaaacggtgtttacttgaacccatcttatttatctggagcacttgagcctgcgcaagcatcacagatgtttgcagcccttggtggtaacaacgtcacagtggtgcaccccgggacagtgatgccaccagtgaaccaaagctcaggagctcatcatttgtttgatccattgaactctcctccacaaaatcaaccacaatctctaatcctaccaagtgttcctagcacagccattcctgagcctccatttcacctggagtcatcacagtcccaccttcgacaatttcagttgcctggatcctctgagtttcacaagattttgtttttacatgtacttttatctgtaaaagatggtgtttcatggagagataatgccaaagcaccacctatcatcacatcaagaaagtctgccaggaaacgagatgaactccatcaggaaagaatcatccatgttgaacaccaataa

SEQ ID NO: 11919 - DNA, 1911 bp, Oryza sativa
  Clone ID: TFbOSC400765j.C1.o26.fg
atggccggcggcgaggcgcatgcggcgctgcaggcggtggcgcagagcctccggtggacctacagcctcctctggcagctctgcccccaccaagggagctcgctggtgtggggggaggggcactacaacggcgccgtcaagacgcggaagtcgacggtgatgcagccgccgccggcggaggaggaggacgacgccgaccacgcggcgcgccaccggagccggcagctgagggagctctacgactggctgcagcaggccggggagaactccagcggcggcgtgcagacgtcgtcgacgacggcgagccggcggccgggggcggctctgtcgccggaggacctgacggagacggagtggttcttcctcatgtcggcatcctactccttccctcccggcatcgggttacctggaagggcatttgcaaggagaggccatgtatggctcactggagcaaatgaagttgacagcaaagtattcctaagagcaattcttgccaagacagttgtgtgcattcctgttgtcgatggcgtcctggaaattggaactacggaaaaggtggaggaagatatgggcctgattcagtatgcaaggggcatcttcatggatcaacatggcatccacatgaagcctaccctctcacagcactcaacatccaacccagtcacccactgtactcatcagcatccaatccaggttcagatgcaactaggtatcaccagccaaacaaagtttgattattcagatgagctcaatgcagatgaggagaatgatgacacagaagaagagggcatgtcaggttcagacactaacaacactgacactgaaaggaattcaggccagctgcaacttcaaatgcaagaccaactgaacatggtgagcaatgaccaccagacaataccaaataatgcagtttccagtgagctaatgcagtgtgagatgtcagaagtggtaagagatggctgctcaaataatattttagaggatgaaatccaaatgctgatggattgccaaaacagtaattgtcagttaaatttgcaagggccagatgagccttgtcactcttggcattttctctgcgaggagttacaaaatgattaccagccagctactgaagatcaagtggcatcacctgaaaatacccattacccaaaaacactcatgacaatcctacattacaacacgctgcgacagcaagagatgaacatcaagaactacttgccagtttcagagaaatcatcattctccagatggactactcctgaaggaagtgatgacaacaagaccatgatcagtccaggcaccacacagagaatgctcaagagcatcctgatgattgttcccagtagtcactgcagttacaggggagcagaaacacctgaatcaaggggcgggaaaggcgcaagtggatgccatccaagaagtgaatcctacccgtatccaccgatggacaaggcgtcgatactaggcgacacgatcgagtacgtgaagcagctaaggaaccgcatacaagagctcgagtcgtcgtcgtcgtcgtcacgagcagccgcccgggcgccatcggcggcggccgccgggaggcggaggaagagatccgccgccgccgccactgccacggcggcggaagggatgagcagcagcaatggccgcaatggcggcgaggcggcggaggtggtgcaggtgtccatcatcgagagcgacgcgctgctggagctccggtgcggttgcggcggcggcggcggcggtgtggtgctgctccgggtgatgcaggcgatgcaggagctccagctggaggtcaccgccgtccaggcctcgtgcgccggtggcgagctgctcgccgagctgcgcgccaaggtcgtcgttatgatcctgatctgcatgaaaatgcaaatgcaaatgcaaatgcagaattaa

SEQ ID NO: 11920 - DNA, 933 bp, Oryza sativa
  Clone ID: TFbOSC423195j.C1.o3.fg
atggagtccggaggggtgatcgcggaggcggggtggagctcgctcgacatgtcgtcgcaggccgaggagtcggagatgatggcgcagctgcttggaacctgcttcccctccaatggcgaggatgatcatcaccaagagcttccttggtcggttgacacccccagtgcctactacctccattgcaatggaggtagctcaagtgcatacagctctaccactagcagcaacagtgctagtggtagcttcactctcattgcaccaagatctgagtatgaggggtactatgtgagtgactctaatgaggcggccctcgggatcagcatccaggagcaaggtgcagctcagttcatggatgccattctcaaccggaacggcgatccgggcttcgatgatctcgctgactcgagcgttaatctgctggattccatcggcgcttctaacaagagaaagattcaggagcaaggcaggctagatgaccaaacgaaaagtaggaaatctgcgaagaaggctggctcgaagcggggaaagaaggcggcgcaatgtgaaggtgaagatggcagcattgctgtcaccaacaggcaaagcttgagctgctgcacctctgaaaatgattcgattggttctcaagaatctcctgttgctgctaagtcgaatggcaaggctcaatctggccatcggtcagcaaccgatccccagagcctctatgcaaggaaaagaagagagaggatcaatgagaggctcaagattctgcagaaccttgtaccaaatggaaccaaagtagatatcagcactatgcttgaagaggcaatgcattacgtgaagttcttgcagcttcaaatcaagctcctcagctctgatgaaatgtggatgtacgcaccgattgcttacaacgggatgaacatcgggatcgatttgaacctctctcagcattga

SEQ ID NO: 11921 - DNA, 630 bp, Oryza sativa
  Clone ID: TFbOSC401685j.C1.o98.fg
atgtcgtcctcgtcggggtcagggagaagcgcgacggaggcgagagcgttgaagatccacagcgaggctgaacggcggcggcgagagaggatcaatgctcatctgacaacactgaggagaatgatccctgatactaagcagatggacaaggccaccttgttagccagagtggtggaccaagtgaaggatctgaagaggaaagcaagtgagatcacacaaagaacacctctccctccagagaccaacgaagtctccatcgaatgcttcaccggagacgctgccaccgccgccaccactgtcgccggcaaccacaagaccttgtacatcaaggcttccatcagctgcgacgaccggccggacctcatcgccgggatcacccacgcattccatggcctgaggctgaggacggtcagagcagagatgacatcactgggaggaagggtgcagcatgtgttcatattgtgcagggaggaaggcattgcaggtggtgtgagcctcaagtctctgaaggaggctgtcaggcaggcactagccaaggttgcctctcctgaattggtatatggcagcagtcactttcagagcaagaggcagaggatcctggagtcacattgctcaattatgtccatatag

SEQ ID NO: 11922 - DNA, 588 bp, Oryza sativa
  Clone ID: TFbOSC33102j.C1.o1.fg
atggcaggcttctcacacctcccacagcagatggagcatggcctcatcaccaacaatggcttcctcttctgccatggcagccatggaggagcagcaaccaccacagctccagccatccctgaagatgcctcaatggagacctcatctgtggttcttgacacctctccacaggacaagaagaggaagcccagggaagaagacactgccagcctcaactctgctcactccaaggaggcaaaggagaatggcaggaagaggggagggaagaaacacagcagggatcagatggaggaggaggcacctcaggggttcatccatgtcagggcaaggagagggcaagcaacagatagccacagccttgcagagagggtgaggagagaaaggatcagtgagaggatgaggatgctgcaggctctggtccctggttgtgacaaggtcactggaaaggctctcattttggatgagatcatcaactatgtgcagtccttacagaaccaagttgagttcctttccatgaggattgcatctctgagccctgtgctgtatgggtttggcatagacagtgatgctttcagtgaccactctcag

SEQ ID NO: 11923 - DNA, 876 bp, Oryza sativa
  Clone ID: TFbOSC400867j.C1.o1.fg
atggcagacttctcaccacaccactctctcctcctcaaggctactgctgctggagcagccatcgccaccaccaatgaccccaacatctcaagcttcttcctctacaaccacagccatggctcccaagctccacaacctgccaatgcagcagcagcagccattgtggaggatgcctcattggagagctcagtgtctgcagttcttgacacctctccatctgtggacaggaagaggaaggcagcagaagacagtgcacactccaaggatagctgcaaggatggcaagagcaggagagggaagaaggccagcaaagaagtggaggagaagagcaccactgaagatgagcctccaaaagggtacatccatgtgagggcaaggagaggacaggcaactgatagccacagccttgcagagagggtgaggagggagaggatcagtgagaggatgaggatgctgcaagcactggtccctggttgtgacaaggttactggaaaggctctcattttggatgagatcatcaactatgtacagtcgttgcagaaccaagttgagttcctatccatgaggattgcttcaatgagcccagtgttgtatggctttggaatggacagcgatggcctccatgaccaaaagattggaggcatgttccaagaagcccttgcaatgcctaatccagtactgaaccaatcaagcccagctccatctcaagctatcatggacacaacctcaaccacatcctactcactgcaaagccagcatggagccatctctttctctcaggacaatggcagttacctgatgcaagcagtgggggagccaaggcagcaggagatgctcaatcaattggtgttcaacaacatgtgctctttccagtag

SEQ ID NO: 11924 - DNA, 849 bp, Oryza sativa
  Clone ID: TFbOSC900128j.C1.o4.fg
atggcaggcttctcacacctcccacagcagatggagcatggcctcatcaccaacaatggcttcctcttctgccatggcagccatggaggagcagcaaccaccacagctccagccatccctgaagatgcctcaatggagacctcatctgtggttcttgacacctctccacaggacaagaagaggaagcccagggaagaagacactgccagcctcaactctgctcactccaaggaggcaaaggagaatggcaggaagaggggagggaagaaacacagcagggatcagatggaggaggaggcacctcaggggttcatccatgtcagggcaaggagagggcaagcaacagatagccacagccttgcagagagggtgaggagagaaaggatcagtgagaggatgaggatgctgcaggctctggtccctggttgtgacaaggtcactggaaaggctctcattttggatgagatcatcaactatgtgcagtccttacagaaccaagttgagttcctttccatgaggattgcatctctgagccctgtgctgtatgggtttggcatagacagtgatgctttcagtgaccactctcagaagatggaaggaatgttccatgaggcagttgcaataccagcttctgtcctgaacagaggtagtagcccagctcaatctcatgccatcatggacacatcaaacacctctcctacaccctacacacttcaagtccagggaggcagcaacaacaactctctctcccaggacaatggcagctacatcatgcaaacagtaggggagccaaggcaagaactgttcaatcaagtggtgctcaataattacatgtgctctttccagtag

SEQ ID NO: 11925 - DNA, 1500 bp, Oryza sativa
  Clone ID: TFbOSC900417j.C1.o6.fg
atggctgcggcggcggcggcgggccagatctccctggacgacctccgcaacggcggcggggtcgccgccaatgccggcggcggcggcggcgtccacgacgacttcctcgaccagatgctcagcagcctgccgccctcggcgtggcccgacctcgccgccgggaaggcggccgaggacgacgccgaggggatgcatcaccaccaccaccagcagcagcagcagtttggtgggccgtacgacgagtcggcgatgctggcgtcgcggctccggcagcaccagatcagcggcggcggaggaggaggcggcggtggcgcggccgccgtgaagcagatggtgctgcagcagctcgccgatctgaggcaggggcaccacatgatgctccagggcttggggggacggtcgccggcggggggcggcggcggcggcggcgacgggggccttctcctcccgctcaccctcggcagcggcggatcgggcggcgacgtgcaggcgttgctcaaggccgccgcggccaattccgccggaggaggagacgccggcggcgtctacggcggcggattcgccggctcgctccatcaacagcagcaacatttccagccacatccacagacggcgccgacgattccgacgcagagcttcggcggcggcggcggcggaggaggaggaggaaccgcgtcaggcggcggggcggcgcagcctcaggccggcgcggctggaggaggcgcgccggcgccgccgcggcagcgggtgcgggcacggcgaggccaggccaccgacccccacagcatcgccgagcggcttcggagggagaggatcgccgagaggatgaaggcactgcaagaactggttcccaacgccaacaagttgatgcagacggacaaggcttccatgctggacgagatcatcgactacgtcaagttcctacaactccaagtcaaggcaagcacgtacactaaattactaatacatgttttgagcatgagccggttaggtggcgccgcagccgtcgcgccgctcgtggccgacatgtcctcggaggggcgaggcggcggcgcggcgaacggcggagcaccggcggcggcggggagcgatagcctgacggtgacggagcagcaggtggccaagctgatggaggaggacatgggcaccgccatgcagtacctgcaggggaagggcctctgcctcatgccgatctccctcgcgtccgccatctcctcggcgacgtgccatctccggccgccggtggtcgccgccgcgcagcagttcccggccgggctcggcgccgccgctgccgccgcgcatcaccaccaactgagcgcggcggcggcggcggcggccatgcgcggacacctgcccggcctgaacgccgacggctccgtgccggcctcgccgagcatgtcggtgctcacggcgcagtcggccatggccaacggcggcgggggcgccgccgacggcgaggggtcgcagctcaaggacgccgcctccgtctccaagccgtga

SEQ ID NO: 11926 - DNA, 819 bp, Oryza sativa
  Clone ID: TFbOSC401648j.C1.o35.fg
atggcggagaccaaccacctcctcctcctcctcctctctcctccgcgcctccgcctcctctcctggactcccacgactcctcttgcgtgtgctgcgttgagtcgagcagccaagctgtctcgtgatctcgtctcggagaagggagaacgaggcatccggtcgttcaaaaaaaatattgctgaacaacatatgcatgccagcttagggctggaccagctagcagccattggtagcctgtatcagttcataaggggaggaggtgaaggcaaggaggcagctagccaagaagaagagcagacaccaaaactcagatctgttattgcacatcttgtttccaggaagaggagaagggataggatcaatgagaagctgaaggcgctgcaagagctacttccaaattgcaccaagaccgacaaagtttcgatgctggatgaagcgatcgactacctgaaatcactccaactacaactccagatgctggtcatggggaagggaatggcaccggttgttcctcctgagctgcaacaatacatgcactatatcacagctgatccttctcaaattcctcccatacgcccctccgagccgcggccatttcagataacccacgccacccaacagagacagtctaacgtcgagtcggatttcttgagccagatgcagaatttgcacccttcagagccacctcaaaatttcctcagaccaccaaaattgcagttgtacacgccggagcagcagagaagaggtctagctagtagcagtggccacaacagcggttggatcacggagaggaattcatcgtacaacttcttggagtga

SEQ ID NO: 11927 - DNA, 765 bp, Oryza sativa
  Clone ID: TFbOSC9961j.C1.o3.fg
atggacgactcgagcctcttcttgcattgggcggtgagcacgctgcagcaccagcacccggcggccgtcgcagtcgtggccgacgacgacgccacgttcttctcgttccaggagctctgcgacaccgaggaggtggttgttgtcccggtccaggaagaagtgatcacggaagcgcatggtgcagccgaacggcggcggcggtggcggcgcgccggagatggcgtacgggtcaccgccggcggccgggggatccaccaccaggaagacctcggcgcccacggtggggcggcggcggcgtacgcgcagctggagcacgtcgtcgcggagcggaagcggcgggagaagatcaaccagcggttcatggagctctccgccgtcatccccaagctcaagaagatggacaaggcgacgatcctctccgacgcggcgagctacatcagggagctgcaagagaagctcaaggcgctagaggagcaggctgctgccagggtcaccgaggcagcaatggcgacaccgtcgccggcgagggcgatgaaccaccttccagttccgccggagatcgaggtgcggtgctcgccgacgaacaacgttgtgatggtgaggatccattgcgagaacggcgagggggtgatcgtgaggatcctcgccgaggtcgaggagatccacctcagaatcatcaacgccaatgtcatgccatttctggatcagggcgccacgatgatcataacgatcgctgcaaaggcaagttcttcattattatattaa

SEQ ID NO: 11928 - DNA, 882 bp, Oryza sativa
  Clone ID: TFbOSC400878j.C1.o3.fg
atggcggggcagcagccgccgacgggaggagccgaggacgacttcttcgaccacttcttcagcatcccctccgccgccgcggccggcgccggcggcgtcggcggattcggctcgggtgaccaccaccccttcccgctcgcgctcagcctcgacgccgagggcgccggtgccgccaggcgcctcctcgacggcggccacgacggcggcaggacggaccgggaccccgtgcagctcgccggcctcttcgccccggtgttcggcgccgccgccggagtccagccgccgcacctccgcgccccgccgcctccccaggtgttccacgcgcagccgaagcccggggagggggccatggcggcgccgcagcctcagcagccaccggcgccccggccaaaggtgcgggcgcggcgcgggcaggccaccgatccccacagtatcgctgagaggctaaggagagagagaatagccgaaaggatgagggccctgcaggacttggtccccaacacaaacaagacagacagggcagctatgctagacgaaatccttgattatgtgaagtttcttcggcttcaagtaaaggttctgagtatgagcaggctgggtggtgctggtgcagttgcgcagctggttgctgatattccaatctcagttaagggggaggcaagtgacagtgggagcaaacaacagatttgggaaaagtggtcaaccgatggcacagaaaagcaggtagcgaagctgatggaagaagacatcggagcagcaatgcaattcctccaatccaaagcactatgcatgatgccaatctctcttgcgatggcgatctatgacacacagcattcgcaggacggacactcagtgaagcctgaacccaacactccttcatag

SEQ ID NO: 11929 - DNA, 1434 bp, Oryza sativa
  Clone ID: TFbOSC407936j.C1.o27.fg
atggcgcagcagtggcgatctctcctcttcctcctcctcctcctcctcgtgcccttcgccgccgccgccgggcaggatgcgccgttcgtggtagcacagaagaaggttgcgctgtcccgcccgggtccaggcgtggagcgcctcgccgtcaccctcaacctctacaaccagggttccgcgaccgcctatgatgttagcttgaacgacgactcttggccacaggaggcttttcaacttatctctggaaccacatcaaagattgtggaaaaacttgatcctggtgctactgcttcccacaacttcatcttggagaccaaagtgcagggcaagtttcagggctctcctgccattatcacataccgtgttcccacaaaggccgcacttcaggaggcttactcaacgcccatgtttccacttgatattcttgctgagagacctccccaacagaagtttgaattggctaagagacttgtggggaaatatgggtcgctggtctccgttgtttcctttgtcgagcctcttcctgtcccaggcttccctgccggctgcagcaaccttgaagagaaggcagcagcagccatggcggcctatgagtatgagagcagcagctgcagctcccttgaccccacctcaatgccaatggtgtactcaccaatagtgctgcagccacaggagtgccctctttcctttgtctttgacaatgccgctgccgctgccggcgacaacaaatgggtgcctggcattcaaggaagttgcccttgttcattgggctcaactcaagatatggatgcaagttggggcaagagtagaaagcacaagaggagcaatgtgggcttgaagggacttgaggagaaaaaggcaagaagggtggtactacatcaacatgatgatgatgtgaagaagaaggccaaggaggcagcaggtggggagccaccagctgggtacattcatgtgagggcaaggagaggccaagcaacagacagccacagccttgctgagagggtgagaagggagaagatcagtgagaggatgaagatgctgcaaagcctggttcctggttgtgacaaggtcacagggaaagccctcatgctagatgagatcatcagctatgtgcaatctctgcagaaccaagttgagtttctgtccatgaagcttgcctcccttagccctttgatgtatgagtttggaccgggcattgatatgcacccagatgttcttcgacagcttgcaaagatgccacatgagatggtgcagtgcatgggccaaatggggagtacaggcatttcactccaaggactaggaggaggacccacaggctttgctcaggatggcagcagccacattaacatggtggtgatgcaagttggagagcaaggccagcagcagggctctcttcaccaggtcgagatgagcagccactgcttctttcattag

SEQ ID NO: 11930 - DNA, 1239 bp, Oryza sativa
  Clone ID: TFbOSC400431j.C1.o57.fg
atggatagcagcagctggatccatggctacacaaacgccaacgccaccggcgccaacagcggcttcatgtgcggctacgctgccagcccagtagagtttccgcagcagcaacagctgatcagcatgcagatgggcatggatgacgagtcggcggtgtacgacggcgcctccatggtgggcgacctcctcatggcttcctcgtcggcgcaccacgccggtgccggcagcttccagtactcctcgtcgacgacgtcctcctccgcctccttccgctccgcctccgtctcgtgcaacccggagagctcggcggcggcggcgccagagttgccggcggcaaccggcggcgcgttcagtcgctacgcgcggcacctccgcccgaggaggccacccaagccgggagcgtgcgggcagaggatgttcaagacggccatgtcggtgctcgccaacatgcacgtggcggcgacgtaccgccgccagtactactaccagcaagcggcggcggcggcggcggccgaggcggcgccggcgccgccgtccgacaaccagctgcagcacatgatctcggagcggaagcggcgggagaagctcaacgacagcttcgtcgccctcaaggccgtcctccctaccggctccaagaaagacaaggcgtcgatactgatcagggcaagagagcacataaagtctctcgagtcaaagctgtcggagctggaggagaagaaccgggagctggaggcgaggctagccagccgccccgccgccaagaacgacaaaggcgagacggcggcggcggaagccggcgacgagacgaagcgagaggacctagtagagatcgaggtgacgacgacgagcggcggcagcggagcggcggctgcggcggcgacaggaggagatcaagagacttgttgcacgctcaacgtggacttgcgcggcggcggcggcggaggcatgagcacgacggacgttgtgctccggacgctgcagtgcctgagagagcagatcggcgacggcgccagcctcgtggcgatgagcaccagcgccggctccggcggccgccctcctagtgcaaacctaacattacagctcaagagcccaacatatggcagatgctcctacaagtatgagtttactctttttcttgtcaaccgtcaaaagccaaccatcaaacatattagatatggttctagaaagatcagcatgagcttgagcatggatgatgtgacgatgatcagtccgcggtga

SEQ ID NO: 11931 - DNA, 1113 bp, Oryza sativa
  Clone ID: TFbOSC400036j.C1.o73.fg
atgagtagagtgcccactagttggggttttgtttattctagggtgaacaaggtttcggaggaaccaaacgtggtaaaccgaatcaccacggctttctgggagcttcagcttccggcatgctcagacgagccaattagctccggtaccccttcttccccatcatcgccgccgacgaaagaaactggagacgccaacaccgtggtcatcgacgacctcttcctcgcccacagcgatgcgatactaccagcaggaggagatcaaaaagaagaacatcagctaggcgacgacctcgggcaacaacaagcagccaccgccatggagatcgacgacgatgtgatctacagcctgatcaggaactgggataacgacagcagcagcagctggatcgagctcctggaccacgccattgtctctcccgcctcgtgctttgtgccttggaagagaacggagctggacaaggaggcggtggccggcggggaggcggcgcagaggttgctgaagaaagtcgtgggcggcggcggcgcatggatgaatcgtgccgctggtagctgcagcatcaagaaccatgtcatgtccgagagaaggcgccgggagaagctgaatgagatgttcctcattctcaaatcactggtcccgtccatcgacaaggtggacaaagcatccatcctttcagagacgatagcctacctcaaggagctggagaggagggtgcaagagctcgagtccgggaagaaggtgtctaggccggccaagaggaagccatgctcagagacgatcatcggtggtggcggcggcggcggcggtgctggagctgttaaagagcaccaccactgggtgctctccgagtcccaggagggcaccccaagcgacgtgcgtgtgatcgtcatggacaaggatgagctgcacctcgaggtgcagtgtcggtggaaggagctgatgatgacaagggtgttcgacgccatcaagagcctccgtcttgatgttgtctcggtgcaggcgtcggcaccggatggtcttctcggactgaagatacgagctaagtatgccagttctgccgccgtggtgcctgcgatgatcagtgaaactctccggacagccgtagcaggctactaa

SEQ ID NO: 11932 - DNA, 741 bp, Oryza sativa
  Clone ID: TFbOSC400710j.C1.o1.fg
atggagtttgacatgctgaactccaacccggaggcgcagctcgagctgatgaacacaatgctacagctggagcagctgagcgcattccctgaccaccacggcatggtggtgccgtgctctcccacttcgccatgcatgggagcgcaaggtggtcatcatcacttctcctcggtgaatcatcagccagctcacggcgtcgtgtcgtcaggtggcgccaacaccggcgacgggtaccgcgaccagtactacacccagctgcttcccgccgccgcgtacagcaacgcggcaggcggtggccgcggctcggagtaccacacgacgacgacgacgcggccggcttccggcggcggcggggacggcggcgtggggccggcggcgatgagggagatgatcttccacatcgcggcgctgcagccggtgaacatcgacccggagacggtgcggccgccgaagcgccggaacgtgcgcatctcgacggacccgcagagcgtggcggcgcggatgcggcgggagcgcatcagcgagcgcatccgcatcctgcagcggctcgtccccggcggcaccaagatggacaccgcctccatgctcgacgaggccatccactacgtcaagttcctcaagactcaggtgcagtcgctggagcgcgccgccgccgccaacggccaccgcccgccgccgcccaccgccacctccgccgccgccgccaccgtggcctaccctggcctgaacggccagtggtag

SEQ ID NO: 11933 - DNA, 75 bp, Oryza sativa
  Clone ID: TFbOSC6188j.C1.o1.gm
gaccagttccagtttgataccggtgttacctatgatccttcagtaactgatgacgacctggaactatataagtaa

SEQ ID NO: 11934 - DNA, 1086 bp, Oryza sativa
  Clone ID: TFbOSC400269j.C1.o50.fg
atggcctactccactaatcagataatgatactccaacatgcatggatgctcgtgggtgaagctaacagccagttaataattagtacagtagcacactcttggtaccagagcaacagtatagaagtggtcttatggtggttctggtccaggattgcacaaactccaactgaatatggattcttcggccaagcaatggcttgcagaactgacgaggagaatgatgatgatcctagagcgcttgagcatctggaccctctcagcatgcagcaactcgctgaatcccttgccaacgagctttttaaccagccccaagaacaacaggaagaacagcatggataccataacccatcactgagggtcctcccctttgtcggggatattaacaagcccgagggccacacaccagcagctgctgcaattcgtgacagcttcttctccctcaccaatggctcgtccagctcactcaacttctcggcgctggagcagcagcaggatagtggtcccatgacaaaattctgctcgccgctgtcagagatgaagagaggcggaaggagggcgacctcgagcatgcaagaacatgttatcgccgagagaaagaggcgagagaagatgcaccagcagtttacaactctagcatctatcgtccccgaaatcactaagacggacaaggtctccgttctcggcagcaccattgagtatgtgcaccatcttagggagagggtgaagatcctgcaggacatccaaagcatggggagcacgcaacccccaatttccgatgctcgcagccgtgccggctccggtgatgatgaggacgatgatggtaacaacaatgaggtggagataaaagttgaggcaaatttacaggggacgactgttctgctgagggttgtgtgccctgagaagaagggggtgttgatcaagctgctgaccgagctcgagaagctcggcctgtccaccatgaacactaatgttgtgccatttgcagattcatcactaaacatcaccattacagcacagattgataatgcatcttgtaccactgtagaacttgtgaagaatctaaaatcaactctcagaaatttttag

SEQ ID NO: 11935 - DNA, 2331 bp, Oryza sativa
  Clone ID: TFbOSC401665j.C1.o25.fg
atgaagcttcggttgcgatccatggaccagcgcggcggcgccggcggcgccgccgagacccaccgcgtgcagctgccggacacggccacgctctccgacgtcaaggccttcctcgccaccaagctgtccgcggcgcagcccgtgcccgccgagtcggtgcgcctcaccctcaaccgctccgaggagctcctcacccccgacccctccgctaccctcccggccctcgggctcgcgtccggtgatctcctctacttcacgctctcccccctcccgtcgccctcgcctccgccgcagccgcagccacaggcccaacccctgccccgtaaccctaaccctgatgtcccctcgatcgcgggagctgctgacccgaccaaatctcctgtggagtctggtagctcctcgtcgatgccgcaagctttgtgcacgaatcctggcttacctgtcgcatccgatccgcatcatcctccaccggatgtggtgatggcggaggccttcgccgtgatcaagagcaagtcgagtctcgtcgtcggggatacgaagagagagatggagaatgtcggtggtgcggatggaaccgtcatctgtcgccttgtcgtggcgctgcatgcggccttgctcgatgccggcttcctctatgcaaacccggtggggtcttgccttcagctgccacagaattgggcgtcaggttcttttgtccccgtatcgatgaagtacaccctgccagagcttgtagaagcgttacctgtggttgaggaggggatggtggcagtgctgaactactccttgatggggaattttatgatggtgtatgggcatgtgcctggggcaacatcgggggtgcgaaggttgtgcttggagctgccggagcttgcgcctttgttgtacttggatagtgatgaggtgagcacagcagaggagagggaaattcatgagctgtggagggtcctgaaggatgagatgtgcttgcctctgatgatatcgttgtgtcaactgaacaatttgagcttgccaccgtgcttgatggcgctgccaggtgatgtcaaggcaaaggtcctggagtttgttcctggggtggatcttgcaagggttcaatgcacgtgcaaggaattgagggatcttgctgcagatgataatctttggaagaagaagtgtgagatggagttcaatactcaagatacatgcggttgtatgatgtgtaaatgcatttactctgaccaaaggaaggatatcgtactagctgataagtatacctgtggtaattatatgcagaagcccgtcacacaacctggtaggtggcttattatattagtctaccattccctactttgccagtacatcactattgggttgagtttgctgtggtatcatttggttgatttggttcaggatgctcctgcagcaggcattcactttgactgtattattccactgccaatcaatccttaccagcttcccccatctgctggtgcctgctgctcaacaactcaagcttcagcatcagcaaaagatggtggcaatatgtattcccctccctgcagtgctgctgcaagcagccaagggcattgtttcgcggtcggagctaaccagcttgcttcgcttgaccttgccatggacttcgacgagcctatcctttttcctgtgcataatgcaagtttgcaagaggggattcagttttacaatcctaccggcgatactcagctaagtagaaacatgagcattgacaagtgtttgaagggcagtaaaaggaagggctcaggcgagggcagttcatcgctacattcccaagaggaaaccggtgaaatgcctcagagagaactcagcatggagcatgccggagagaaggcgggtgatgctgacgctagcagggaggagtacgtgcatgtccgggcaaaacgcggccaggcgaccaacagccacagccttgcagaaagatttcgaagggagaagataaacgaaaggatgaagcttctgcaggacctcgtcccaggatgcaacaagattacagggaaggccatgatgctcgacgagatcataaactacgtccagtctctgcagcgacaggtggagttcctctcgatgaagctctcgacaatcagtcctgagttgaactctgacctcgacctgcaagatatcctttgttcacaagatgctcgctccgcatttctgggatgcagcccgcaattgagcaatgcccatcctaacctttacagggcggctcagcaatgcctctcacctcctggcttgtacgggagtgtgtgtgtcccaaatcccgcagatgttcatttggcaagggccggtcacttggcttcgtttcctcaggtctacatctaa

SEQ ID NO: 11936 - DNA, 1479 bp, Oryza sativa
  Clone ID: TFbOSC400641j.C1.o23.fg
atgggccaggccggttacttcctctgttccgagatcaccgcctccaagctcctcacagtcacagccacaagggaattgaagccgccgccgcctcctcgtccttccggccgtgtgctctcacgcagggcgcggcggcggcgatcttctgtgctagcgtggcggcatcgccgttgctttggaggcctaatattacaaacttggaagaaaaaccacacaatttcggcggtgcagcagagaagccacctggagagatttgcggcgctggacgaggcgccaccgccggcaccggaggagaccgtggtcaccggcggggagatggtggactacatgctgggacagccgccgccaacgacgcccgggccgcagagccaggtgtccttcgacaagctcaccttctccgacgtgctgcagttcgccgacttcggccccaagctcgcgctcaaccagccggcggcgtcggacaacggcggcggtggtggcgacgacggcgacgacgacgacgacagctacttcctcaggttccagtcgctgccgtccctccccgccgttccccctcctcgtggcggcgccgccgccgcgcatcaggtcgttgacgagcaggagggcagcaagcagacggtcgacgccggcggcgtgtccgagagcacgacgctggtgcagcaggctgacggcggcggcggccgtgcggagaaggccggtgagcaggggaagagcgggcggcggaagcgtccccggacggtcaagacgagcgaggaggtggagagccagcggatgacgcacatcgccgtcgagcgcaaccgccgccgccagatgaacgagtaccttcgagtcctccgctcactcatgcccggctcctacgtccaaaggggagaccaagcatccatcataggtggtgcaatagagttcatacgagagctggagcagctgatccagtgcctggagtcgcagaagcggcggcgcctgtacggcggcgacgcgccagcgccacctgcacggccggtcgccgacggagcagttctgccggcgcccatgcagcagccgccgccggcgacgccgccgttcttccccccgagcatcccgttccccgcgtcgtccggcgccggtgacggtacaggcgccggcgtggccaaggtcgcactggacctcgacgcgagcggcggcggcgaggtgggcggcggggtccgggaggagatggcggagaacaagtcgtgcgtcgcggacatagaggtgagggtggtgggcgtggacgccatgatcaagatcctgtcgcggcggcggccggggcagctgatcaagacggtggcggcactggaggagatgcacatgtccatcctgcacaccaacatcaccaccatcgatcagaccgtcctctactccttcaacgtcaagatcgccggcgacgcaagattctcggcggaggacatcgccggtgccgtccaccagatccttagcttcatcgacgtcaactacacgttatga

SEQ ID NO: 11937 - DNA, 1239 bp, Oryza sativa
  Clone ID: TFbOSC401583j.C1.o44.fg
atggcgtctctactcggactcctcttctcttctcttctcttctcagagcgctgcgaggcaaggaggcgagcaagaagcggcggcgaggttgccatggacgaggcggaggcggcggcggcggcggcgaagatggacgagctggcgggaggaggaggaggaggcggcggcgactggtcgtacctcgcggcggacgcgctggcggcggcgtcgttcacggcgttcccgttccaccaccaccaccaccaccaccaccgcgacgtgctctcggcgtcgaccccgtcgtcgctgctcctcaacatggacgcggccaccgccgcggccatgttcgacttccaggcggccttcccgtcgtcctccgtcccgccgccgccgcccacgacgacggcggcgctcccgccgttccacgacttcgcctcctccaacccgttcgacgacgcgccgcccccgttcctcgcgccgccggggcagaagctcgggttcctggggccccccggcggcgcgttcggcggcgggatggggtgggacgacgacgacgagatcgagcagagcgtggacgcctcgtccatgggtgtctcggcctcgctggagaatgccgcgcccgtggcggccggaggaggcggcggcggtggcggcggcggtgggaggggcaagaagaaggggatgccggccaagaacctcatggcggagcggcggcgcaggaagaagctcaacgaccgcctctacatgctgcgctccgtggtgcccaagatcagcaagatggacagagcttctatccttggtgatgcaattgagtacttgaaggagctcctgcagaggattaacgatcttcacaatgaacttgagtctgctcctagctcttcgcttactggaccatcatcggctagcttccacccatcaacacccacattgcagacgtttcctggccgcgttaaggaggaactttgcccaacctcatttccaagccctagtggtcaacaagccacggtcgaagttaggatgagggaaggtcatgcagtcaatatccacatgttctgcgcacgcaggcccggcattctgatgtccacattgagggctctcgacagccttggcctcgggatcgagcaggcggtcatcagctgtttcaatgggtttgcaatggatgttttccgcgccgagcaatgcagggatggtcctggactcgggcctgaagaaattaagaccgtgctcctgcactctgctggccttcagaacgcaatgtaa

SEQ ID NO: 11938 - DNA, 252 bp, Oryza sativa
  Clone ID: TFbOSC9102j.C1.o1.fg
agaagaagggataggatcaatgagaagttgagagcattgcaagaactggtacctcattgcaacaagactgacaaagcatccatactagatgaagcaattgagtacttgaagtccctgcaaatgcaagttcagatcatgtggatgactaccgggattgtgccgatgatgttccccggtacccaccagctcatgccaccgatgggcatgggattgaacacggcatgcatgcctggggtcaagctcaaggcctga

SEQ ID NO: 11939 - DNA, 1755 bp, Oryza sativa
  Clone ID: TFbOSC416036j.C1.o25.gm
atggaggaagactgcaagtgcattgaccgggcaaaggtggcccagccacacgccatcattaccaacggttaccatgcaggggcagtttgctggcgctggttggggaagtgcggcggcggccctagcggctggcggcaccgagccacggcacatcggggaagtgcggcggcagtgacggcaatggccctagcggctggcgacgccgagccactgcacgtggctggggaatggattgcaccggagatcggaatgggcggcttcgcctaccccttcacgccgtcgccggcgtggtcgcgggacgccgtgttcgctggctcgccgtgggccgcaggcggcgtctcctccctcgccgacgctttggtgagctacggtgccgtcgacgacgaggaggccgcgttcctcggcaagaccgccgcgtcgtctcccagtacggcgaggctgcacgagcagcagcagctgctgctggaggctgagctgctgcgccacggcgacggcctcggcttcgccgcgatggacgacgacggcggcgccgcgatgctcggcgcgctggagccgtgcgccatgccgctcaccgacagcggcggccccccggtcatctgcagcagcagctccaacgacagcagcgggagcgagcactccgccgccatgcctgcaggaggcggcttcctcgtcggagagcagcagcagcacgtgccgccggcggcctacgccgcgggaggtgtactcccgtccatggccgcgggagaagaaacgccgcagagcttcggctttggcagcctcttcaatggcgatctcctgcaggaggcgaccgtgagcaagtatcatcatcatcagcagcagcagcagctgggcgttgtgccttcgtcgcagccgcatcatctgaatgatgacatcgatttcaacactggaaaattgatgtcttttgcttctggacagcagcacgttacccccagcattgacagcctgcagatcgaccagaaggaattcagcagtggcctgcaccacctcaatctctcctcgctgatttctggaccactcgcatcattcaatgcaacacagagccatagacagcctgctgaagcttgcggtggcaaaaatggcggcgccgctccatttgtgaacctatctgaggtgctaccaaagggcaatgggagtggtagtgctgggaatggagcacccaagcctcgtgtcagggctcgccgaggccaggccaccgatccccacagcatcgcagagaggctccggagggagaagatctctgacaggatgaaggatttacaggagcttgtcccaaactcaaacaagactaacaaggcatccatgctcgatgagatcatcgactatgtgaaatttctccaattacaagtcaagagccccgggtttctcctgtccccaagatcatcatcaggagaaaggcaggcaggagcaggagcagtaacaggagggctccccggcgatcagccggagctcctggacggcggcgccatgttcgagcaggaggtggtgaagctgatggaggacaacatgacgacggcgatgcagtacctgcagagcaaggggctctgcctcatgccggtggcgctggcgtcggcgatatcggcacagaaggggacgtcctcggccgccgtccgaccggagaagaagaagaacggtgatggcgatggcggcggcgacgaggaggacgtgaagggagagtttgacgcaccgaggaggcctcctgtcggccggccgaaggagatgaggtccagagtctaa

SEQ ID NO: 11940 - DNA, 1092 bp, Oryza sativa
  Clone ID: TFbOSC400621j.C1.o27.fg
atgtgggaaggcgggagccacgacgccgcggcgcagctgctgccgtggttcgtcggcgagccggcagcggcggcggtggggggatacggagggtgtgtcgacgtggtcgggcagggcggggtgttcgggttcggtttcgaggccgcggcggcgccggtggtaaccaggcagcagcgtggtggcgcggcggcggcggagggatcatcgagaggcggtggcggtaagccggcggtggtgtccgggctgctcggcagcctgcaggcggagctggggcgggtgacggcgagggagatcatggacgccaaggcgctggcggcgtcgcggagccacagcgaggccgagcggcggcgccggcagcgcatcaacggccacctcgccaggctccgcagcctcctacccaacaccaccaagacggacaaggcgtcgctgctggcggaggtgatcgagcacgtgaaggagctgaagcggcagacgacggcgatcgcggcggcagcggcggcgggggattaccacggcaacgacgaggacgacgacgatgcggtggtggggcggcggtcggcggcggcgcagcagctgctgccgacggaggcggacgagctggcggtggacgcggcggtggacgcggaagggaagctcgtggtgcgtgcgtcgctgtgctgcgaggaccgccccgacctcatcccggacatcgcccgggcgctcgctgcgctccgcctccgcgcgcgccgcgccgagatcaccacgctcggcggccgcgtccgcagcgtgctcctcatcaccgccgacgagcagcagcagcagcactgcgacgacgtcgacgacgacgaggacgggcatcgcctccttcttcgccacggcatcgacggcgccggcgccgccgccgacgacgacgacgagtgcgcggcgtctcaccggaggcacgagtgcatagccacggtccaggaggcgctgcgcggcgtgatggaccgccgggcggcggcgagcagcggcgacacgtcgtcgtccggcggcgctgtcgtcgccggcggcggcgggggcagcatcaagaggcagcgaatgaactacggagtgcacgagcaatgctcggtgtag

SEQ ID NO: 11941 - DNA, 648 bp, Oryza sativa
  Clone ID: TFbOSC900054j.C1.o12.fg
atggtggctgcacggagcggcgacgacgcggagctcaggttggacgtcgagtgcttggcggccgcgccgcggtggaccagggcgagaaggagccacagcgaggcggagcggaagcggcgggagcgcatcaatgctcacctcgacacactgcgcggcctcgtcccctcggcgtcccggatggacaaggcggcgttgctcggggaggtggtgcggtacgtgcggaagctgcgcagcgaggcggcgggcagcgcggccgtcgtcccgggggaaggcgacgaggtcgtcgtagaggaggaggaggtggaggtggaggggtgcagctgcgacgccggggagaggcaggcggcgaggcgcgtgaaggcgtcggtgtgctgcgccgaccgcccggggctcatgtcggagctgggcgacgcggagaggtccgtcagcgcgagggcggtgcgcgcggagatcgccaccgtcggcgggaggacccggagcgacctggagctcgacgtcgcgcggacggcggcggcgggaggaggcagcaacggggcgtcccagctgccggcgctgcaggccgcgcttcgcgccgtgatcatgagccaggaggagctgctcgccgtggagagctacaagcagcgccgcttctccgcggatttcgcctag

SEQ ID NO: 11942 - DNA, 2693 bp, Oryza sativa
  Clone ID: TFbOSC400525j.C1.o17.np
atggtttcaaaacggtgcagtgcatcgactgggaaccgtatcggccgatacagaatcaagcgtcgatacatactggttttgagttcatgtcaagctcgggttaagaattcaaaattattgccatacaaggatggagtccaaaatacagcaattgtatctattaattgggccgatttggtcagatcgcatcagctaggtcggtacgatacgtcatcggcctatcgatcgatcggctatcgtgttctaacttcattttattatttatccttgttggttgcagaatcaaaccaactatcacatgaacacacgcgcacacacgaacgtcgcctagtgctgaaatataaaagcgctcgacgacaaggtctcacatgccgcgcacgcgtctactcaagctcaacacaccaaccacttggcgataatactagtataatagttccacgtgacgcgacttacatcagcaaaagcacacgtgacacgttacacccgtgcgcgcgtaacgaccggtcgtcgtgctgcgcggctggcgcgcttcgtgtgtgtcgtactcgatcgtactacgtagtaaagcacggtagcagcgccgtaggttgtatatatataagcgcagagacgcgtgggagctggcgccacggcatgcatgcacagccatggagaacgacgacgacgtggagcatcccttctactacttcgtccacgacgacgcggccgccggcgtcgacgaccacgaggagttgctggcaagcctcggcttcctcctccctcctcctcctccgccgccgccgccaccgcagcctgatcagggaaggagcgccttcgcggcgtaccagagtaccgcggcgatggcgtcgtcgtcgtcgtcgtcggagtctctgagccggcggtaccactcctctgcgtcgaacgtccaccggagaatgcacaggttcctcaggagcatctatgacgacgccggggacgacgcgggggcaaccgcggaaatgcagccggcggagggcgagcagcagcaggcggcgccgagcggcggcagcgcgcggttccggcacatcatgcgggagcggctgcgtcgggagcgcctcagccagggctacgccgacctccaagccatcctcccaaccggcgcatcatcatcaaaagtactcgtaaaatcactcatcaggaactacatgagcggtggcaagaacaccatcgtcgccgcggcggcaaactacatccgggagctggaggggaggaaggggtggctctgcgcgcagaacgagttgctggagcggacgacgccgaagcccggcgccggcatggtggtgaaggtgcgcgccgagagtgagctcggctcgacggtggacgtgttcgaggcggtgctccggcggctcaaggccatggacgagctgcaggtgacggcgatccagtcgtggttcggcgccggcgggatgtggatggacgtcgcggtggagtccaagagacgtgccgcgtgtacgtacgccccacctcgctggaaactgctgagagagaccagacgagtcaaacgaggtcgcagcagtagaattgtcaaattaatcttccttcagctatcggttgcgtctacatcagcaaatgattctccaatcgcgagccgtcacgcgatctgtactacggagtatagtgcctttcagctcgatcgcccccctacttccaggcctcggcacggccacgcgccgtgttcgcaccggccatcacacgcgcgcggtcacggccgcaaaattaaaggaagtcagcgatttggggcgtttttgcggggagtacgtgcgtgctctcgattagcgggaggcgcgcggcatgtcgacgcgcacgtacgtacgtacgtatacgcacgccggtacacggtgggttcgagcaatggaccgaccgacacatgtcatgtacgtgcagacggtgcagcggttgatcgcgtaaggccgattgctgctgtgtcttcttcctgtccgatgcacacggcgcgcggggtcacacccgcaggggagagtggggaggggggaggtcagggacgagatgccgcacgtcgacgtacgcacgcacgcacgccaggagagcaatggaccgctggacgccatgtcatatcacatatgtcacctgacatacgtgcagtggttgatcgggaaacacagttgcttgtgtgttttcgtcgccgtgctgttcgctacgtgttgtacaggaatgaacacgactgctcgatagtagcagggcgccaggatgacgatgggaagcggcagcggcgggacgacaacgtttgtcgcggagtggttggtcgagcggggatgcagagcggcggtggagaatacgttcgatccagcggcggcccttcctctccccaccgtcgcggcgacgccatggacgagctcgattgcggtgagcaccaactcaacggcaccaccagtgtggagatccaccttgaggatggccctcgagtatgtgcttgtactgcgttggcatcagctctgagattgccagcgctccacccactgcccttgcaccctgcccaagtgccaatcgaggttggtggcgtggaaggtggcgatggcggtaaggttgaagctggcgccgttgaggacgtcacaaaggaagttaaaggcgaagaggagcacgaagaggtggcaaacggtgacaaagagagcgtagtggatcccttcctagatgttgaggtaggaggtgactaccgctat

SEQ ID NO: 11943 - DNA, 1275 bp, Oryza sativa
  Clone ID: TFbOSC400283j.C1.o44.fg
atgagcagcagcagcaacaacaacaagaagatgaaggccccactgagcttcgctagcagcaggcagggctccggcggcctctcccagatatccgaggacggcatcccggacctcactgacagcatccatggcgccgctcatcatcatgggcgctccgaggagaacgtctccacccacgaccacgtcgtccgctccttctcctccggtgggttctcgatcgggtcatgggaggactccaactccatcgtgttctccacgtcgacgggcaaatcaggagcgcacggcaacgacgacatcatcgccacccttagcaactacgaatctcagcttgttgcgcccagggagatggctggcgtagagaaatacctgcagatgcagcacgaccaggtgccattcagagtacgggccaagcgtggatgcgcgacgcacccacggagcatcgcagagagggagagaagaacgaggatcagcgagaagctcaggaagttgcaggccctggtgcccaacatggacaagcaaacgagtacttcagacatgctggacttagcagttgatcacatcaagggactgcagagccagctgcagatcattagacattatccagaaaatttacagtgttggtccggggtagcaacatgcatgggtccttggaaaggacgatttaccactctggctggccgttctgtgctggtccagtcggttctcttctccattccagtccatgaatctatggcgatcggcctcccagtctgggttattaaggccattgacaataagcgtcgcgccttcctgtggacagcgctcagggcacccctactaggatggcctaaaggccccagtctagcagaccgtctccgacatgttcgcggcatccactttctttgtgccgggaaatggttctttctttggtttgcattccagcggcgctgctggacggctgatctcatccagaagcgtggcatcgatagtcacttgggctgccccttttgcgttcaggatcttgacacggcgaaccacatcctcttcgactgcatgttcgctcgctggttccaagactggtggtcgtccttcagggcctgcttacctgagcacctctacgacagcttcgactccctagtgttcctggtctcttggcgtctgtggaaggagcggaattctagggttttcgactccgctctctcttcgatctcagtggttctagagttcatccattcggaggggcatatgtggtctttagctggcgtcgtcgcttttggggatttgttgggagtctag

SEQ ID NO: 11944 - DNA, 1485 bp, Oryza sativa
  Clone ID: TFbOSC900117j.C1.o7.fg
atgaaccagttcgtccctgattggagcaacatgggtgacgcatccaggacactcggcgaagatgacaacctcattgagctgctctggtgcaacggccatgtcgtcatgcagagccagaatcaccaccggaagctgccgccgaggccgccggagaaggcggcggcggcggcggtgcaagaagacgaggccggcctgtggttcccgttcgcgctcgccgactcgctggagaaggacatcttctcggacctcttctacgaggcgcccgtcgcggcgacggcggaggcggcgcctgctggcccgggcgcgggcgccgacggcgaaggaaagacttgcaagggcgacgcggcaatggcggaggaggagcgtggcgggccgggcgcggcgtccgaggcgccgcgcgagctgatgccgccgcccaagtcgacgaacgcgtcctgctcgaggcagcagacgatgagcctggcggacggcggcgacaacgccggggacctgtcggagctcgtccgggcgaggaggtcgtccggcggcgcggctcggcggaaggcggaggccggcggcggcggcggcggcgcgtcgtcgtcgatgctgagcgcgatcgggtcgagcatctgcgggagcaaccaggtgcaggtgcagcagcgcacggcgagcgagcccgggcgccgcggcgcgccgccctcggcggtggggagcgcgaacgccatcccctgcggcgggcgcgaccacggccacggccacgaggcgaccaccgtggcgtcgtcgtcggggcggtccaactgctgcttcggcaccaccaccaccacggagccgacgagcaccagcaaccggagcagcaagcgcaagcggctcgacaccaccgaggactccgagagccccagcgaggacgcggagtcggagtcggcggcgctggcgcgcaagccgccggcgaagatgacgacggcgcggaggagccgcgccgccgaggtgcacaacctctccgagaggaggagacgggacaggatcaacgagaagatgagagccctgcaggagctcataccacactgcaacaagactgacaaggcgtcgatgctggacgaggcgatcgagtacctcaagtctctgcagctgcagctgcagatgatgtggatggggagcgggatggcgccgccggtgatgttcccgggggtgcaccagtatctgccgaggatgggcgtcgggatgggggcggcggcggcggcgatgccgaggatgccgttcatggcggcgccgcagccggtggtgcccacaccgccggtgaaccaccttgacctgggcgtcaaccacctgcagccgccgccgacccagggagtggggtattatccgttgggggccaaggccgtgcagcagcagcaaaatccaccacttcacgtgccaaatggaagcattatgcctcctcctgaaaatgcacccaacacaggatcaggtatgggatccttctacttctacttctacttctcttccgattaa

SEQ ID NO: 11945 - DNA, 1188 bp, Oryza sativa
  Clone ID: TFbOSC412646j.C1.o13.fg
atggacggcggcagggtcgggggcgactacatttccagcctcctcagctcctccccccggctcgacttcggcgtgccggtgctggacgccatcgtggcgccgggaggcggcggcggcggcggcgactgcggcctcgacaagctctgcggcgacccggggttcgcggagcgcgccgcgcggctgtccagcttcaacaacggcggcggcggtgttgggcagcggtacggcggcgcgggggcggggctcttcgggatgcctcctccggctcccggcgacttcgccggaggtggctccagggaggcgtcctccgtgtccgaccccgcctcctcggcgatgaaggacgccgccgccaatgccaagaagaggaagtccacggcggcggcggccgccgccgccaagggcaaaggcaaggagcctccggttggggaagagaaggaatcagatggcaagaggtgcaagacgggcaatggcgagaaggagagctcggtgaagccgaaggcggagcaggccgggagcgacagctccgtcgaggacggcggcggtggcgggcagaagcaagggaaggggaagaatgccaagccggtggagccacccaaggactatgtccatgtccgggcgaggcgaggccaagccactgacagccacagcctcgctgagagggtcagaagagagaggatcagccagaggatgaaggttctccaggacctggttccaggatgcaacaaggtaattggcaaggcactcatgcttgatgagatcataaactacgtgcaatcgcttcaacggcaagttgagttcctgtccatgaagctagcaactgtgaatccacttgatttcagtaacctgcctactctgctgcagaaagatatgttccaagcatgcggcccttcagcgagctcggttttctcattagaaagctccaattctgcttttcggtttgccgaacaaggagatgttttccaacagtttgctcaaaacagcatggaaagccagtgcaccctgaatcagttggacctggctctatctcaggctacaaatgctgcacagtatgcttttcaagatggaacagccggcgcaaacttgcagcaaaggaacttctgggaggatgatctccaaagtgttttccatattgagaatggacagagccaggagaatggggtttcagcaccaaacttccatggttggtaa

SEQ ID NO: 11946 - DNA, 711 bp, Oryza sativa
  Clone ID: TFbOSC406614j.C1.o6.fg
atggcctccccggagggctccacgtgggtcttcgactgccctctgatggacgacctcgccgccgccgccggcttcgacgccgcccccgccggaggcttctactggacgacgcccgctcctccgcaggcggcgctacagccgccgccgccgcagcagcagcccgtcgcccctgccaccgcggctccgaacgcctgtccgagatcagaaagtggcactcgaccaagctccaaagcatgcagggaaaaagtaagaagggacaagttgaacgagaggttcttggaactgggtgctgtcctggaaccagggaagacacccaaaatggacaaatcgtctatattgaacgatgctattcgtgtaatggctgagctgcgtagtgaggcacagaagttgaaggaatcaaatgagagtctccaagagaaaatcaaagagttgaaggctgagaaaaacgagctgcgtgatgagaagcaaaagctgaaggcagagaaagagagcctggagcagcagataaagttcctgaatgctcgaccaagcttcgtaccacaccctccggttatcccagccagtgcattcactgctcctcaagggcaagctgccgggcagaagctgatgatgcctgtgattggctacccaggatttccgatgtggcagttcatgccgccttctgatgttgataccacagatgacaccaagtcatgccctcctgttgcataa

SEQ ID NO: 11947 - DNA, 771 bp, Oryza sativa
  Clone ID: TFbOSC32412j.C1.o18.fg
atggacccggccccctcgctcgcggcggagctctggcggccgcatcaccaccgccaccacttcgaggcgtcgtccgtcgtcaccgaccaggggagcggaagccgcggcggaggaggaagcgggcgcaggaggccgcggagcgacgcggggcccgaggacgacgacttgtccaaggtcgtctccacctccgccgcctccggcggcggcggcggcggcgggcaggactcggatgctccagaagcaaaacgtttgaaaccaatgaaatctagtgataagaatgatagtttaaggacagaagctggaaccgattcaggaaacagcagtaaggctgctgataaaaatgctacaccaccagagccaccaaaacaagactacattcatgtgagggcaagaagaggtcaagcaaccgatagccatagccttgcggagcgggcacggcgagagaagataagtgaacggatgaaaattcttcaagatcttgtccctggatgcaataaggtcattgggaaagcatcagtccttgatgaaataataaattacatccagtctttacagcatcaagttgagtttttgtccatgaagcttgaagcagttaatagtcacatgattaacggaattgttgcttttccatctaaagattttggtgctcagccatataacacagctgctggtttgacatttgatccacaaacaacaagggaatttgcccagggttcaacatcagagtggcttcacatgcagattggaaatgcatatgaaagagtgacatga

SEQ ID NO: 11948 - DNA, 1089 bp, Oryza sativa
  Clone ID: TFbOSC400939j.C1.o8.fg
atggcgcttgacaccctgtgcagcgccggcggcgacgtcctcatctacgacacgttcaacgcctccgccgcggcggcggcggcggttgtgccgccggcgagcttcctcttcgggaataataatgccggcggcgcggcggggacggagacgagggtgcaggtggcggccggggcggtgccggaggtggaccagctgctgaagcaggctcagcagccggggaggaggaagcggcggcggcgggcgaggagctgcaagagccgggaggacgccgagagccagcggatgacccacattgccgtcgagcgcaaccgccgccgccagatgaacgagtacctcgccgtgctccggtcgctcatgccggagtcctacgtccaccggggcgaccaggcgtccattgtcggcggcgccattgatttcgtgaaggagctcgagcagctgctgcaatccctcgaggcgcagaagcgcacgctgctgatgcagccgccgccgccaccgcagcagcagcgggagcccaagtgtgatgccgcggactccacgagcgcggccgatcaggagactccggcggcggcggcggcggcggcggcggctgatggaccgccgttcgcgcggttcttcacgtacccgcagtacgtgtggtgccacaacccggcgcaggacggcggcgggggcgggggcgcggcggcggagaaccgcgccggagtggcggacatcgaggtgagccttgtggagacgcacgccagcatccgggtgatggcggcgcggcggccggggcagctgctcaagatggtcgccggcctgcaggcgctccggctcaccgtcctccacctcaacgtcacggccctcggctcgcttgccctctactccatcagcgtcaagagattccatggcggaaaggccattgcttcccttggccccttgggtgtgttctttctctgtgctctgtatctgtggtacagtactacagtggtggaggaagggtgcggcatggcgacggtggacgacatcgcagcggcggtgcaccacgtgctctgcatcatcgacgccgaggcggcgtcgcagatgctgctcgccggggaggcctccggttag

SEQ ID NO: 11949 - DNA, 1455 bp, Oryza sativa
  Clone ID: TFbOSC401130j.C1.o60.fg
atgtttagatcagctgttgcagtgagccagttagctacgacgacgacggtgtggatggatcgtggcttcaacgagatgatcttgagcgagagcgtgtggaatggcggcggcggcggcggagatggagatggtggggcggtggtgctgccgccggaggtgggtggtgtcaatgcggtggacgggagcggcatgacgatgctggagaggctggtgctcgacgaggccctggcggcggcgatactcgagctgcagggcatccaggcgccggggtgcggcgggggcggcggcaaggtggcggtggtgccgccgccgacggccggtgacggcggcgtcgaggcggcggtcgccttcgcggcgatggcgacggggacgcctgcctacgctgacgttgacgcggatgtcctgcagcgacagcggcagcatcaccatcgccaccagggcgcgatggggatggctgccgagtacgacgtcgcaccagcaacaccggctgtcacgttgagcgctgtaccaccaccaccaccaccacctgcgttcgcgaccgcagccgcctccgttgacggcggcggcgccatggacgcgacggtcttctccggcatcggcaacgacgacgtcgtcgacgcggtgagcgccacggtggcgatgactactgccactgcaacgaccagccagtgcgaacgagtcagaggaggcggcggcggcggcggatgtggacgtaagcaacgccggccgggaagaaagcggaaggccgccgagccaaccgccgccgccgccgcggcggacatgtcgtcgcaggacaaccctctctgcagcctcctggcgtcgaacaccgccggcgccgacggcggcatccagatcgcgttcagcacgagcgccccggcgtcgaagcgggcgaagccgtcgctgagcagcagctcgtcgagcatcagcttcgacggcaggggccccggcggcaactgcggcggcggcggcggcgacgacccactgtacgagcccgacacggaggcgctggcgcaggtgaaggagatgatctaccgcgcggcggcgatgcgccccgtgaccctcggcgccgaggacgccggcgagcgcccccgccgccgcaacgtgcgcatctcctccgacccgcagacggtggcggcgcggcagcggcgggagcgcatcagcgagcgcctgcgcgtcctgcagaagctcgtccccggcggcgccaagatggacacggcctccatgctcgacgaggccgccaactacctccgcttcctcaagtcccagatcagggagctgcaaaccctagaccgccggaactacccgaacgccgccatgtccatcaacaccgccgccgccaccaccatggcgacatccagttcaccaacctacaacaacagcaacgccgccatgccagccttcgccttcccggaaaccctaggatgcggaggaggaggagtcgagcagctgatctaa

SEQ ID NO: 11950 - DNA, 1273 bp, Oryza sativa
  Clone ID: TFbOSC29597j.C1.o1.np
ccctgatctgccgctgatctgctcgtgttgacctcaatcttgtcatcgtcaggtccgtcgtctcgctcgccgtcgccgtcgccggcgtgcagctgctgtgattcagatagcttcctgttcttctcctccagctcagctatcctcgccttgaggaccttctcccggcgcttgcgctccgacaagacgtgctgcagctgcagctgctggttctcgccgccgccgccgccggcggtggccgctggcgaagcccgcgcggccatctccatgatctggtagtactgcgcgagcctcgccgcgtggatctttgacagcaccgatatggccttcttgaacgccctctgtccaccgccgccgccggtggcggtgcccccgcccccgcgcgccgccgcgccgcaaaccatcgagccccccgccgccgcgctgcgcgctaaccaggcccccaccgccgtgccgcccaatgccccatccagccccacgtagccgcaccacgcccccatccaagccgaggccgccgcgggcacatccccatcgaggagcacctgccttcgtccccacctttgatggccgtctccatcctctgctccaggtggaacgctatacacgaagtcgtagctccgtttgtgacccccgcctactcctcctaggacgccactaccaaagcttaaacccaaagcaaaccagaggcagatcagatcagagctagtagcagcaagctcgcgatctcccccaacttctagaaccttctagaaccgccgaatgcggctccaccacggccgccaccaccaccaccgacgacgacgaggccaagccgcgccgcccatactccactttcgcctccccgcgcgcgcccacgtccgcattttccgccgccttctcaacccaccgcctcctcgtcctcttctccgtcgcctgcctcctcgtcgccgcggcctccctcgccttcgccttctccgcccgcgccgcgaccctgcagccgccgcccctcgccgccgtggccgaagccaccgccaaggtcgccttccgctgcggccgcgccgaggacaccctccgcgccttcctcgcctcctcctcggggaactactcctccgcggcggaggggagggagagggagaaggtgctcgccgtcgtcggggtgcacacggagatcggatccgccgcccgccgcgccgcgctccgggccacctggttcccgcccaagcccgaaggcatcgtaaggtttccccccacattgctttcctccattcccacctaccaacttggatctagctactcg

SEQ ID NO: 11951 - DNA, 1080 bp, Oryza sativa
  Clone ID: TFbOSC29597j.C1.o3.hg
atggaggagcacgatcatcagtacgccacgccgccgtcgccgtcgtcgtcctccttccgctccttctccgccgggacgacgacgacgacgacgagccgcgacgacaactcgtcgctcatgctcgccgccgccgccgcctcttgccaccaccagacaacggaggtgtcgtcgcagatactactaccacggccgggacaagcagcacggcggagcagcggcggccatggcgccgccgccgccgccaccgcgttccggccgtactcccggtacctgggcccgaagaagcatctcctccggcggccaggggcggcgaccaccgccaccggcggcggcggtggacagagggcgttcaagaaggccatatcggtgctgtcaaagatccacgcggcgaggctcgcgcagtactaccagatcatggagatggccgcgcgggcttcgccagcggccaccgccggcggcggcggcggcgagaaccagcagctgcagctgcagcacgtcttgtcggagcgcaagcgccgggagaagctcaacgatagcttcaaggctctcagggacgtgctcccacccgccaccaagaaggacaaagcatcagtgctgatgagagcaaaggactacgtgaacgtcctcaaggcgaggatagctgagctggaggagaagaacaggaagctatctgaatcacagcagctgcacgccggcgacggcgacggcgagcgagacgacggacctgacgatgacaagattgaggtcaacacgagcagatcagcggcagatcagggcagttcaccgaacaagtgtcaagagcttcatctgaagatagtgctggggtcgtcgtcggggtgcagtgccatggatgccgtggctggcatcctgcagggtctcaacgagaagagggatgtcagcttgttggccacagggcataattccagcagcagcagcagcagtggtcgtcgtcgtcttcttccccgtgcaaagtcttctcaacaacctgcctccagcagctgcgacgaggaaattctcaaggaatctgtagttaaagatgacagtccagcagctgtcaaggatgtgatgcaatcggagaca

SEQ ID NO: 11952 - DNA, 672 bp, Oryza sativa
  Clone ID: TFbOSC412252j.C1.o6.fg
atggtgacggacggggagtgctcggcggcggcggtgaggaagggtgggtcgccggcggtgcggagccacagcgaggcggagcggaagcggcggcagcgcatcaacgcccacctcgccacgctccgcaccctcgtcccctccgcctcccggatggacaaggcggcgctgctgggggaggtggtgcggcacgtgcgggagctgcggtgcagggcggacgacgccacggagggcgccgacgtcgtcgtccccggggaaggcgacgaggtcggcgtcgaggacgaggacgacgacgagggcgagcgcgacgaggggtgttatgtcgtcggcggcggcgacaggcggtggcggcggcgcgtcagggcgtgggtgtgctgcgccgacaggccggggctcatgtccgacctgggccgcgccgtgcgctccgtcagcgcgcgccccgtgcgcgccgaggtcgccaccgtcggcgggaggacgcgcagcgtcctggagctcgacgtagtcgtcgcctccgacgccgccgacaacgacagggccgtcgcgctctccgccctccgcgccgccctccgcaccgtgcttctcaaccgcgaggagctcctcgccgccgccgccgccgccgccaccgacggctacaagcggccacgcttctcgccgaggtgtagcagcctaacctaa

SEQ ID NO: 11953 - DNA, 939 bp, Oryza sativa
  Clone ID: TFbOSC401035j.C1.o20.fg
atggagctccttctccccaccgccgccgcctccgcgccgccgcccccgcccgcgttccccgccgacccgcacctcgtcgaccgcgcagcccggttctccgcgttcgcctccccttcgccgccctccccgccgcctcctcctccccctcccccttcctcctcctccaagcgcaagcccgaccccgcctccaaggggaaggcggctgcgaagaaggggaagacggcggcgagcggcgaggacggtggcgacggcggcgaggacgagaagccggcgtacgtgcacgtgagggcgagaagagggcaagccaccgacagccacagcctcgccgagcgggcgagacgcgagaagatcaatgcgaggatggagcttctcaaggagctggtccccggatgcactgtttctgttcggtccaaaggcacactaggagtccaacaaagagtaatgccaagcgttggtgtgcagcagcagcagcatgtggtagctccattctttatatccaaaactgaggtatcaggaacagcactggtactggatgagatcatcaatcatgtccaatctcttcaaaggcaagttgagtacttgtcaatgaggctcgcagctgtaaatccgagggtcgactttggtgggctagacaacttcttgactacggagtgtggaaggataacaggcttgaactacaagaatggaatggatttggagcaggtcacctggccagacatgggcgtccatggagcaaggaatctcatgcaactacaacagcagttctggcatggtgatttagcacacccgctccagccgccttcacagtgggaaaagcggacggataccaatccccctgtctttagcaattcaagttcctccctcttcggctatgatctagcaagctctgccttgattggaccacaacttttgtctctttcgttgttccagagtgtttag

SEQ ID NO: 11954 - DNA, 1182 bp, Oryza sativa
  Clone ID: TFbOSC400044j.C1.o26.fg
atggagaccttcggctgggccggcggcgggcagctgatgcaccacgacgacatctacttgccgcgctcggtggggtgcgggcggccgttcgagctggacgacgcgttcctgggcgcgtgcttcggcgcccagctccagtgcgacggtggcgtcggcggcggcgacggcggcgggtgtctgcagggtacctcgggatttggcgccgtggctggagacccgttggggttgctgtgctcgggggacgtgtttgcgtctgtcgccgagggcgccggcggcgcgcacgacgacggcctcctcgacgcggcgctcgccttctcccggaatcagctcgggggcgccgcctgcgacgggagcgacggcggggccgtgtcgaacggcgccatgctgtccagctacagcggcaccaccggcggcaacatctcctccggcgagtcgaataactacagcggcggcggcggtggctacgacgccgaggtggtgtcgccgacgtccaccatgtccgcagccacacagtcgctccaccccaagcgaaagctatacgacgaccaccaccaccccgccggcatagcagccgcagccgcagcgccaccgctggcgccgtgcccacgccccaccaccggcgccgtcgccgcgaagcggagggcttccacgtcagcaacaagcatcaccttcggccaccagccgcaccaccaccacgcgggcgccaccaccgccgggtacgagcctgacatggaagccatggcgcaggtgaaggagatgatctaccgggcggcggccatgcgccccgtccacctcggcacggaggccgccgccgacaagccccgccgcaagaacgtgcgcatctcgagcgacccgcagacggtggcggcgcgtctccggcgggagcgcgtcagcgaccgcctccgcgtcctgcagaagctggtccccggcggcaacaagatggacacggcgtccatgctcgacgaggcggccagctacctcaagttcctcaagtcccaggtccaaaagctggaaaccctaggcaccaccaccaccacgtccaagttaccgcagcagtattacagcggcaacatcaacagcagcaataatcaccatggattcctcggattcgcagcaaataacaacaccatttcagctggctacgcaaattctaatgctggaaatgcaacgaaactgttgtag

SEQ ID NO: 11955 - DNA, 1965 bp, Oryza sativa
  Clone ID: TFbOSC401892j.C1.o33.fg
atgcccggctcccgagaaatgtcaatcattagtggaggtatgtggtccgacggcaacgacttcgccgagctgctgtgggagaacggccaggcggtggtgcacgggaggaagaagcacccgcagccggccttcccgccgttcggcttcttcggtggcaccggcggtggcggcggcggcagcagtagtagagcccaggagaggcagcccggcggcatcgatgcgttcgccaaggtggggggcggcttcggcgccttgggcatggctccggcggtgcacgacttcgcttctggcttcggcgccaccacgcaggacaacggtgatgatgacaccgttccgtggatccattaccccataattgacgatgaagacgccgccgcccctgctgctctcgcagcagcggactatggctccgacttcttctccgagctccaggcggcggcggctgccgcggcggccgccgcgccgccgaccgatctcgcctctctgccagcctccaatcacaacggcgccaccaataacagaaatgctccggttgccaccaccaccaccagggaaccctccaaggaaagccacggcggcctgtcggttcccaccacccgagccgagccgcagccgcagccacagctcgccgcagccaagctgcctcggtcgagcggcagcggcggcggcgagggcgtgatgaacttctcgctcttctcccgcccggccgtcctggcgagggcgacgctggagagcgcgcagaggacgcagggcaccgacaataaggcgtccaatgtcaccgcgagcaaccgcgtcgagtcgacggtcgtgcagacggcgagcgggccaaggagcgcaccggcgttcgccgatcagagggcggcggcgtggccgccgcagccgaaggagatgccgttcgcgtccacggcagccgctcccatggccccggccgttaacctgcaccacgagatgggccgtgacagggcaggccgaaccatgcctgtccacaaaaccgaggcgaggaaggcacctgaggccacggtcgcgacatcgtcggtgtgctccggcaacggagctgggagtgacgagctgtggcgccagcagaagcggaagtgccaggcccaggcagagtgctcagctagccaagacgatgatcttgacgatgaacctggagtattgagaaaatctggaaccaggagcacgaaacgcagccgcacagctgaggttcacaatttatcagaaaggaggagaagggacaggatcaatgaaaagatgcgcgctctgcaagaactcattcccaactgcaacaaggcatgctatgttttgcagattgataaagcctcgatgctggatgaagctatagagtacctcaaaacccttcagcttcaagtacagatgatgtccatgggaactgggctgtgcattcctccaatgctattaccaacagccatgcagcacttgcaaattccaccgatggctcatttccctcatctcggcatgggattggggtacgggatgggcgtcttcgacatgagcaacactggagcacttcagatgccacccatgcctggtgctcactttccctgcccaatgatcccaggtgcgtcaccacaaggtcttgggatccctggcacaagcaccatgccaatgtttggggttcctgggcaaacaattccttcgtcagcgtctagtgtaccaccatttgcatctttggctggtcttcctgttaggccaagcggggtccctcaagtatcaggcgccatggctaacatggtgcaagaccagcaacaaggcatagcgaatcaacagcagcaatgtctgaacaaggaagctatacagggagcaaatccaggtgattcacaaatgcagatcatcatgcagaatgttcctgtcctaaaaagatcaatggctgaggaatttcatatggtagaagatgctaccaggttacaagctgtaattcttgacttccagtgcagtttcctatga

SEQ ID NO: 11956 - DNA, 1701 bp, Oryza sativa
  Clone ID: TFbOSC413680j.C1.o2.fg
atgggactgcaagggaataaggcgacgcacgacttcctctcgctgtacgccgccgccgccaccgccacggactactcgccgctcccgcgccacccggactccaagccctcggcgccggcgccgccgcccgctcaagatttcttcctcaagacacacgacttcctgccgcaggtagagaagagagccgaccagacaccaccgccgccgccgccgccgccgccccacgccgcggtcaccgccgagaagcagctgctccaccagcacgcgttggccgccgccggcgcgttcaccatcaaccacgccgtggccgcggccgccaccgccgtcaagcaggagccgcccttcgcgccgtggtgccagcccgtcgccgccgtagatccccgaggtcaccagtggtcgctccccttcgccgcgcgcgccgtcgccgtcgcctcctccaggccgcagcagcagcagcagcagccaccgccgccggagaggaagggtggcggtggattcatggacgccggctccagatccagtggcggcgcgggcttcgacgacgacgacggccatgccgcgcgccgcgaggtctcctcctcgctgaaagagctcacggtcagggtggaagggaaaggtgggagctgcagcggcagcgctggcacggatcagatgccgaacacgccgcgctcgaagcactccgccaccgagcagcgcaggcgcagcaaaatcaacgacagatttcaacttcttagagacttattgcctcataatgatcaaaagagagacaaagcatcatttctcttagaggttattgaatacatacggtttttacaagagaaagtacaaaagtatgaggtttcatacccggagtggaaccaagaaaatgcaaaggttgtgccatggacaaacatctatttccgttcttcctggaaaaatgcgcagaacaaaggccaagttcctgcagatcattcacctgaccctccagaacttctgaaaaatggttccccctatatgttcccttttacagggaactctgataataacaatgcagttgaaactgcagctgcttcaggtgcacaggatcaggcagaaactgatccaatgagtcgtgtgtcttacagatcagtggacactcccagtcccaataatgttgcagacaaagttacatctcagccacacgctcaactggtgagaccatcacctgcagagaatcacacagtaaactgcgacaagttaaataattctgaccttgccatcgatgagggaacaatcagtctatcaagccaatattcccaagagttgcttaacaagttgaatcatgccctggaaaactcgggtatagatttgtcccaagccagcatctccgtgcaaataaatcttggcaagagggctatgaagagatctactcctgctgcaacctccacttctaaggtaggatttatgtctcgtattgacactaagagccactacattatgtttgtggtaattgaaattggagctggcaatggatgttatacatggagctcactgatccggcatctaatagtcaagcaatgggccgtcagcttaggttgggtgatggcgctgaagaacatcgacaagcctcaaagcgacacaaatcagataacagctgatggtttgctcctgaaaaccccagatattcaaccattttttgctcctaactgtgtacggggagccccaaggttttatgtatattaa

SEQ ID NO: 11957 - DNA, 1119 bp, Oryza sativa
  Clone ID: TFbOSC409193j.C1.o3.fg
atggcgcaatgcggcggcggcgacgtttcacgacaccggaagggtcaccttgacaccgtcgagagcctctgccaggggctactcgacgacgtcatgctcgacgacgacaagtgccgcgccatgttcggctacctccaggagtggcaggacctggcaagcatgtgttacgggagcttaggcggcgagccgccgctggcgccggaggccagcaacggcagcggcagcagcggcggcggaggcagcttccggaagaggagaccggacgacgcaaagggtgagagcaacagcatctgcaagaggcagagagggaagcagcaacagcagcagcagccgtgtcatcccgatcagatggcggcggcggtggggaaaggaaggccggagagggcacggccaggagccaagaagaaggcggaggtggcgtcacccaaggattccccggcgacctcggcgtcgacggtgaccgccggccagaagaccgactacatccacgtcagagcccgccgtgggcaggccacggacagccacagcctcgccgaacgggtgaggagggagaggatcagcgagaggatgaggtacctgcaggagctggtgcccggttgcaacaaggtcaccggcaaggccggcatgctcgacgagatcatcaactacgtgcagtccctgcagaagcaagtcgagttcttgtccatgaagatcgcggcatcaaacccggtggtgaacttcaacatcgtcgaggacctcttcggccggcagctcagccaggcggcgtgcaaccctgcggctctgccggccatggcgctgccgatggcgcaggtcgagccttcctgcctccagatgagccccttgcagcagatgcaaacttctgcaggatcctctggctatgggctggagatggtcgtcagtaaccagtactcaccaccgggcgggccgatgtcggtgccggccggtgcatcggtggagccatgcctcaacgtgaatggagctgcaggttgggacattggctctcacggtttgttcagtggatttgatgcaccgtttcagtcagtacagagtgattgtttgctagacaatctcaaaatggaaatgtcccgctcaaagaaggcatctgatctaaggatctaa

SEQ ID NO: 11958 - DNA, 1161 bp, Oryza sativa
  Clone ID: TFbOSC413853j.C1.o5.fg
atggcattcatgaatcgccaagatccagaagcatctgggttcttctccgacgacgactccggccaaaccgccgcaatcgccgccgccgccgccatggagaacgaggatttctcctatatgctgcgtgaatttgactactacacaagcagtgaagatctcttcgagttgatgtggcaaggaggaggaggaggaggagccagcagcttcgaccagccgccgccgccggtttcctaccaccgcctgtcgccgccgccgccggcgatggggacgacgacgacgacgttactgccggagcagccactagttgatgatcatcatctcccagctgctgctgctgctcctccatcggaggaagagatggcagcgtggctctatccgatcgtcagtggccacgaagtcgccggcggcgggtggcggtcgccggaggctcaggatgaccggcgagccgcaccggcgccggagaagaaacagatggagaaaatgccggcggcggcatcgccaacgacgacgatgaataaggatgaaacaagcgacgactccggcgagaggaagaagaagaaggcgtcatcagcggcaggaaaaagcaagcaagcatcaccacgcggctgcaggagctcacaaccttacagaaaaagtggggattcgatcgatgaactcttcactaaatttcataggcggaggttcaagataactgagaggttcaggacgctgcagcgtctcgtccccggatgcgataagtccaaccaggcgtcgacgctggaccagacaatccagtacatgaagtcgctgcagcaccagctcaaggccatgtccgtcgtcggctcgccgccggcgctgctgtaccccgccgccgtgcacccgcagtcgtacatgcatccaccgccaccgccgccgccggtcacgatgccgatgcatccagggatggttcttgctgctcctcctccaggggcggcgccgccgcccggccctccggcgatggtgccattcggagctatgctcccttaccctccctacccggcggtgctgctgccgccggcggcggcgacactgtacggacggccgccggcccccgctcccggcgttgcagctcgtcgacatggatccagcggcggcggcagaattagcaagagcagtagcagcagcctgtgcaagaaattgtaa

SEQ ID NO: 11959 - DNA, 762 bp, Oryza sativa
  Clone ID: TFbOSC400346j.C1.o17.fg
atgtccggtaccccggcggacggcggcggcggaggcggcggaggcggcggagggagcggggacgactggttcctcgactgcggcatcctcgaggacctcccggcggccgcgtgcggggccttcccgtgggacgcatccccgtcctgctccaacccgagtgtggaagtaagcagctatgtgaacaccacctcttatgtcctcaaggaacctggcagtaataaacgtgtaaggtcagggtcttgtggtaggccaacatcaaaagcttccagggaaaagatcagaagagataagatgaatgataggtttcttgaattggggactactttggagcctgggaagccagtaaaatctgacaaagctgctatcctaagtgatgccactcgcatggtaattcaacttcgtgctgaagcgaagcagctaaaggatactaacgagagtcttgaagataagattaaagaactgaaggcagagaaggacgagcttcgtgatgagaagcagaagctgaaagtagagaaggagacattagagcagcaggtgaagattctgactgcaactccagcctacatgcctcaccccacattgatgccagcaccgtacccacaagcaccacttgcccccttccaccatgcccaggggcaagccgcggggcagaagctgatgatgccttttgttggatacccggggtacccgatgtggcagttcatgccgccttccgaagtcgacacctccaaggacagcgaagcgtgcccgcctgtcgcgtaa

SEQ ID NO: 11960 - DNA, 1428 bp, Oryza sativa
  Clone ID: TFbOSC101884j.C1.o4.fg
atggatgaggtgtggtgcagcctggacagcatgccggccgacatcgccgccggcatccaccagccgccgccgcccgacctccacgacccctccttctggccggctttcgccgactgtgctgcgagcttcatcgccggcggcggcggcgacaatgcgtgcttcgacgagctcatggcgggagggtcgtcgggtgacactaggatggtggccatggacgacggcgacgacgggagtggcttcttggtgggggacgccgaggccgagcacctgatgctgtcgtcctcgtcgccgtcgtcgctctcctcgggccgctccctctccatcgacagcgccggctccatgtcctccttctcgctcgacgccgccgcggcgctggcgatgtcgaccctcgccgtcccgcacccgtacccgccgcccgtcgcgcacggcatgttcgcctccggcgacggtggcggcggcggcggcggcgcagtcgacgaccacgaggacgccatcatgcgtgccatgatggccgtcatctcctccgcctcggcctccccctcctcctcgggcggctccgcctcctcgcccaccccgttcagccgggacagcggcgcgcaccaccagcctgcaggtcagccagccatggcggcgccgcagcagccgcgtggagggaacggcggccacgtggtggtgaagagcagcagcagcagcggcggcctcgccgtgccgatggatcagaagcccggcggcggcgggcggggacggcagcaggaggaggcggcggcggcgagcgccaccaacagcagccagctctaccacatgatgtcggagaggaagaggagggagaagctcaacgacagcttccacacgctcagatcactcctcccaccttgctccaagctttacacagtatttgagtggttaccaggaaacaacctgtttcatggaaacggaagtgacaacaaggacaagacgacggtgctgatcaacgcggccaagtacctcaagtcgctggagacggagatcacggagctggaagggacgaacacgaagctggagaagcacatcgccggcggcggcggcgcggcggacgccgccatgagggctcgccgggcgcagcagagggccaaggtgcagatcagcaaggcggcggactcgcagtcgcagcagctggtgagcctgacggtgatggtgatggtggagtgcgacgtggtggagctggtgctccacatcctggaatgcctcaggtggatgaaggagatcagcgtgctgtccgtctacgccgacacctactcgccgcagcttcttctcaaggccatcgccaacatcaagctccagatcgtgggaggagattggaacgaggcgtcgttccacgaggcgatgacgaaggcggcgaacgacgcgaccatttcctgcgccccgctcgcgatcacggcagcacagtga

SEQ ID NO: 11961 - DNA, 1098 bp, Oryza sativa
  Clone ID: TFbOSC400608j.C1.o9.fg
atggatgctaatggcggcaatgggtttggagtagagagcaacgcttcggctgtccatggtggcatggcgatggcttggcaatggcatggcggccagatgagcggcggcagctcgtgcgctgcggcgccgccgccggtgcaacagccggcgatggattctctcgcgtggtcgtcgacggtctcgccgagcaccggcgctgccacggcggcgagcggcgccggcttcttgctgccaccggcagccgtgcgcggcggcttcggcagtttcccggtcaactccggcggcatcgtcgagccggccggtgactgctcgtcggagtccaagaagaggagatcagacgagattgctggaacggatcacgcgaacgcatcgaacgcgcttgccgattctgggaacgagaccgagtgtagcaaagatgtcaacggcgaagtgatcggcccgccggcgacggcggcggccggcggcaagtcgaaagggaagggagccaaggacgccggcgaggcgcagaaggaagggtacagccatgtcagagctcggaaggggcaggcaaccaacaaccacagcttagcagagaggctgagaagggagaagatcagcgagaggatgaagctcctgcaagaccttgtccctggctgcagcaaagtcaccgggaaggcgttgatgctcgacgagatcatcaactatgttcagtccctgcaaagacaagtcgagtttctgtcgatgaagctctcggcagtcaacccaagaatcgatctcgacattgaatcacttgtcaacaattccaaggatgttcttcgttttcccgggcagccttcctctgctcccatgggattctccttctccacggagatgatgccggggctacaattatcacgaccgggcatccttcagggaggtgtccatggcatgatcaatccagatgtgttcaccagcctcatgcagaagcagcagcaaaatgacaagggagcattcagagagcctcagatgcatcagactttggatggatcattccgtaacaccgcacaaatgccgtatccacaggtcatgagttcagaagagctaagcatcaggcaagatcaagatgggtttcacatgtga

SEQ ID NO: 11962 - DNA, 948 bp, Oryza sativa
  Clone ID: TFbOSC102356j.C1.o4.fg
atggggctggatcgctgcgagagcgaggttggcgtgcggtgtccgcgtttgattcgatcggatgctggtggtgatttggcggcgctggggtcgtcggagtcggagcagcccaccaggccggcgcggccgcgcggcaagaggagccgcgccgccgaggtgcacaacctctccgagaagaggaggaggagcagaatcaatgagaagatgaaggccctgcagagcctcattcccaactccagcaagacggacaaagcctccatgcttgacgatgccatcgagtacctgaagcagcttcagctccaggtccagatgttgtccatgaggaatggtctatatctgcccccagtgaacttatctggggcacctgagcatctgccgatcccgcaaatgagtgctgcacttgaccagaatagtgccaaagcatcagatccttcagttgttttgcagccggtgaaccagacttcaggagcacttcttccatttgagctggcaagccaacataaacctctattcttaccaggtgttcctaatgcaaccgctctggagcctcggttccttgtagagtcttcgcgttccaatcttcaatccttacggttcactgaacccgctgagatgatctatcctgatgagatgatgttaaagcaccgcctgacttcagctagtgagagcacaattgtgccaggaaccgatgagaagtcggttaggcagaacacatacatgatgaatgctgatcgttttgatagatatgcactcagcaaagaccagttgcagcacattatgccgaaaaacacagaaagtgtacttgatatgccacacttgcaaagaattctgacaaaggtgttaattgtttcagattataagctgacgattcagcttccaatcttggacaggttgcaaaccagtgacaccaaagttagggtcgagggcagaatcaaagtaaacccatga

SEQ ID NO: 11963 - DNA, 819 bp, Oryza sativa
  Clone ID: TFbOSC404982j.C1.o1.fg
atggtgttatccaaactgaggaggagactcagatcagtcacacccggggagcggaccccgaccgccacggccgatgacagggatgccagagcacagcggagcggcggcggcgacgacgaggacgccacggccgcgccgccgccgccgacgagcagccagctccaccatatgatatcggagcggcggcggcgcgagcggctcaacgagagcttcgagcacttgagaggtttgcttcctccaggatcaaagaaagacaaggccacagttcttgccaagacactagagtacatgaacttgctgatagctcaaatctcggagctcgaagccaagaaccgagcactccaaacccaaatccaccaacgcgccaatggatcatcatcatcgagatcatcaatgatccgaacagtcaacgaggttcaccatcaccataatcaccaatggctagccgtcgccgccgccgccggcggctcgccggagagggtgcaggtccatgtgatcggcggcggtgatcacgacggcggcgcatcggcatcgtcgtcgtcgtcggcgccagaggtgaccgtgagggtggcggtgcgggcgccggagcgcggcggcgccgacgtgtcggagctcgtgctccgggtgctcgcactgctcaaggcgatgggcggcttcacggtggtggccgtcgacgcgaggcagccgggcggcggcggcggcaatggcgtcgctcaggccagcctaacactacgagcaacggtacggatgcttaccctgttgaaacgtatgtttcgtgcaaaaaatcattcttcctctgaccaaattataagattataa

SEQ ID NO: 11964 - DNA, 1122 bp, Oryza sativa
  Clone ID: TFbOSC400679j.C1.o12.fg
atgagcacactagtagacgcgctgtgcgctccctgcagcgacaccgcgctcatctacgacaccttcaacgcctccgccgccgcgagcttcctcttcgacaatgccgccgccttctgcgacgctgacatcctcggcgccacggcgacaggggagaaggaggcgacgtcgtcggccgcggccgcggccgcggaagccgccccgccgaggaagaagcggcggcggcgcgcgaagagctgcaagtcgcgggaggagacggagacccagcggatgacgcacatcgccgtggagcgcaaccgccggcgccagatgaacgagtacctcgccatcctccggtcgctcatgccggagccctacgtccagaggggcgaccaggcgtccattgtgggaggcgcaatcgagttcgtgaaggagctcgagcagcagctgcagtcgcttgaggcgcagaagcgaacgctgctccctcaccacaaggcgagatgcgacgacgcaacgccgatgcataacgccagcggcagcaacgtcggggccggcggctgcatggagcccacgacgacaacgagcaactgcagcagcagcgtcaccgaggacgcgccgtccgccgacgcgcccccgttcgcgcagttcttcgcgtacccgcagtacgtgtggtgccactcgccgcgcgactccaccaccaccaccaccgcggcgtctgcgtcggcgtcggcttcggcgtcgtcgtcgtcgccggccacggtggcggcggcgctccagtcggagcaccgctccgggttggccgacatcgaggtgagcctggtcgagacgcacgccagcgtccgtgtcatgtcaccgcggcggccagggcagctgctcaagatgatcgccggcctgcaggccctccggctcaccgtgctgcacctcaacgtcaccacgctggactcccttgtgctctacaccctcagcgtcaaggtggaggaaggatgcagcctgacgacggtggacgacatcgcggcggcggtgcaccacgtgctctgcatcgtcgacgcggaggcggccgcctcggagcatctcctcgcggcggggcaactggccacgacggcgacggcggtggcgaagagagaactcgcgacgtacatgtactga

SEQ ID NO: 11965 - DNA, 933 bp, Oryza sativa
  Clone ID: TFbOSC400284j.C1.o3.fg
atggcggtcgattggatctgggagaggcgccggagagaggaggaatataatcatcaaatgtcacaagacgaactgcagcaaccaggtcaggtgcagtggacgccggcgccggaagagaagtcggagatcgcggtgcagttcttcaccgcgccgtacccttgccagaacggccagcttgatcacggcgagcaccatgcactaggtggcattggagcgtgcagctccgtgcattggcaacctgaccgtggcacgtgctactggccgccgcctctcagtggggacggcggcggcggcagcggcagcggcagctccggcaccggcgaaggcagctacatcggcgagcgctgctactacgtcggcgagcccgacgtgcccatcggcctcaacctcctcgtcggcgacaatgacggcgccggagtagtactccgtgacgcggcgccgcaggcgaagcggaggactcaggccggccatggaggagatcttggacggcagaagaagaaagctcgagtttcagataagcggaatcaggagagtatgcagagcggcagctgctccgacaacgagtccaattgctcccaagtgaaccgccgcaaggtggatcgtgtcgccggcggcggaaacgggaaggttccggctcgccggaggtcggcgaccattgcccagagcctctatgcaaggagaagaagagagaggatcaatgggaggctccggattttgcagaagctggtacctaatggaaccaaagtggatatcagcacaatgcttgaggaggccgtccattacgtgaagttcttgcagctacagatcaaggtagaagtccaaatagtttgtcatgatcagatgcttagctctgatgagctgtggatgtacgcaccgattgtttacaatggcatggacttgggaattgatctgaatatttcccctccccggtga

SEQ ID NO: 11966 - DNA, 1089 bp, Oryza sativa
  Clone ID: TFbOSC401091j.C1.o1.fg
atgtgggaagctgtaggcggcggcgacggcacggctctcctgccgtggcccggctcggccgcggccgcgccgctctacatgcccccggcagcagcggcagcggcgcccttcgccgccggcgagcagctgccggtggagcagcccttctacttcgacggaggcggaggcgtggcggggcataatcaccatcctcatcatcatcagtacgggatggaggcgccgccgccgatgacgatgatgcagatgggcggcgggggttcgtcgtcgtcgaggatggtggtgtccgggctgctcgggacgctgcaggcggagctcgggaggatgacggcgaaggagatcatggacgccaaggcgctggcggcgtcgcgcagccacagcgaggccgagcgccgccgccgccagcgcatcaacggccacctcgccaggctccgcagcctcctccccaacaccaccaagttccgtaaaattcatgcgttccaatcaaacaatgtccatattttcataatgacggacaaggcgtcgctgctggcggaggtgatcgagcacgtcaaggagctgaagcggcagacgtcggcgatgatggaggacggcgccgcgggaggggaggcggcggcggcgccggtggtgctgctgccgacggaggacgacgagctggaggtggacgcggcggcggacgagggagggaggctcgtggcgagggcctcgctgtgctgcgaggaccgcgccgacctcatcccgggcatcgcccgcgcgctcgccgcgctccggctgcgcgcccgccgcgccgagatcgccacgctcggcggccgcgtccgcagcgtcctcctcatcgccgccgtcgaggaggaagatccagacgaggccgggaacgacgacgacggcgaacacggctacggcgttgccgcctcgcaccggaggcacgagctcgtcgcgtcgatccacgaggcgctgcgcggcgtcatgaaccgcaaagcggcgagcagcgacacctcctcttccggcgccggcggcggcggtgggagcatcaagaggcagcggatgatcagtgcacatgatcagcaaggttccttcaattctagtggctggtaa

SEQ ID NO: 11967 - DNA, 711 bp, Oryza sativa
  Clone ID: TFbOSC401731j.C1.o31.fg
atggacggaggcggagaccccgttgacgagttcctcatcggcggcggcggcgaggacggcgacctcggcgtcttctgcgacggtgtgccgacgctgccctgcgatggaggacttgggattgatgatgtcagtggagatacttgttgccttgaccaatctgttttagggaaaagaggtagagatgaatcatcatcatctggtccaaagtccaaagcttgccgtgagaaaattcggagggatagactgaatgacaggttccttgagttatcttccgttatcaatcctgacaagcaagctaagttggataaagcaaatatcttgagtgatgcagctcgtctgttggcagaactcagaggcgaggcagaaaagcttaaagaatctaatgagaagctacgagaaacaatcaaggaccttaaggtggagaagaatgaactccgtgatgagaaagttactctgaaggcagagaaggagaggctggaacagcaagttaaagcattgagtgttgctcctacaggatttgttcctcatctccctcatccagctgcattccatcccgctgcattccctccatttataccaccttatcaagctctgggcaacaaaaatgctcctacgcccgcagcattccaagggatggcaatgtggcagtggttgcctccaactgctgtggacacaactcaagatccaaagctttggccaccaaatgcttaa

SEQ ID NO: 11968 - DNA, 1344 bp, Oryza sativa
  Clone ID: TFbOSC26607j.C1.o1.fg
atggatgcgggtgcaactgcaaggtcgtcgtcgtcgtcggcgatgatgatgaaccagaagaagcccttgctctcggatggcgagctggtggagctcctgtggcaggacgggggcgtcgtcggccacgcgcagacgcgccaccgatcgtccgacgtcctcgcccggagcggcgtcaccggcgaggaggagacggcgtccgcgtggttcgcggatggcggtggcggcggcggcggcgacgacgacgcgctgggcctgggcatgggcagggacatctactcgcagctctggcacagcttcgccaatgtcgacgggcacgcggcgggcgcgctcgcgctcgcgacgccgacgccgacgccgcgggcggcggcgaggagcgacgacgtgtcgagccgtctcgacgaggccgacctgagcatctgcggcagcaacgcggtcgtggcgccggcgctgcccgcggacgacgacgacgacatcgacgccgccgcgccgcgcgaggaggaggaggaggaggaggaggggccgggcgccgcgcgcgccgccggcgcgtcgtcgtcgggcgggtcggggagcgggagcgggagctacccgctgttcaagcgggggagggaggagctggttgacagccttagcgaggtcgccgacgagacccggccgtcgaagcggccggcggcgaagcgccggactcgcgccgccgaggtccacaacctgtcagagcgtagaagaagggataggatcaatgagaagttgagagcattgcaagaactggtacctcattgcaacaagactgacaaagcatccatactagatgaagcaattgagtacttgaagtccctgcaaatgcaagttcagatcatgtggatgactaccgggattgtgccgatgatgttccccggtacccaccagctcatgccaccgatgggcatgggattgaacacggcatgcatgcctggggctcaagctcaaggcctgaatcagatgcaaagaacaacatattacatgaacaattctctgccaaaccagatgcctcagatcccttctccagctatgaatgcacccagtgttccagacgatatgcagaatgataatcgcatccgcgggccaagaaatccttttcttcattgcaatgatacactgacagcaacagctcaggttgattattatgttaaatttcatcattaccgatcattcagacttcaattcttgtttatcttacaatatcagttcttttcaggtgccaggcaccggcaatatgtgaagaatatagtggctgtgtggactcagcttgagccggcatcgcaaaagctgcacaagaacacaacagtgacagtttcactcttcttttag

SEQ ID NO: 11969 - DNA, 485 bp, Oryza sativa
  Clone ID: TFbOSC26607j.C1.o1.np
catttacccccaagtaccctatccagtcgcgcagcgatcttagagatcggcatcatctttctccaactccggtcgccgaggtccatcttcgatttctccctctccgtcctttgaagaaattgagccatcgccgttcatccaaggtgaagcgccgccgccgagacattccgcgagccatcgtcgacaaccaagctttgccgacctcatccgtgcgccgggccgccgccgtgcgtcatcgccgtcggtggtgaaccccggtgatgcgccgccgccgccgccccaccgtggccgagccatcctggctcgggccggccgccgtcgcgaggaagaattgggaaaagaaaaggagagagagaggaagaacatgtccaccagcaaatacacgatcttcaggtgtctcacagcaaagaccgcaatctttcggtgtcctgtagcaaattttgcctaaaaccaattaatttaggtccacatctacattaccaagc

SEQ ID NO: 11970 - DNA, 530 bp, Oryza sativa
  Clone ID: TFbOSC418437j.C1.o9.np
tgtatttttggtcggatttatttgggccgtccatgcagatatctcgcagcagcagcagcatctgcacgttactcacgtggcatctccaactctaccgccaaaatttgtattctttttttgaaaaaaaaatcgttggctcccgcgaccgcgacgcctcgtcgcggccttggtggtagagtacaagaaggagccaggcttctcttctcctcgagccagcagcaacacgcacgcacgcaccacacacgtagcagcagagcaatggcggcggccatggcgacccggccgtcgaagcggccggcggcgaagcgccggactcgcgccgccgaggtccacaacctgtcagagcgtagaagaagggataggatcaatgagaagttgagagcattgcaagaactggtacctcattgcaacaagactgacaaagcatccatactagatgaagcaattgagtacttgaagtccctgcaaatgcaagttcagatcatgtggatgactaccgggattgtgccgatgatgttccccggtaccca

SEQ ID NO: 11971 - DNA, 1704 bp, Oryza sativa
  Clone ID: TFbOSC400235j.C1.o1.fg
atggcatctgctcctccagttcaggaagaacccctacagccagggacgaaccacttcaggagcctgcttgctgctgctgtgaggagcatcagttggagttatgcgatcttttggtccatttcaaccagttgcccaggagttttgacttggaatgatgggttctacaacggcgtggtaaagacgaggaagatatccaactcagcagacctcacggctggtcagctcgtcgtgcagagaagcgagcaactgagggagctttactactctctcctgtccggcgagtgcgaccaccgggcgaggaggcccattgccgcgctatcgccggaagatctcgcagacacagaatggtactacgtcgtctgcatgacctactccttccaacccggccaagggctgccaggcaaaagctatgcaagcaatgcatctgtttggctgcgcaatgctcagtctgcagatagcaaaacatttctacgctcgctattagctaagacaatcatctgcatccccttcacgagtggcgtgcttgagctggggaccactgatccgactttcattatagcatatgcctgccacaacatggaacaggttttggaggacccaaagttggtaaaccgaatcgttgcatatttccaggagcttcagtttccgatatgcttagaggtactaatgagcactagcccttctccgaacgaaacggaagatgccgacatcgtgtccgaaggcctcatcactcacaacgccatcgaagaggggcagatggttgtctctgatgagtgcgtgtccaacgccaaccgcgatccaatcaccatggagatcgacgagctctacagcatctacgaggacctggacctggacatggacctggacctggacaccgtgcgctttctcgaggataatggctggcctgtgaaccccagctcttttcaactggtcccggcgtcgtcaacggaggcggtggcggcggcggcggcggctaatgatgtcgacggtgttgcgaattctcaagtgtcgtgcttcatggcttggaagagcgcgaagtcaaacgagatggctgtgccggtcgtcaccggtatagagtcacagaagttgctgaagaaagttgtggactgtggtgcacggatgagcactggtcgtggtagtagagcagcgctaactcaagagagtggcatcaagaaccatgtcatatcagagagaaggcgccgagagaagctcaatgagatgttcctgattctgaagtcaatagtcccctccatccacaaggtggacaaagcatccatccttgaagaaacgattgcctacctcaaagtgttggagaaaagggtgaaagagttggagtccagcagcgagccatcacatcagcgcgcaaccgaaacaggacagcaaaggcgctgtgagatcaccgggaaggagctggtctctgagatcggtgtcagcggcggcggcgatgcagggagagaacaccaccacgtgaatgtcaccgtcacggacaaggtggttctcctggaggtgcagtgccgatggaaggagttggtgatgacacgagtgttcgacgcgatcaagagcctctgtcttgacgttctctccgtgcaggcgtcggcaccggatggtcttcttggactgaagatacaagctaagtttgcttgttctggttcagtggcacctgggatgatcagcgaagctctccagaaagctatcggtggctag

SEQ ID NO: 11972 - DNA, 1422 bp, Oryza sativa
  Clone ID: TFbOSC400431j.C1.o63.fg
atggaggattgcagcagctggatccatggctacgccaacgctaacgccaccgccggcaacaacggcttcatgtgcggctacgctgccagctgcagcccagtagagtttcagcagcagcaacagctggtcggctcgcagattgagcaccacctcaaccaggcaagcttgatttgcaatttattcgatcaagaaacaatgcataaaatcaaagaaattttaggatttaatttggtaggtgtcgcgttttattacggcatgcagatcagcatgcagatggggatggatgacgagtcggcggtgtacgacggcgcctccatggtggacgtcctcctcatggcttcctcgtcgccgcaccaccacgccggcgccggcagcttccagtactcctcgccgacgtcctcctccgcctccttccgctccgcctccgtctcgtgcagccctgagagctcggcggcggcgacgacgcacttcctcggaccgccggcgccgtccgcggcggcggcggggttccattacccggaggtctcctcgcaggcgccgttgccactacccttgccgccctacgagccgcagcacggccaatacaccaccgtcctctcgccgccgccgccggcgccagagttgccggcgactactacgccggcgaccggcggcgcgttcaggcggtacgcgcggcacctccgcccgaggaggctgcccaagccgggagggtgcgggcagaggatgttcaagacggccatgtcggtgctcaccaagatgcacgtggcggcgacgtacaaccgccagtactactaccagcaggcggcagccgccgccgcgtcggcgtcggcggccgaggcgccgccgtccggcaaccagctgcagcacatgatctcggagcggaagcggcgggagaagctcaacgacagcttcctcgccctcaaggccgtcctccctcccggctctaagaaagacaagacatcgatactgatcagagcaagagagtacgtaaaatctctcgagtcaaagctgtcagagctggaggagaagaaccgggagctagaggcgaggctagccagccgccccgccgccgccgccaagaacgacaaaggcgagacggcggcggcgccagcgccggaagccggcgatgagacgaagcgaaaggacctagtagagatcgaggtgacgacgagcggcggcggcgccggagcggcggatgcggcggcggcggcgggaggagatcaagagacctgcacgctcaacgtagacttgcgcggcggcggaggcggcggaggcatgagcacgacggacgttgtgctccggacgctgcagtgcctgagagagcagatcggcgacggcgccagcctcgtggcgatgagcaccagcgccggctccggcggccgcccgcctcgtgcaaacctaacattacagctcaaggtgtaa

SEQ ID NO: 11973 - DNA, 681 bp, Oryza sativa
  Clone ID: TFbOSC400099j.C1.o6.fg
atgatgagtttcccgtacagctccggcgacctcggcgaggccaccaccgccgccgccgccgccgttgacatgatcacgctcgaccagatgttcagagactatgatgcctccaccggcgacgatctcttcgagttggtctgggaaagctgcggcggcggcgagatcgacagcggcgccggagaggtgcagcctgctggtgttccctgctgccgtcgattgctgccgggatcgtcgccggagccgacctccgaggacgagatggcggcgtggctctccacgattgtcaccggctctggcggcggcggcggcgacgacgtggctgccggcggagaccatcaagatccggcggtgaagaagcccgacggcgagccgttgacggagaagatggataagaagctcccaacaagaacggaagagaggcggcgcgtcaagcacaaagcaagaagaaatcctggatacgcagaaacacacggcttaacagagaagagacgaaggagcaggataaatgagaagttcaagatgcttcagcggctcgttccagggtgcgataagtgtagccaatcctcgacgctggaccggacaatccattacatgaagtcactgcagcagcaacttcaggttgacccccctgcggctatatataatcgtatttctgtggagagaattgatatgattatttaa

SEQ ID NO: 11974 - DNA, 2400 bp, Oryza sativa
  Clone ID: TFbOSC413939j.C1.o3.gm
atgggccactccaacgtgtggaactcccaccccaagaactacgggcccggctcccgcgtctgccgggtctgcgggaaccctcatgggctgatcaggaagtatgggctcatgtgctgcaggcagtgcttccgcagcaacgccaaggatattggcttcatcaaggcagcggcgtgctccggctccctcgctggcgtcggcgcacaggcgacgatggacctcagcttgaggggagaagctgaggcggcgcccgtgtaccgccctaattcgaagcatttcacaattgagattcatcatggtggatttttctgtggaatgggagtcaatcgcagttatgtggatggaaaagttagctggtttgactatgttaattctcgggagtggggtagttctcttcacttgttagatttggttgctatgctgggttatgcagcagggccaagattggaagtgtattggttgttgcttggaaagagattggctgatggcttgagaattgtggacaatgaagtggagattaatgtaatgaattcagtgtgcaacagagttaagaactttgtcctctatttagaccatagtgaccatgtttcaggcagtaatcatgaagatatcgtactgagcctaatctctcagttgccgaaagtaatgagccctgttagaggttgtcagcagaaggaacatgggaaccaagggggtagtaatgtaggagaaccagtgtgtgtggttgtagatgaagaagctgaagaaattgaagatcatggtgattatgacagcaatgatagtgaggctgatgatttagactttgtggacattgactatgagttgcaagatgatgatgatgacttatttgaagataatgtggatggtgatgtgctggaccagggattggcacctaagaagttcaatcacaagaaggttgcaggtagcaagctcaaggggaaggaagtacttagagaggaaggatcagatgaggagtcaagtgatgaagagatcttggagctgccagacaatacagatgagatcaatttgaggttcaaatcatttaacccagaagatatgaataaccctgtttttaaagttggaatggtgttcccttctcttgagttgcttagaaaagcaatcactgagtacagcttgaagaacagggtggacatcaagatgccaagaaatgatataacaaggatcaaagctcactgtgcagaaggatgcccttggaacatggcagattgcaagatgactctacctagctttgcaaaaactgttcagaaagagtggaatttgacaccttcaaggagcaaactggcaagggctaggaggttggcacttaaagagatatatggagatgaggttgcacaatacaacatgctgtgggactatgggcatgaattgaggaggcctatcatttgcttggatgggtgccatatcaagaccaaatttggtggacagttgttgacagcagttggcattgaccccaataactgcatatttccaatagcaatggctgttgtggaagtggaatcgttgaccacatggtcctggttcttgcaaactttaaaggatgaccttggcattgtgaacacttacattgtagatgttatgaccaagcactgtgattgtaggaggtggtcttcactgttggctgaggtgcatgacaatatgttggatcacatgctgttggagacgccatggctgctcgccgcctccagcctcaacctcgccgactccggccgcaaccaacccgtctccgaccgctacctcctcgttccgcacttcgccgccgcacaccgtcccctcgtcgcctcacccgcttcagccactaaccctaggactattttgttggcatacaaggctattgaacgttttgagtatgaaagcatagcatttgatgtggtcttcttgcatgaaacagagttcattgggttggtcatcactgggaacaagaggatgttccccatggatgagcactttgagcagcagcagaagaagccgaagaagaaaacccgaacttctcgctcggtatcaagtagttcaaccattactgactatgagactagctctgaacttgtcaatcctagctgttcctccgggagcagcgtcggagaggattcaattgctgcaactgatggatctgtagtgctgaaacaaagtgacaattcaagaggccataagcagtgctccaaggatacacaaagcctctatgctaagaggagaagggaaaggattaatgagagactgagaatacttcagcagcttgttcccaatggcactaaagttgacatcagcacaatgctggaggaagcagttcagtatgtcaagtttttgcagttgcaaataaaggcgaaaaaaacgccaccctccccccatctggccgcgctgccgccgttgcccctccgccagatctag

SEQ ID NO: 11975 - DNA, 546 bp, Oryza sativa
  Clone ID: TFbOSC5815j.C1.o1.np
catggcaaaggatcaaacaataagatttgagaaatgccggacacggcggcgggaagctctcacgcgcggcgagcagccagtccctcctcgcggagacggcggcggccggtggcgtccaccagctaccggcgagcgacgggtcgagcagcgacgctccttgtcggaagcggaaggcgccccgccggagacgaggacacgaagccggtcgccggcgacgcgggacacggcggcaatggcaagggaaaggtcctcgacgccgccggcgagccacccaaggactacatccacgtgcgcgctcgccgcggccaggccaccgacagccacagcctcgccgagcgggtgaggagagaaaagatcagcgagcgcatgaagctgcttcaagacctcgttcctggctgcaacaaggtgacaggcaaggcagtgatgcttgacgagatcataaactacgtccagtcgttgcaacggcaagtggagttcctatcaatgaagctttccaccgtcaacccgcagctggatttcgacgtcgacaacttcatcccaaaagat

SEQ ID NO: 11976 - DNA, 1047 bp, Oryza sativa
  Clone ID: TFbOSC401748j.C1.o10.fg
atggagctggatgagcaggcgttcttggaggagctcttctcgctgaggagggacgcgtgggagtacaatgccatgggggacttcttctcgccggcgtgcgccgccatggacggcttccaagaacggcaccagtccaccaccacggtcagcgtcctccccaccttcacggcctcctacgagcagccgccgccggcgccggcggccgggttcgactgcctcagcgaggtctacggcaacgccgccgccgcattcgggcccaatgccggcggcggcggcggcgagtacggcggcggcggcgacatggggtttcttgatgtggttgagcccaaggcgagtatggtggtggatggcggcgggctcggggtgtgcaaggtggagcccgggctgcaggcggagggcgggttcagcgcagcggcggcggcgccggcgtcgaagaagaagagggtggaagggatgccgtcgaagaacctgatggcggagcggcggcggcgcaagcggctgaacgaccgcctctccatgctccggtccgtggtgcccaagatcagcaagatggacaggacatcgattcttggggacacgatcgactacatgaaggagttgctggagaggatcaggcagctgcaggaggagatcgaggagcagcagcagcaggagacgcccggggtgctcagcgtcttcagggagctcaaccccaacgagatgctggccaggaacacacccaaggtagctgcatccatccattgctggatatataatgaggaggatgatgggattaatggagtttgtgaggtgcagttcgatgtggagaggaaggaggggggcgacacgcgggtggagatctactgcgcggccaagccagggctgctcctgtccacggtgagcacgctggagacgctgggcctcgacatccagcagtgcgtcgtcagctgcttcaacgacttcggcatgcacgcctcctgctccgagatgcagagggagaggatgagcgcggacatgataaagcaggagctgttcaagaacgccggctatggaggaggatgcttgtag

SEQ ID NO: 11977 - DNA, 1092 bp, Oryza sativa
  Clone ID: TFbOSC400265j.C1.o4.fg
atggcgttggaggcggtggtgttctcggaaggatactacttcggatgcggcggtgccatggcggcggaagcagctgcaggaggagcttggagctggagccacgggtatggcggtggcgttgatcaggggaagggggcgatggagttagtggtggacgacggggtggtgaacgccttctgggacggcggcggaggcggcgcaagctcttccccggtgatggccgccgtctcggggtttattgaggagccggacggcggtaattcctccgtcgcagacgcagcgccgccgccggagcacggaggtgcgtctgtcgtcggacgggatggctccgcggcggcgccggcggcggccgcagggaggaggaagcggcggagggcgaggaccgtcaagaacagggaggaggtggagagccagcgcatgacccacatcgccgtcgagcgcaaccgccggaagcagatgaacgagtacctcgccgtgctccgctccctcatgccggcctcctacgtgcaaaggggcgaccaggcgtccataattggcggagcaatcaactacgtcaaggagatggagcagcttctccaatccctggaggcgcacagacacgcccgccgcgcacgcaccgacgccgccgccgcgttgccattcgcgggcttcttcacgttcccgcagtactccatgagcgccgtgcccacgacaaccaccaccactgtagcagcagcagcaacggaaaacggcaatgccgtcgccggcgccggcgcgggcgacgacgcggacgcggacgtgtcggggtcgaagccgtcctcggtggcggacatcgaggtgacgatggtggagagccacgccaacctgaaggtgctgtcgcggcggcggccgaggcagctgctgaggatggtggcagggctgcaacaccaccgcctcgccgtgctccacctcaacgtcgccagcgccggccacatggctctctactcccttagccttaaggtggaagaagactgccagctcacgtcggtggacgacatcgcggcggcggtacacgggatcgtcgagacgatcgagcaagagcagcagcagcagcagaagcagagctgtagctag

SEQ ID NO: 11978 - DNA, 1060 bp, Oryza sativa
  Clone ID: TFbOSC900037j.C1.o3.np
tatgaaaaccaagggtacgtagttcaggaggtttatgttctaagcaaccaaaattattgttgcagcgaagacgacgggctcgtcgagctgctatggtgcaatggccacgtcgtcatgcagagccaggcgccgcggaagccgccgaggccggagaagacgacggcggcggcggcggcggcgatggcggaggatgagtcggcgtcgtggtttcagtacccggtcgacgacgtgcttgagaaggacctgttcaccgagctgttcggcgaaatgacggcggccggcggcggcggcggcgacgtccgcagggcggcgtgcaaggaggagcgcggcgcggtcgccgcgttccagagcaggatgatgccgccgccgtggccggcgagggggaaggcggagttcggtgacgtcgacgacgtgtgcggcgtctcggaggtcacggtcggcgagtcatcgatgctgacaatcgggtcgagcatctgcgggagcaaccacgtccagacgccgccggtggggaacgggaaggccggcgccggcaccgccggcgccgccagaagggcgcacgacacggcgacggtggcgtcgtcgtcgatgaggtcgaggtcctgcaccgccaaggccgagccgcgcgacgtcgcagccgccggcgtcggcggcaagcggaagcagcgcggcggcgccgccatggagtccgggagccccagcgaggacgtggagttcgagtccgccgccgcaacgtgctcgccggcgcagaagacgacgacggcgaagcggcggcgcgccgccgaggtgcacaacctctccgagaggaggagaagagataggatcaatgagaagatgaaagcattacaggagctcatacctcactgcaacaaaacggacaaagcatcgatgctggatgaagcgatcgagtatctcaagtcactgcagctccagctacagatgatgtggatgggcggcggaatggcgccgccggcggtgatgttcccggcggctagtactagtatcgtaccacaaagaatgcttcaaggcctgaaatttcgacccaaatacccgaaatttccgg

SEQ ID NO: 11979 - DNA, 1992 bp, Oryza sativa
  Clone ID: TFbOSC400964j.C1.o82.fg
atgactgagatattgtctcctacaaaaaccatcctacttgcagattgcagcagtaaaaaggcccacgcttttaacccaagaaagggtggtggatgtaaagatgcaaaggggatcagcttaccttgccaaccctgtgattctaaagtgttttcacatcctcttgcaaacagaaacagaaatggtctagtaataaattgtgttctacggcagctgcagcagcagcagcagcaactgcacaaaataaagtcagcagcaaggcagcaattcattcccctttcccctcttcctctcttcactcacctcttgcctgtgcaagtgcttcttttccactcctttactgttcccccacttttccttgctttgtcacgcacacgaaaagctcctgcctttaccttatctccgctcgccttccctcacccccgtcgtagtgggatttggtggctgctcgcctctcgcgtttcttttgctggattggggcgttcttgggagctcgggaattcgggtggtttggttgggtttcgtggagaattgcggcagatctttgagatgaactgcgggccgcccgaccagttgccgccggcgacggcgccgtcgtgcttcctcaacctcaactgggaccagtccatggacgcggcggcgggagggcacctcgacccggcgctcagctccatggtgtcctcgccggcgtccaactcgacgggcgctctccacgggatctcgccgcagccgcactacggtggcgggacgccgctcagctcgccccccaagctcaacctgtccatgatggggcagttccaccactacgccgcgccgccgcaggtgggcggcggcggaggcggaggcgggggcctgccaatcctcgagaacctgatgcccatgggccacctcgaccagttcctcgccgaccctggcttcgccgagcgcgccgcgaggctctccggcttcgacgcccgcggcggcggcggaggaggaggctacggcggcgccggcccggcgcaattcggcctccctgacgccggcgcggccggcgcatcgaaggagatggagctcgggaacacccgggacgagtcgtcggtgtctgatccggcgcccggcggcgccgagattccgcccaagggggcttccgacggcaatgcacggaagcggaaggcctccgggaagggcaaaggcaaggacagccccatgtccacctccgccgccaaggaggattccagcggcaagcgttgcaaatcgacggaggagagcaatgcggccgccgaggagaattccggcaaggggaaggccgcgcagagcaacagcgagaatggcggcggcaagaagcaagggaaggacagctcgtcgaagccccccgagccgcccaaggactacatccatgtccgcgcccggcgcggcgaggcgacggacagccacagcctcgccgagagggtgagaagagagaagataagccagaggatgaagctgctgcaggatctcgtgccgggttgtaacaaggtggttggaaaggctgtcatgctcgatgaaatcataaactatgtgcagtcgttgcaacggcaagtcgagtttttgtccatgaagttggccactgtgaatccccagctggacttcaacaatttgcctaacctccttgctaaagatatgcaccagtcatgcagcccgttacagagctcacattttccactagagacctcaggtgcgccgctgccctacattaaccagcctcagcaagggaaccctctcggttgtggcctgacgaacggcatggacaaccagggttctatgcacccattggacccggcattttgccggccaatgggctcgcaccatcctttcctcaatggggttagcgatgcggcttctcaggttggtgctttctggcaagatgatctccaaagtgttgttcagatggatatggggcaaagtcaggagatcgccacctcttccaatagctacaatggatcgttgcaaacagtccacatgaaaatggagctttga

SEQ ID NO: 11980 - DNA, 969 bp, Oryza sativa
  Clone ID: TFbOSC27232j.C1.o1.fg
atgggtgctcatggagaccaccgccaccaccaccaccatcaagaagccggggtgctcgtcgacgaggaggaggaggaggtgatcgagcaggcttgcggtggcccgacgagcggcgtggtggagcaagaggtggggggagacggtggtggagtgtgccaagatgctgccggcatggtgttcgaggcgaccagtagcgtcgggagcgtgagcgccaccatggggccgccgccgatcatgtgctggccaccgccggcgcagcctgtccacggtgcaatccaccaccaccacaacctaggcggcggcggcggccagcagagcccgttcttcccgctgctgccgcccctgccccctcagcccccgccgccacccccgttcttcgccgacttctacgcgcggcgggcgctccagtacgcgtacgaccactccggcggcgcgtcgtcgtcgtccgacccgctcggcctcggcgggctctacatgggtcaccacggctcccacgtcgccggcatgatgatgccgccgcccttcgctccgtcgccgttcggcgacctcggccggatgaccgcgcaggagatcatggacgccaaggcgctggccgcgtccaagagccacagcgaggccgagcgccgccgccgcgagcggatcaacgcgcacctcgcccgcctccgcagcctcctccccaacacaaccaagacggacaaggcgtcgctgctcgcggaggtgatccagcacgtcaaggagctgaagcggcagacgtcggagatcacggaggaggcgtgcccgctccccaccgagtcggacgagctcaccgtcgacgcgtcgagcgacgaggacgggcgcctcgtcgtgcgcgcgtcgctctgctgcgacgaccgcaccgacctcctgccggacctcatccgcgcgctcaaggcgctccggctgcgcgcgctcaaggccgagatcaccacactcggcggccgcgtcaagaac

SEQ ID NO: 11981 - DNA, 1062 bp, Oryza sativa
  Clone ID: TFbOSC9960j.C1.o2.fg
atggaggactcgagcctgttcatggagtgggccatggagacgctgcagcacctgcacccgctgccggcgacgccgccgcctgccggcggcgggtacgccggcgacaacgcgacttttccgtcgctccaagcgctccgcgagtcgtcggtgtcgcagaacggcatggccccgccggagccaacggcgcacgaaggccaccgagcctccaacagctggagctcgggcgacacggacagcgtgtccggtggcggcggcggcgcggtcatggagcacgacggatggtcgacgtcgccaaattcggtcaggtgcgccgctggcggcgggggcggcggcggcggcggcggcctctggcccgtgagctggaacttctcgtcggccatgacgcagccgtgcaacgatcaggccacgccgtcgaacccgccgacgacgacgagagcgcgctacggcggcggcggcgttcgatacctgccggccgccgtgtcgccatcgccatctgcacagacacggagagcctcctccaaaggcaacggcggcggtggctccggctcctcgtcggcggcgccgtacgcgcaggagcacatcatcgcggagcgcaagcgccgggagaagatcaaccagcggttcatcgagctctccaccgtcatcccgggcctcaagaagatggacaaggcgacgatcctctccgacgcggtgaggtacgtgaaggagatgcaggagaagctcagcgagctcgagcaacaccagaacggcggcgtcgagtcggcaatactcctcaagaagccgtgcatagccacgtcgtcgtcggacggcggctgccccgcagcgtcatcggccgtggctggaagcagcagcagcggcacggcgagaagctcgctgccggagatcgaggcgaagatctcgcacggcaacgtgatggtgaggatccacggcgagaataatggcaaggggtcgctggtgcggctgctcgccgcggttgaagggctccacctcggcatcacgcacaccaatgtcatgcccttctcggcatgcaccgccatcataaccatcatggcaaaggaatag

SEQ ID NO: 11982 - DNA, 570 bp, Oryza sativa
  Clone ID: TFbOSC17447j.C1.o1.fg
atgtcgcacatcgccgtggagcgcaaccggcggcggcagatgaacgaccacctcaaggtgctccgctcgctcacgcccgcattctacatcaaacggggcgaccaggcgtcgatcatcggcggcgccatcgacttcatcaaggagctacagacgctactgcaatcgctggaggcccagaagaagcgcaggcagcagccgcaggcgcacctaatctcgccggcatcgatatcggcctccggcggcggcagccccagccccacgcccagcccgcgctccctcatcacctcctgctctcccactgccgccgccggcagcagcgccggcagctcatcctccatctcccccaaggacgaaaataagcagcagctgcagctggtagcagagctcgccgcctgctgcaactcccccatggccgacgtggaggctaggatctccggcgccaacgtgcttcttcgcacgctctctaggcgcgcccctcccgtcaggatcatcgcccttctcgagagcctccatctcgaggtgctccatctcaacatcaccaccatggacgacaccgtcctctactccttc

SEQ ID NO: 11983 - DNA, 1539 bp, Oryza sativa
  Clone ID: TFbOSC401546j.C1.o6.gm
atgcacgccgcccatggtggaggtggaaggcaaccagtaaccatcttgccaatctcgagttctcagcttgtggtcacaggtggagattggccacttcttgcctacctggagaaggctctcatggcgctggaagctgtggtgttcccgcaggagcacctgtcgtgcgctgccgccatgtacgcggcgccgccgtcgtcgctgggatgcggcgttgacatggacgagttcgaggagaacggtggtgtggtgctgcaagaggaggccggagtggcggtgcacggcggcggcggcggtggcgctggtgggatgatgagcctctgggtcaacgcggcgacctgcgcgcgctccattgctgcttccggcgccgtggaggagttctgggacgagaggcagtaccccgtgtcgtcaccgccggcggcgccgacgccagcagcgtccggcggtggtggcggccacgccaaggcggccgcgcggaggcggcggcggcggcccaaggtggtgaagaacaaggaggaggccgagagccagcggcgcaaccacatcgccgtggaacgcaaccggcggcggcagatgaacgagtacctcgccgtgctccgctccctcatgccgccatcctacgcgcagcggggtgaccaggcgtcgatcgtcgccggcgccatcaacttcgtcaaggagctggagcagctgctccagtcgctagaggcccagaagcgtcgcgccgagcacgcgccgccggcgccgccgttcgccgggttcttcacgttccctcagtactctaccacagttggtgacaacaatgcggccggctctggcgccgccgacggcgagggcggctgcggcgcgcggcccggcgcggccgacatcgaggtggccatggcggagagccacgcgaacgtgagggtgctcgcgccgcggcggccgaggcagctgctgaggatggtggtggcgctgcaatgcctcggcctcaccgtgctccacctcaacgtcaccaccaccgccgaccatttggcgctctactccttcagcctcaagatggaggatgaatgccggctttcgtcagtcgacgagatcgccggcgccgtcaatcagatgatgtcggagtctgaagatgaaaagagcctctcggatgaaataacagatacatcacacctaccatgggatcccttctggaccaggaaatgcaaatacccgagcggtgggcggagcgacaacgggtggcagagaacggaggggtggcgggcggtgggcggagcgagcgccgggcggagaagaggagcggcgggtggaagcgaagcgtcggcggggcggtgggtggagcagtggggtggcaggtggaagtggagcgtcggtggggcggtgggccgagcgacggcgggcaccaggggcggtggccgcagcgagaggagcggtgcacgacggcgggagataggagagacggccggcggacgagaggagcaccgcgcggtcggcctcccttcctctccctctgtcatccgcggtgaagagatggggtggaaaagagggcgctcagagcagtag

SEQ ID NO: 11984 - DNA, 804 bp, Oryza sativa
  Clone ID: TFbOSC401369j.C1.o46.fg
atgggctctgctccgttcggtgacgccgtcgccggcggtgggctctatgagtaccaggggtatcacggtggcttcgccggcggccatggtctcggccaaccggccggccgagcgcccgcgttggacgacggtgaaactgaggggatggacgcatccgccgccgccgcagtcgccgccatggagatggcaaagaggaattgtggaggcggccgggaggagaaggcggcgatggcgctcaagagccacagcgaggcggagcggcggcggcgggagaggatcaacgcccacctcgccacgctccgcaccatggtgccctgcaccgacaagatggacaaggccgcgctgctggctgaggtggtgggccacgtcaagaagctgaagagcgccgcggcgcgcgtcggccggcgcgccaccgtcccgtccggcgccgacgaggtcgccgtcgacgaagcgtccgccaccggaggcggaggagaaggccccctcctcctcagggcgacgctgagctgcgacgaccgcgccgacctcttcgtggacgtcaagcgcgcgctgcagccgctcgggctggaggtggtcggctccgaggtcaccacgctgggcggccgcgtccgcctcgccttcctggtctcgtgcgggtctcgcggcggcgccgccgccgccgccatggcctcggtgcgccacgcgctccagtccgtgctcgacaaggccagctccggcttcgacttcgcgcccagggcggcgtcgctgctgggcagcaaacgccggaaggtctccacgttcgagtcatcgagctcctcgtcttga

SEQ ID NO: 11985 - DNA, 1125 bp, Oryza sativa
  Clone ID: TFbOSC401762j.C1.o11.fg
atgtctcaagaaggtcccaacaaccatcctcaaggcacccaagaaacccatgactgccccttcaccatcgccaccaacacaccgttaggctcgacaaagatgggctactccgactctagaaagtctgacgagaataatacctcgtcaaagccagcaagtccagtggtgtctagtgatgttgtagagatcaaggaaacatgggaaaatgttgtcgttgcggatgaagagggggaaggtggcgaggatggcttcgctagcgatgctagtgaatctaagtccaagagctcatctgatgaagttgattatgagctcttggatcttttggcaggtgcaagtgaaggatgcagcggaggaaacaacaacgatgaagtgaaaaactttgcctatgcagaccacaagatgcatgttttgagagagagggagagaaggaaggagatgaaaaacaagtttgagattctgcatgccctcatccccaacctcccagaaaagactgacaaggccactatagtggaggcgaccataaactatatcaagaacctccaagacaaaatccataagatggagatgctcaaggtggagcgcgagcatgccatcgctctcgccaccgccgcaaccgccaccgccgctgcctctgcggacaccgcgctgcaggcaccgccgccgtcggaggaggagaatgaggagcacgactccgtggtggctgcagcgacgagggagatggccctggctgacatggtgcacgcctgggagcagcagcaggaggccgccgccaccggcggcagccatggcggccacgccgtgccgccgccgccgcccgctgcttcgctccagacgtggacggggcccaacatgacggcgagcctcaccggcgatgacggcttcatcaccctctccctgccgcatcagggcggccagaagaacctcgtcgccggcgcggtgagcgtcctggagcgccaccacatcgacgtcgttacggccaccgtctcggcatccgagcagggcgacaacctgatcagcctgcactgccatctgagtccagggagctctagctctcagaacctgacgcctctggacaagttcaagctggcaatgtcagagctgatgctttgggtgatctccgtctga

SEQ ID NO: 11986 - DNA, 801 bp, Oryza sativa
  Clone ID: TFbOSC413853j.C1.o7.fg
atggcggcgtggctgtatccgatcgtcggtggccaccaagtcgccgccggcgggtggctgtcgccggaggctggggatgaccggcgagccgcaccgccggcgccggagaagaaacagatggacaacatgccggcggtggcatcgccgacgatgaacaaggacgaagcaagcgacgactccggcgagaggaagaagaagaagaagaaggcatcatcagcggcaggaaaagcaagcaggcatcgccacgctgcaggagctcacaaccttacagaaaaaaggcggaggttcaagataactgagaggttcaggacgctgcaacgtctcgtcccaggatgcgataataagtcgaaccaggcgtcaacgctggaccagacaatccagtacatgaagtcgctgcagcaccagctcgaggccacgtccgccgtcggctcgccggcggcggcggttctgtaccccgccgccgtgcacccgcagtcgtacatgcatccaccggcgccgccgccaccggtggccggagcggcggcgccggtcacgatggcgccgatgcctgccgggatggttcttgctgctgctcctccgggggcggcgccgccgcccggccctccggcgacgatgatgccgttcggagctatgctcccttaccctccctacccggaggtgctgctgccgccgccgccggcgacgctgtacggacggccgccggccgccgctcccagcgttgcagctcgtcgacatggatccaccagcggcggcggcagaattagcaagagcagtagcagcagcctgcgcaaggaattgtaa

SEQ ID NO: 11987 - DNA, 528 bp, Oryza sativa
  Clone ID: TFbOSC19716j.C1.o1.fg
gtggtgcagaagaagggtaataagaacgcgcagtcaaagaaggcgcagaagggcgcgtgcagccggagcagcaaccagaaggagagcaatggcggcggcgacggcggcaatgtgcagagctcgagcaccaactacctctctgatgacgactcgctgtcgctggagatgacttcgtgcagcaacgtgagctcggcgtccaagaagtcgtcgttgtcatcgccggcgaccgggcacggcggcgcgaaggcgagggccgggcgcggggcggcgaccgatccgcaaagcctctatgccaggaagaggagagaaaggatcaatgaacggctaaagatactgcagaatcttatcccaaatggaaccaaggtggacatcagcacgatgcttgaagaagcagttcactacgtcaagttcttgcagctccaaatcaagcttctgagctcggatgatatgtggatgttcgcgccgatcgcgtacaacggggtcaacgtcgggctcgacctcaagatctctccaccgcagcagcaatga

SEQ ID NO: 11988 - DNA, 975 bp, Oryza sativa
  Clone ID: TFbOSC900178j.C1.o3.fg
atggaggactcggaggcgatggcgcagctgctcggcgtgcagtacttcggcaatgaccaggagcagcagcagccggcggcggcggcgccgccggcgatgtactggccggcgcacgacgcggccgaccagtactacggctcggcgccatactgctacatgcagcagcagcagcattacgggtgctacgacggcggcgcgatggtggccggcggcgacttcttcgtgccggaggagcagctggtggccgacccgagcttcatggtggacctgaacctcgagttcgaggaccagcacggcggcgatgctggcggcgctgggagcagcgccgccgccgccgccgccgccaccaagatgacaccggcgtgcaagaggaaggttgaggatcacaaggatgagagctgcacggacaacgtcgcgaggaagaaggcgcgctccacggcagcaacagtggtgcagaagaagggtaataagaacgcgcagtcaaagaaggcgcagaagggcgcgtgcagccggagcagcaaccagaaggagagcaatggcggcggcgacggcggcaatgtgcagagctcgagcaccaactacctctctgatgacgactcgctgtcgctggagatgacttcgtgcagcaacgtgagctcggcgtccaagaagtcgtcgttgtcatcgccggcgaccgggcacggcggcgcgaaggcgagggccgggcgcggggcggcgaccgatccgcaaagcctctatgccaggaagaggagagaaaggatcaatgaacggctaaagatactgcagaatcttatcccaaatggaaccaaggtggacatcagcacgatgcttgaagaagcagttcactacgtcaagttcttgcagctccaaatcaagcttctgagctcggatgatatgtggatgttcgcgccgatcgcgtacaacggggtcaacgtcgggctcgacctcaagatctctccaccgcagcagcaatga

SEQ ID NO: 11989 - DNA, 912 bp, Oryza sativa
  Clone ID: TFbOSC417480j.C1.o2.fg
atgacccacaactccagcagcagcagctcatgggatttggacatgagcctcggcagccaccaccatcccctcctcttcgaccagccgccgccgccgccgcccccgccgccgccgccgccattacccttccacctccaccaccaccctctagatccctctccttcttcttctttggttcctcctcctccccatcatcaccaccatgcccatcacctccatcatcctctcgacctggaccagcggcgtggtcaccatgactatggcggcggtgaccaggggggcgacgaggagctgaggcttcagcaggaggcggcggcaggtggtggtggtggtggccaggacggcggcggcggtggggatcaggacgccgacgaggagctcggcgccatgaaggagatgatgtaccggatcgccgcgatgcagccggtggacatcgacccggcgaccatcaagaagccccgccgccgcaacgtccgcatcagcgacgacccgcagagcgtcgccgcccgccaccgccgggagcggatcagcgagcgcatccgcatcctgcagcgcctcgtcccgggggggaccaagatggacaccgcctccatgctcgacgaggccatccgctacatcaagttcctcaagcgccaggtccaggagctccagcaccagccgggaccgccgccgccgccgtatcccgccggagctgcaccggccgccgggcccagcacctcggccgtgggcccaccgggccggccattcttgccgctgggtggaggagggcccatgatcgactgggtcggcctgaccaggccggtggacatccatgggccgacctcgtcgtcgtcctcgtcgtcgatgggcggcgccttgggtttcgggttcggctgcggcggcggcgggcagagcagccatgggatgcactga

SEQ ID NO: 11990 - DNA, 912 bp, Oryza sativa
  Clone ID: TFbOSC417550j.C1.o1.fg
atgacccacaactccagcagcagcagctcatgggatttggacatgagcctcggcagccaccaccatcccctcctcttcgaccagccgccgccgccgccgcccccgccgccgccgccgccattacccttccacctccaccaccaccctctagatccctctccttcttcttctttgtttcctcctcctccccatcatcaccaccatgcccatcacctccatcatcctctcgacctggaccagcggcgtggtcaccatgactatggcggcggtgaccaggggggcgacgaggagctgaggcttcagcaggaggcggcggcaggtggtggtggtggtggccaggacggcggcggcggtggggatcaggacgccgacgaggagctcggcgccatgaaggagatgatgtaccggatcgccgcgatgcagccggtggacatcgacccggcgaccatcaagaagccccgccgccgcaacgtccgcatcagcgacgacccgcagagcgtcgccgcccgccaccgccgggagcggatcagcgagcgcatccgcatcctgcagcgcctcgtcccgggggggaccaagatggacaccgcctccatgctcgacgaggccatccgctacatcaagttcctcaagcgccaggtccaggagctccagcaccagccgggaccgccgccgccgccgtatcccgccggagctgcaccggccgccgggcccagcacctcggccgtgggcccaccgggccggccattcttgccgctgggtggaggagggcccatgatcgactgggtcggcctgaccaggccggtggacatccatgggccgacctcgtcgtcgtcctcgtcgtcgatgggcggcgccttgggtttcgggttcggctgcggcggcggcgggcagagcagccatgggatgcactga

SEQ ID NO: 11991 - DNA, 1200 bp, Oryza sativa
  Clone ID: TFbOSC400812j.C1.o6.fg
atgtacggctcgccggtttccaaggatctgaacctcccggtgcagccgccggcgatgagctcgtcgggcttgctgcggtacagatcggcgccgagcacgctgctcgccgagttctgcgacgacttcctcccgcccgccgccgcgccccgcgccgccagccccgacgccgacaacgtcttctcccgcttcctcgccgaccaccagatccgtgacaagtctccccccgccaccgccgccgccgccgccgctgccgctcacttccccgacgaccccaccatggccacccagcaccaccaccagcagcagatgatgttccagcaccacccgcagcagatggcctctgtcgaggggctctaccgcaccgtcagctccaccgggattgacgccgccaccgccgccgccaacgccgccggtggcggcggcggcgggctgctccggcagagtagctcgcccgccggattcctcaatcatttgaacatggacaacgggtacgggagcatgctgcgggcgggcatggcggcagccggcggtggggtggggttcaggaacggcgcgaacgccgccgccgcggccgactcccccggcggcagcgggggcaggctgaaggggcagctcagcttctcgtcgcggcagggctcgctcatgtcgcagatctcggagatggacagcgaggagctcggtgggagcagccccgagggcgccggtggcggcggcggcggcggtggccggggttacctctccgggtacccgatgagctccgggtgggaggagtcgtcgctcatgtcggacacgaacatctccggcgtgaagcgccagcgcgactcgtcggagccgtcccagaacggcggcggcggcggcggcctggcgcaccagttcagcctgccgaagacctcgtcggagatggcggccatcgagaagttcctccagttccaggacgcggtgccctgcaagatccgcgccaagcgcggctgcgccacgcacccgcgcagcatcgccgagcgggtgaggaggacaaggatcagcgagcgaatcaggaagctgcaagaactcgtgccaaacatggacaagcaaaccaacactgctgacatgctggatttggctgttgactacatcaaggatcttcagaagcaggtcaagggattaaacgacagccgagctaactgcacctgctcagcgaagcatcagcagtactctggctag

SEQ ID NO: 11992 - DNA, 711 bp, Oryza sativa
  Clone ID: TFbOSC900200j.C1.o12.fg
atggacttcgacttgttcaattcctacccggaatcgcagcttgacctgatgagcacgatgcttcagctggagcagctcactgcgctcagtgaccagtcgctgttcatggcggcgccgacgtcgccgccggtatcacccatggggaccccttctccccagttctcaccaccgccgcagatgtcggtcaccaccaccaccgccggtggcggttaccaggatcagtataactccatgccggcaacgtacggcgccggtgcgggcgtgcaccagctggacttcgcgatgtcgtcaccgggctccgactccggcgcgccgcagggctcgtcgtcgtcgtcctcgtcggaggcgatgcgggagatgatcttccacatcgcggcgctgcagccggtggagatcgacccggaggccgtgcggccgccgaagcggcgcaacgtgcgcatctccaaggacccgcagagcgtggcggcgcggctgcggcgggagcgcatcagcgagcgcatccgcatcctgcagcggctcgtcccgggcggcaccaagatggacaccgcctccatgctcgacgaggccatccactacgtcaagttcctcaagtcccaggtgcagtccctcgagcgcgccgccgccgccaccggcgccgccgcccaccgcgccgccgcattcggcgccgcctacccagctgccttacccatgcagcaccacgctccgtggtag

SEQ ID NO: 11993 - DNA, 418 bp, Oryza sativa
  Clone ID: TFbOSC403397j.C1.o2.hg
ccatagaatcggtgctgaccaagatgcacacggcaacaatgtacaggcgtacgccagtgctaataccagcagacagcggccgccgccgtccagcaaccagctgcagcacacgatgtcggagcggaagcggcgggagaagctcaacggcagcttcgtcgccctccagtccaggccgtacgtcctccctcccggctccaagctagacaagacgtcgtcgatactgatcggagcaagggagtacgtgaagtttctcgagtcaaagctgtcggagctggaggagaagaaccgggagctggaggcgcggctagttagcagccccgccgtcgtcgccaagaacgacgcggaggaggcggcggcgccacccgaggctggcggcgagtcccggttcaaatacccggtactaaagatcgatttttag

SEQ ID NO: 11994 - DNA, 798 bp, Oryza sativa
  Clone ID: TFbOSC400741j.C1.o5.fg
atggtttcggaggacccaaacttggtaaaccgaatcgttgcatatttgaaggagcttcagtttccgatatgcttagaggtaccgagttctactccttctccagacgaaacagaagatgccgacaccgtgttcgatggcctcattgaagaggaccagatggtcatactccagggagaagacgagctaggcgacgtcgtcgtcgctgagtgcgagaccaacggcgccaaccccgaaacgatcaccatggagaccgacgagttctacagcctctgcgaggagctggacctggacctcggttcttatcagctagtcccgacgtcggcacgggagacggtggctgcggcggcggcggcggctaacgatgtcgacggcgttgcatactctcacgcctcgtgtttcgtgtcatggaaaagagcgaacccggcggagaaggtggtggccgtgccgatgactgcaggcatagagtcacagaagttgctgaagaaagctgtaggcggcggcaccgcatggatgagtaatattgatgatcgtggtagcgtggcaataacgacgactccaggaagtaacatcaagagccatgtcatgtcagagagaaggcgccgagagaagctcaacgagatgttcctcattctgaagtcactactcccctccgtccgcaaggttgacaaggcatccatacttgcagaaacgataacctacctcaaagtgttagagaaaagagtgaaagagctggagtccagcagcagggagccatcgcgttggcggccaaccgaaattggacaggggaaggcgccgtaa

SEQ ID NO: 11995 - DNA, 1437 bp, Oryza sativa
  Clone ID: TFbOSC400736j.C1.o3.fg
atggactactctgctggttcctacatgtggcctggcaattcaggttctgagaactataattttgttgacggttcgtcggaatcatatgcagaagaaggaagcctaccaccttcaggctatttcatgggagctggatcagatcgcagtttaaagatcacggagaatgaaaggaaccccactatgcttgcaaatggatgcttgccatacaacacccaggctcatccattatctggccagattctacctaagggtgagctccctaacaatcttctggatcttcaacagctacagaacagcagcaatctgcgaagcaattcaattcccccaggggttcttcagtgcaattcaacatctggaacatttgatgcgaaattggatacacctggtcttgcagaactgcctcatgctttgtccagttcaattgatagcaatggtagtgacatttctgcttttcttgctgatgtgcatgccgtttcttcagccccgacgttgtgttcagcattccaaaacgtttcctccttcatggaaccagtaaatctagatgctttcggtttccaaggggcacaaaatgttgctatgttgaacaaaacaagtcttccaaatgggaatccctcgctgtttgataatgctgccatagcatcactacatgatagcaaagagtttctcaatggtggttccatcccttcgtttggtactgtcctgcaggcactaggagcgggtggtttgaaggctgctcaacaggagcaaaatatccggaatatacctctccctacattcacatctggtagtcatttggcagttactgatgcacaagggccaccacttccttcaaagataccaccattgatccatgaccataatagtgagtaccctattaaccattcttctgatgtggaaccccaagcaaattcagctcctggaaatagtgccaatgcgaagccacgtacaagggctcgccgtggacaggcaactgatcctcacagtattgctgaacggcttcgccgagagaaaatttcagaaaggatgaaaaatctccaagtccttgtcccaaactccaataaggcagataaggcatcaatgcttgatgaaataattgattatgtgaaatttcttcagcttcaggtcaaggtattgagcatgagcaggctaggagctcctggagcagttcttccccttcttagggaatctcaaaccgagtgccatagtaatccatctctatcagcttcaaccatttcacaagggccaccagacatgccagactcagaagacagctctgcctttgagcaagaggtagtgaagctgatggaaacgagcatcatcagcgcgatgcagtatcttcagaacaagggtctctgcctgatgcccattgctctcgcttcggccatatccaaccagaaaggcatggctgctgctgctgcaatccctcctgaaaaatga

SEQ ID NO: 11996 - DNA, 1392 bp, Oryza sativa
  Clone ID: TFbOSC401380j.C1.o29.fg
atgcaacccaacgcccgccaaatgcgcggcggcggcggcggcggcggcggcgggcaggacgacttcttcgaccagatgctgtccacgctgccggcggtgtggtccgagctcggctccggcaagcccgcctgggacctcacggccggcgccgtaggaggaggaggaggagcctccgatgaccactccgccgcggcgttcgacgactccgcgctcctcgcctcccgcctccgccagcaccagatcgacggtggaggcgacaagcccatcatgctccaactcagcgacctccaccgtcatcacggcctcgccgccggcgatgacagcggcggcgctgccgggttccttcccctgtcgctgttcgctgaccggtcgcaggacgacatcgacgccgccttcaagtcccccaatggcgctagaggtgaccatgcgctgtacaatgggttcggggccgccggaatgcatggcgccgccgccatgcagccgccgccgttcgggcagggaggatcaatgccggcgcagagcttcggtggcggagcggccgcgagcggcggcggcggcggcgggtcggcgtcggcggcagcggcggctggggcatcgtcgggcggaggggcggcggcgccgccgcggcagcggcagcgggcgaggagagggcaagccactgacccacacagcatcgccgaacgtgtataccactctcccaccacctttcccttctcgcccccattttttattgcctccatgccatgttgtctccggagggagaggatagctgagaggatgaaggcgttgcaggagctggtcccaaatgccaacaagaccgacaaggcatcgatgctcgacgagatcattgattatgtgaagttcctccagctccaagtcaaggttctcagcatgagcagattggggggagcttctgcagtcgcgcctctagtggctaacatgtcatcagagagtaatgggaatggcaatgccaccagcagcagcgggaacggcgaggcggccaatggcagcagcaacggcgacaacaatggtggcggcacactgcgggtgacggagcagcaggtggcgaagctgatggaggaggacatgggctccgccatgcagtacctgcaggggaaggggctatgcctgatgccgatctctctcgcaacggccatctcctccgccacctcctcgtcgctcctcccccgcactgggggaggcgctggagggtccctacatgaaggtggtaatggtacatcaccaccattggtgaatggcaccgccaccggatgtgacgacgccggagtattcttttctgttaaatttgtcgtggagctgtcgtttctcctgctgaatgaagactgtagaggtaaggaggaatcgaaattattggtccagaagggaccctga

SEQ ID NO: 11997 - DNA, 1356 bp, Oryza sativa
  Clone ID: TFbOSC400506j.C1.o47.fg
atggcgatttgcagcacggacaacgagctggtggagctgctatggcacaacggcggcgtcgtggcgcagccgcaggcggcgcaggcgagggtcgtctcctcctccggccgcggccagagcgccagcgtgctcaccggcgacgacacggagaccgccgcgtggttcccggacaccctcgacgacgcgctggagaaggacctctacacgcagctctggcgcagcgtcaccggcgacgcgttcccggcggccgcggcggcggggccgagctctcaccacgctccgccgccggacttgccgcccccggcggcgaggccgccgatgaggagcggcatcgggtcgagctggaccggcgacatctgttcggccttctgcggcagcaaccacatcccggagacggcggcgcagcgctgccgggacgccggcgcggcattgccgccggagcggccgcgccggtcgagcacccacgacggcgccggcacgtcgtcgtcgggcggctccggcagcaacttcggcgcttccggcttgcccagcgagagcgccagtgcccacaagaggaaaggcagagaagattcagacagtcgcagtgaggatgctgaatgcgaggcaaccgaagagaccaaatcgtcgtcgcggcgatatggatcaaagaggagaactcgtgcagctgaagttcataacctgtcagagaggagaagaagggatcggatcaacgagaagatgcgcgcattgcaagaactcatacctcattgcaacaagaccgacaaggcatctatattagatgaagcaatcgagtatctgaagtcactccaaatgcaagttcagatcatgtggatgactactgggatggcaccaatgatgttccctggtgctcaccagttcatgccaccaatggccgtgggcatgaattctgcgtgcatgcctgcggcacaaggcctaagtcacatgtcaagattgccatacatgaaccattctatgccaaatcacatccctctaaattcatctccagctatgaacccaatgaatgttgcaaaccagatgcagaacattcaactgagagaggcaagcaatcccttccttcacccagatggctggcaaacagtgccaccacaggataaggaattcaatgtaggctttgcacaaagggtcgtctttctggagatagctgaaaatattgacatgatgaacagattgcatccatattgctgttatcagcagcaggaacaacaactgggagagcctgaggattatgtctgggaaccctaccaccattgcaaattgccatcatcccagcagaaacctgaaggtggagatttggagttcatgtccaagttggttgcatctattatctcttgttga

SEQ ID NO: 11998 - DNA, 84 bp, Oryza sativa
  Clone ID: TFbOSC403417j.C1.o1.gm
cacatgatctcggagcggaagcggcgggagaagctcaacgacagcttcgtcgccctcaaggccgtcctccctaccggctccaag

SEQ ID NO: 11999 - DNA, 792 bp, Oryza sativa
  Clone ID: TFbOSC401007j.C1.o1.fg
atggacgagcttgtactctccccttcctccttctccgccacggcctgcttcccgacgcttgacttcgagttctgcgaggtccccgaccaatggctgctgggactcggacacgacgagctcgacaaggatgccgccgcctccgccttggcggcggcagcggcctcgcaatcggcgagcaacgacgacgtgcccaggaacccgcccgccacgacgacgacgacgaagcggcgggggcggaagccagggccacgctccggcggcggcggcgcgcccccgatcggccacgtggaggccgagcggcagcggagggagaagctcaaccgccggttctgcgaactccgcgccgccgtgcccaccgtgtcacggatggacaaggcgtccctcctcgccgacgccgttgactacatcgccgagctgcgccgccgcgtcgagcggctcgaggccgaggcgcggagggcgccgctggctccctccgctgccgccgccgccgcctgggccgcggggctgggcgccggcgccatcggccgggatgatctcgtggtgcggatgatcgggcgtgacgccgccatactgcgcctgacgacggcggcggcggcggcgcggcacgccccggcgcgcatgatgtgcgcggtgcgggcgctgaacctggcggtgcagcacgcgtcggtggcgcgcgtgggcggcgcgacggtgcaggacgtgatggtggacgacgtgcccgccgcgctccaggacgaagcccgcctccgcgccgcgctgctgcacacgctgcagctcgccgacacgacctag

SEQ ID NO: 12000 - DNA, 1458 bp, Oryza sativa
  Clone ID: TFbOSC401238j.C1.o2.gm
atggagctaatggacgacgacggctcgtcgtccctcctggaggagctcatggcgccgctccggagaggcacaccgacgacgacgccggaagatctgtggcttcaggcgtacccgatgatgatgagcccgatgtgcggcgacggcgtcatgctcggtgacctcctcgtcgggggcggcaacgcgaggaacacgcttgcctcgccgccgccgccgtcgttcccactgcctgtgcctctgacgacgacgactccttgtccgcctctgcacgaggtcagctttgagtttgattcaattgattgcttgggtgaagtgtgcaacccgtacaagagatcaggcggcgctgtccgtgccaccgccgccgctcaggtgatggtggccgccatggatccgagacgcgaagctgcgtcgtctgcggtggcggtggcggcggtggaggaggaggagagatgcaaggcgcgacgtggcgctggaggcggtggtgatagtggcgagctggcgcccatgttcgtgttcggcggcggcggcggcgcggcggcgagcgtccgcccaagaagctgcaggccgccgcaaccaggcgcgccgtccaagaacctgatggcggagcggcggcggcggaagcggctcaacgaccgcctctccatgctccgctccgtcgtgcctaggatcagcaagatggacaggacctcgattctcggcgacaccatcggctacgtgaaggagctgatggatcggatcaagaacctccaggtcgaggccgccaccggtgactcatcctcctcctccacggagaatctctccatgctgaagctgaacacgctcaagcctccgccgtcgtcgagctccggcgaagagacgccgcttatcagaaactcgacgaggttcgaggtggagaggagggagaacggaagcacgaggatcgagatggcatgcgcggcgatccccgagctgctgccgtcgacgctggccgcgctggaggcgctgggcgtggagatcgagcagtgcgtcatcagctgcttcgatgacttcgccatgcaggcctcctgcctacaggcggcggcgcgggagcagaggtccaggttctacatcttccgcaggtgcgtcgccatgctcctctgctggtacaagtacaggaacatcacaccccttcgtgcgccgaagaccgccacgcccaccggcagctcctcctcacacctaggtcgcctcctccaccgccggccgcgcctctctgcgccaagccgacctcctccaccggacgcgcctctcgcgccaatccggcctccctccatcggctgcgcctctcgcgccaagccggcctccatctccgccgcccgtgcctctcgcgccgagccggcctccgctgccatcggctgcgcttctctgcgccaagccggtctccgacccttccaccaaacgatgccgcgcagaccagaagcagccgtctcccacgccctcggctag

SEQ ID NO: 12001 - DNA, 990 bp, Oryza sativa
  Clone ID: TFbOSC410031j.C1.o10.fg
atggcgttagaggccgtggtgtttccgcagggccatttcggctacgggtgcggaagggactcgccggcgtacgggatgccgtggtgcgacgtcctggctgctgccggcggcggcggcggcttcggtgagttttacggagtggacgagtgggatgaccagctgcaggtcgcctccgtggatgagtgggaggtggcatccaaggataactcggatgcttccacggagggcaaggcggcggcggcggagcgggcggagccggtggccgccgggaggaggaaacggaggcggacgaaggtcgtcaagaacaaggaggagatcgagtgccagcggatgacccacattgccgtcgagcgcaaccgccgccgccagatgaacgagtacctcgccgtgctccgctccctcatgccggcgtcctactcgcagaggggtgatcaagcatcgatcgtcggaggagcaatcaactacgtgaaggagctggagcagctactgcagtcgctggaagtccaaaagagcctcaagaaccgcagcggcgccatggacgccgccggcgattcccctttcgccggcttcttcagcttcccacagtactccacgtcgcctcgcactggctgcagcgccgccgccagcgccgggagctccggcagtgcgagcagcgtcgtcatggacgacacggcgggctccgcggagagcggccggcagtcggcggccatcgccgacatcgaggtgaccatggtggaagggcacgcgagcctcaaggtgctcgcgcggcggcgaccgaagcagctgctgaagctggtcgtcgggctgcagcagctgcgcatcccgccgctgcatctcaacgtgaccaccgtcgacgccatggtcctctactccttcagcctcaaggtggaggatgattccaagctgggctctgtggaagacattgccaccgctgtgcatcagatcctgggcagcattcagcagcaggaggccgtcctctccatcagctga

SEQ ID NO: 12002 - DNA, 1206 bp, Oryza sativa
  Clone ID: TFbOSC401398j.C1.o3.fg
atgtacggcgcgccggtgtccaaggacctgagcctgcagccagccggggtgcggacgccgccgcagatgagctcgccgggcttgctgcggtacaggtcagcgccgagcacgctgctcggggaggtctgcggcgacttcgtcctccccggtggtggtggtggtggtgggcagctgcagctgcagctgcagcagcagcggcctgggagcccggaccacgccgcggacaccgtcctcgcgcgcttcctcgccggccatggcggccacgacaacaagcctccccgccccgccgcccacttcgccccaccggaagactccatggcctcgcatcagcagcagctcatgtaccagtcgcatcagcagcagcagcagatggcttccgccatggagggactctaccgcaccgtcagctccggcggcacggagtccaccgccgccgccgccggcaacagcctcctccggcagagcagctcccccgccggcttcctcaaccatcttaccatggacaacggatacgggaatatgctaagagcgggcatgggcggcggcggcggtggcggcgacccgcggctcaaggggcagctcagcttctcgtcgcggcaggggtcggtgatgtcccagatctcggagatgggcagcgaggacgaggagctcgccggcggcggcggcagcccggaggctggcagcaacggcggtggcgccgcacgcggcggctacggcggcgggtacgcgatggggtcctccgcctgggaggagccctcgccgccggcgacgtcgctcctcccggacagcagcctcccgtccaagcgcccccgcgacgacctgccgcggcagctcagcctcccggcggcgtccaagaacagcagcaagcccccctcctccgcctccgccgccgcgtcgccggagatggccgccatcgagaagttcctccagttccaggacgccgtcccctgcaagatccgcgccaagcgcggctgcgccacccacccccgcagcatcgccgagcgggtgaggaggacgcggatcagcgagcggatacggaagctgcaggagctcgtccccaacatggaaaagcaaaccaacactgctgacatgttggatcttgccgtggactacatcaaggagctccagaagcaggtcaaggtgttaaacgacagccgttccagctgcacctgctcggcgagcaagcagaagcacttcgccggctaa

SEQ ID NO: 12003 - DNA, 1649 bp, Oryza sativa
  Clone ID: TFbOSC400741j.C1.o8.fg
atggccgacgagctggtcctgcagagaagcgagcagctgagggagctctacgactctctcctctccggcgagtgcggccaccgagcgaggaggcccgtcgctgcactgttgccggaagatctcggggacacggaatggtactacgtcgtctgcatgacctacgccttcggcccccgccaagggtgcgtatggttgccaggcaaaagcttcgcaagcaatgaatttgtttggctgacaaacgctcagtctgcagatagaaaactattccatcgcgcgcttatagcaaagacaatcgtctgcgtgccatttatcatgcatggtgtccttgagctcgggaccactgatccgatttcggaggacccggctctcgtcgaccgtatcgcggcgtcgttctgggatacgccgccccgcgcggcgttctcgtcggaggcgggagacgccgacatcgtcgtcttcgaagacctcgaccatggcaacgccgccgtcgaagcgacgacgacgacggtcccgggggagccacacgcggtagccggcggcgaggtcgccgagtgcgagcccaactccgacaacgacctcgagcagatcaccatggacgacatcggcgagctctacagcctctgcgaggagctggacgtcgtgcgccctctcgacgacgacagtagcagctgggcggtcgcggatccctggtcgtcctttcagctagttccgacgtcttctccggcgccggatcaggcgccggcggcggaagctactgacgtcgacgacgtcgtcgtcgccgctttagacagtagctccattgatggatcttgcaggccgtcgccgtcgagttttgtggcgtggaagaggacggcggactcggacgaggtgcaggccgtgccgctcatcagcggagagccgccacagaagttgctgaagaaagctgtcgccggagccggtgcctggatgaacaatggtgacagcagcgcggcggcgatgacgactcaaggaagcagcatcaagaaccatgtcatgtcagagagaaggcgccgggagaagctcaacgagatgttcctgattctcaaatcagttgtcccgtccattcacagggtaatactaattactacttcatccgtttcacaatattcattaccatcaatatgaatatgggaaatgctagaatgacttacattatgaaacggagggagtgtaatttttttagaaccaaatttgtcaaggtggacaaagcatccattctcgcagaaacgatagcctacctcaaagagctggagaaaagagtggaagagctggaatccagcagccaaccatcgccatgtccattggaaacaagaagcaggcgaaagtgccgtgagatcactgggaagaaggtttctgcaggagcgaagagaaaggcgccggcgccggaggtggccagcgacgacgacaccgacggggagcggcgccattgtgtgagcaacgtgaacgtcaccatcatggacaacaaggaggttctcctcgagctgcaatgccagtggaaggaattgctgatgacgagagtgttcgacgcgatcaagggagtctccctggatgtcctctcggtgcaggcatcaacatcggatggtctccttggactgaagatacaagccaaggtcgtcatctcagcggctaagtag

SEQ ID NO: 12004 - DNA, 987 bp, Oryza sativa
  Clone ID: TFbOSC401695j.C1.o30.fg
atggcgctggaggcggtggtttactcccacggcggccatttcggcgggtacggcggcgggctgatgggcggcgccccggcggcgccgtgggatgtcttcgcagccgccggtggcggcgggagctgggacgatcccggcctgttcgcggcagaggcgtctcttgatgtgatccagggcgtggatgagtgggaggtggatcaggatcagcatgcttcttcttcttctaaggtggcggcgcggccgcctgtgaaggcggcggcggcggcggggaagagaaagaggcggcgggcgaaggcggcgaagaaccgggaggagatcgagagccagcggatgacccacattgccgtcgagcgaaaccgccgccgccagatgaacgagtacctcgccgtgctccgctccctcatgccaccttcctacgcccaaaggggtgaccaagcatccatagttgggggagcaatcaactacgtgagggaactagagcagctgctccaaacactggaggcgagaaggaccatcaaggaccacatcgacggcggcgccggcgagtctccctcccccttcgccggcttcttcgccttcccacagtactccaccgccacctccggccatggcggcggcggcgatgcacacagcaggatcgtcgtcaagcctgcagagacgacgactacggccgccggtggcggcgccggcgcggcgatcgccgacatcgaggcgagcatggtggagggccacgccagcgtcaaggtgcaggcgcggcggcggccgaggcagctgctcaagctcgtcgccgggctccaccagctagggctcaccaccttgcatctcaacgtcaccaccgtcgccgccatggccatgtactccttcagcctcaaggtggaggatggatgtaagcttgggtctgtggaggagattgcaactgcagtgcatgagattctggagaggatgcaggaggagcaggcttttgctgatgccaaaactagcttgtga

SEQ ID NO: 12005 - DNA, 1842 bp, Oryza sativa
  Clone ID: TFbOSC100243j.C1.o15.fg
atggaggctgatgaggatggtgccaatggcggaactggtgggacatggactgacgaggaccgagcgctcaccgccagtgtgcttggaacggatgcttttgcttacttgacaaaaggaggtggtgccatatccgagggccttgttgctgcatctttgccagtggacttgcaaaatagactccaggagcttgtcgaatcagatcgtcctggtgctggttggaactatgccatattctggcagctgtcgcgcacaaagtccggtgaccttgtccttggatggggggatggctcttgccgtgagcctcatgatggtgagatgggacctgctgcttctgcaggtagtgacgaggccaaacagaggatgcgcaagcgtgtgctgcagcgattgcactcagcattcggaggtgttgacgaggaggattatgccccaggcattgatcaggtgacagacacagagatgttttttctagcatctatgtactttgcatttccacgccgtgctggtggccctggtcaagtatttgcagcaggcgtgcccctgtggattcccaacactgaacgtaacgtatttcctgccaattactgttaccggggataccttgcaaatgctgcaggatttagaactattgtgctagttccatttgagaccggtgtacttgaactgggttcgatgcaacaggtagcggagagttctgacactctccagaccataagatctgtgtttgctggggcaattggcaataaagctggagttcagagacacgaggggagtggccctacagataagtcaccaggtttggcaaagatttttgggaaggaccttaaccttggccggccttcagcaggcccaggaactggcgtgtcagaggcagatgaaaggtcgtgggaacaaaggactggtggtgggagctcattgctccccaatgtccaaagaggtttgcagaatttcacttggagtcaggctcggggcctgaattctcatcagcagaagtttggcaacggtatattgattgtgagcaatgaagccacaccgcgcaacaatggaggagttgacagctctactgcaacacagtttcagcttcagaaagcaccaccacttcagaaactaccacagctccagaaatcacatcagctagtaaagccacagcaactagtgagtcagcaacagttgcagcctcaagctcccaggcaaatagatttcagtgctgggaccagttccaaacctggtgttttgactaaaaaaccagctggtattgatggggatggtgcagaggtggatggcttgtgtaaagacgaaggtccgccacctgcattagaagaccggcggcctagaaagaggggaagaaagcctgcaaacgggagggaagagccactaaatcatgttgaggccgagcgccagaggagggagaagctcaaccagcgattctatgcactgagagccgttgtacccaatatatcaaaaatggacaaggcatccctccttggtgacgccataacatacatcactgacctacagaagaagctcaaagagatggaggtagagcgagaaaggcttatcgagtctggaatgatcgatccgagggatcggacgcctcgacctgaggtggacattcaggtggttcaggatgaggttctagtccgagtgatgagccccatggaaagccaccctgtcagggccatcttccaagctttcgaagaggcagaagtccatgcaggggagtcgaagatcacaagcaacaacggcacggccgtgcattctttcatcatcaagtgccctggcgccgaacagcaaacgagggagaaggtgattgccgccatgtctcgcgtgatgaactcagggtag

SEQ ID NO: 12006 - DNA, 1842 bp, Oryza sativa
  Clone ID: TFbOSC22065j.C1.o1.fg
atggaggctgatgaggatggtgccaatggcggaactggtgggacatggactgacgaggaccgagcgctcaccgccagtgtgcttggaacggatgcttttgcttacttgacaaaaggaggtggtgccatatccgagggccttgttgctgcatctttgccagtggacttgcaaaatagactccaggagcttgtcgaatcagatcgtcctggtgctggttggaactatgccatattctggcagctgtcgcgcacaaagtccggtgaccttgtccttggatggggggatggctcttgccgtgagcctcatgatggtgagatgggacctgctgcttctgcaggtagtgacgaggccaaacagaggatgcgcaagcgtgtgctgcaccgattgcactcagcattcggaggtgttgacgaggaggattatgccccaggcattgatcaggtgacagacacagagatgttttttctagcatctatgtactttgcatttccacgccgtgctggtggccctggtcaagtatttgcagcaggcgtgcccctgtggattcccaacactgaacgtaacgtatttcctgccaattactgttaccggggataccttgcaaatgctgcaggatttagaactattgtgctagttccatttgagaccggtgtacttgaactgggttcgatgcaacaggtagcggagagttctgacactctccagaccataagatctgtgtttgctggggcaattggcaataaagctggagttcagagacacgaggggagtggccctacagataagtcaccaggtttggcaaagatttttgggaaggaccttaaccttggccggccttcagcaggcccaggaactggcgtgtcagaggcagatgaaaggtcgtgggaacaaaggactggtggtgggagctcattgctccccaatgtccaaagaggtttgcagaatttcacttggagtcaggctcggggcctgaattctcatcagcagaagtttggcaacggtatattgattgtgagcaatgaagccacaccgcgcaacaatggaggagttgacagctctactgcaacacagtttcagcttcagaaagcaccaccacttcagaaactaccacagctccagaaatcacatcagctagtaaagccacagcaactagtgagtcagcaacagttgcagcctcaagctcccaggcaaatagatttcagtgctgggaccagttccaaacctggtgttttgactaaaaaaccagctggtattgatggggatggtgcagaggtggatggcttgtgtaaagacgaaggtccgccacctgcattagaagaccggcggcctagaaagaggggaagaaagcctgcaaacgggagggaagagccactaaatcatgttgaggccgagcgccagaggagggagaagctcaaccagcgattctatgcactgagagccgttgtacccaatatatcaaaaatggacaaggcatccctccttggtgacgccataacatacatcactgacctacagaagaagctcaaagagatggaggtagagcgagaaaggcttatcgagtctggaatgatcgatccgagggatcggacgcctcgacctgaggtggacattcaggtggttcaggatgaggttctagtccgagtgatgagccccatggaaagccaccctgtcagggccatcttccaagctttcgaagaggcagaagtccatgcaggggagtcgaagatcacaagcaacaacggcacggccgtgcattctttcatcatcaagtgccctggcgccgaacagcaaacgagggagaaggtgattgccgccatgtctcgcgtgatgaactcagggtag

SEQ ID NO: 12007 - DNA, 560 bp, Oryza sativa
  Clone ID: TFbOSC7102j.C1.o1.gm
gcccaggaactggcgtgtcagaggcagatgaaaggtcgtgggaacaaaggactggtggtgggagctcattgctccccaatgtccaaagagctggtattgatggggatggtgcagaggtggatggcttgtgtaaagacgaaggtccgccacctgcattagaagaccggcggcctagaaagaggggaagaaagcctgcaaacgggagggaagagccactaaatcatgttgaggccgagcgccagaggagggagaagctcaaccagcgattctatgcactgagagccgttgtacccaatatatcaaaaatggacaaggcatccctccttggtgacgccataacatacatcactgacctacagaagaagctcaaagagatggaggatgaggttctagtccgagtgatgagccccatggaaagccaccctgtcagggccatcttccaagctttcgaagaggcagaagtccatgcaggggagtcgaagatcacaagcaacaacggcacggccgtgcattctttcatcatcaagtgccctggcgccgaacagcaaacgagggagaag

SEQ ID NO: 12008 - DNA, 840 bp, Oryza sativa
  Clone ID: TFbOSC400553j.C1.o15.fg
atggcgcagtttcttggagctcatggtgatcactgcttcacctacgagcaaatggatgagtccatggaggcaatggcagcgatgttcttgcctggccttgacaccgactccaattcttcttctggttgtctcaactacgatgtgcctccacaatgctggcctcagcatggccatagctctagcgtcaccagcttccctgatccagctcatagctatggaagctttgagttcccggtcatggatccgttcccgatcgccgatctcgacgcgcattgcgccatcccctaccttactgaggatctgatcagccctccacatggcaaccatccatcagcaagagtggaagaagctacaaaggttgttacaccagtggctaccaagaggaagtctagtgctgccatgacggcatcaaagaagagcaagaaggctggcaaaaaagatcctattggcagcgacgaaggcggcaacacctacattgatacgcaaagttctagcagttgcacctcagaggaaggaaacctggagggcaacgcgaagccgagctcgaagaagatgggtactagggccaaccgtggggcggcaaccgatccccagagtctctatgcaaggaagaggagagagaggatcaatgaaagattgaggatcctgcagaacttggttcccaatggaacaaaggttgacatcagtacaatgctggaggaagcagtgcagtatgtcaaatttttgcaacttcagattaagttgctaagctctgatgacacgtggatgtatgcaccaatcgcttacaatggagtcaacatcagcaatattgatctgaacatctcttctctgcaaaaataa

SEQ ID NO: 12009 - DNA, 885 bp, Oryza sativa
  Clone ID: TFbOSC400390j.C1.o14.fg
atggcagctcaggcaagcagcaagcgcggcatgctgctgccacgggaggcggtgctctacgacgacgagccctccatgccgctggagatcttgggctaccacggcaatggcgtcggcggcggtggctgcgttgacgccgattactactacagctggtcggggtccagctccagctccagctcgtcggtgctcagctttgaccaggcggcggtcggcggcagcggcggcggctgcgcccggcagctggctttccatcccggcggcgacgacgacgactgcgccatgtggatggacgccgccgccggcgccatggtcgagaacacgtctgtcgtcgccggcggcggcaacaactactgtcatcgcctgcagttccacggcggcgccgccggtttcggactcgcgagcccaggctcgtcggtcgttgacaacggcctcgaaatccacgagagcaacgtcagcaagccgccaccgccggcagccaagaagcgcgcatgcccgagcggcgaggcgagagcagcggggaagaagcagtgcaggaaagggagcaagccaaacaaggctgcttctgcttcttctccttctccttctccttctccttctccttctcctaacaaggaacaacctcaaagcgccgctgcaaaggtaagaagagagcggatcagtgagaggctcaaagttcttcaggatctcgtgcctaatggcacaaaggtagacttggtcaccatgctagaaaaggcgatcaactacgtcaaattcctccagctgcaagtgaaggttttggctactgatgagttctggccggcacaaggagggaaagcaccagagctctctcaagtcaaggacgccttggacgccatcctatcttctcagcatccaaacaaatga

SEQ ID NO: 12010 - DNA, 885 bp, Oryza sativa
  Clone ID: TFbOSC400498j.C1.o30.fg
atggctatggtggccggcgacgaggcgatgtcagtgccatggcacgacgtcggcgtcgtcgtcgaccccgaggcggccgggacggcgccgttcgacgccggcgccggctatgtcccatcgtacggtcagtgccaatactactactactacgacgaccaccaccaccacccgtgcagcacggagctgatccacgcgggcgacgctggcagtgcggttgcggttgcgtacgacggcgtcgacggctgggttcacgccgccgccgcagccacctccccgtcctcgtcatctgcgctcaccttcgatggtcacggcgccgaggagcacagcgcagtgtcgtggatggacatggacatggacgcgcacggcgccgcgcctcccctaatcggctacggcccgacggcggcgacctcctccccctcctcctgcttcagctccggcggctccggcgacagcggcatggtgatggtgaccaccaccaccccgaggagcgccgccgcctctggttcgcagaggcgggcacgcccgccgccgtcgccgttgcagggatcagagctgcacgagtactccaagaagcagcgcgccaacaacaaggagacacagagctcagctgccaagagccggcgggagaggatcagcgagcggctgagggcgctgcaggagctggtgccgagcggcgggaaggtggacatggtgaccatgctggacagggccatcagctacgtcaagttcatgcagatgcagctcagggtgctggagaccgacgcgttctggccggcgtccgacggcgccacgccggacatctcccgggtcaaggacgcgctcgacgccatcatcctctcctcgtcctcgccctcgcaaaaggcttctcctcctcggtcgggctag

SEQ ID NO: 12011 - DNA, 1698 bp, Oryza sativa
  Clone ID: TFbOSC401508j.C1.o13.fg
atgggccgcgccgcggcgcgccttcccgggtgcctctacctctgcctctgggcgccggcggcggccatcgccggcggcgtccagcccaaccatctgttctgcttggacgcgtggatcggcggcggtggcggcgtcggcgccggcggaggcggtggtgaccgcgcgctggagctgttcgaggcgtacaggggggcgctctgcgccgccgtgagcgggtgcgtgccgggttgggcgtacaaggagggcgccgcgtgcatggagctgacggagcacgacctggcggcgtcggcgtcgctgcaggtgcagcagcagttctaccacgaaaccggcaccaagatggcggtgttcatgggatgcgacagcggggagatcgaggtcgggctgtcggccgcctcggcgacggcgacggcggcggtggtgggtgagatgcagcagtcgatactggaggagctcctccagatgccgccgccgccgccgtcgccctcgtcgtcctcgctgctgtcgctgtccgtcgggagcccggaatactcctcgctcgttcgctcgatggcgacgtcggtcggtgcgtccgccgccgcggatccgtccccggtgcacggcggcctgctcgcgcctgtctacggcgagttcccgggctccgacgacgacgccgcgatggcgcaggcgatgctcgcggtcatctccacccccgcgcctccgcctccgctgtggcgtccgccccggcgccgcgcgcgctccagctcgtcgccgcgcagggcgacggcgttcaaggcgtacaacgccgcgctctcgccgagggcgcggccgcggccgggcgcgccggggcagaggatgatcaagacgggcatctcgctcctcgccagcgtgcacatgcaaacgcgcagccgagagctcgccgcggcgcgccaaagagacactcacgccgcgccgccgccgccgccaccgccgccaccgcccagcagcagccagcttcaccacatgatctcggagcgccgccggcgagaacggatcaacgacagcttccagacgctcagggcattgctccctctccctcccgattcaaagaaagacaaggcggctattctcgccagcacgacggagtacatggacaagctgatatcgcaggtgtccgagctgggggagaagaaccggcagctggaggcgcagctcgccgcgcgttccggcgaggcccagtggccggctgcaagcggcggcggtggcggtgagtcgtcgtcggagagagtgcaggtcgacgttgtcatcgccggctcgtcggcgtcgaccgatcagcctcgggaggtgagcatcagggtgacggtgcgcgctgagtgcgacgtgtcggagctcgtcgtcgccgtgctcgcgcggctgagagagatgggtcgcttcgccgtggtgtccgtcgacgcggggcgaaggagcagctcgtttgcacaagccagccttacgttccgtgtcatgaattacaaatacaaaacaaattcagtcaccgtggggaaatctcagctaattgtccatactgaaaagtacaaggccggcgacgtctgcgacgagacatcgctgaaggaagccgtggcgaaggccgtggacggcgcggctttcttcaagtttcagagaactccttttatgcattcaaaaaactatgaccagtctgatgatcttgagggggaagctaagttgctaccgcttgattcttga

SEQ ID NO: 12012 - DNA, 288 bp, Oryza sativa
  Clone ID: TFbOSC1723j.C1.o7.gm
atgcccgcatccacggcacagaccgtcccgccctgctccacggccgctgatgtgcgcatcaagtttgtgatgtcgcacatcgtcttcctcctcgctacagccccacccttggccgggcagcgcagcaaggcagagccgctggagtactggagtccgatttggttgcaacagcgacaggggctggggctgagatggttccatgcatggatgctgcggatggaaggtccgggagatgtggaacgaagccacaaagcgcggcagggagtaatgccggccgagcgtgattga

SEQ ID NO: 12013 - DNA, 1206 bp, Oryza sativa
  Clone ID: TFbOSC400822j.C1.o1.fg
atgggagacgcgctgtgtgatcagctcctcttggtggacagcgacggcggcgagttcatcccccaccacgccgacgccgacgccgacgacctcttcaccatcctcgagacgtgggagggctgcgccaacgtcgtcgccggcggcgcccccgcgaccacgacgacgttaggtagtcctattgccgccgctgcctgcatctccggcgttgttggtgggcagaatcatcagcagctgccggaacctgccgccgcgaagaccgtgccagccaccaataacaagcggcgggaggaggaggtggcggaccgtgacggcgacggagacgacgacgacggttcgccgcagaagaggcgcaagtgctgctcgccggagtcttcgacgacggacgtggcggcggcgacgacgcccaagacggcgcacatcgccgtggagcgcaaccggaggaagcagatgaacgagaacctcgccgtgcttcgctccctcatgccatgcttctacgtcaagcggggagaccaggcatccatcataggaggagtggtggactacatcaaggagctgcagcaagtattgcactcgctggaggccaagaagcagcgcaaggtctacaccgaccaggtgctcagcccacggccgccggcgacggtggcggcgtcgtgctgcagcccgcgcccaccgcagctcagccccaggctgccgccgcagctgctcaagtccacgccgccgctcagcccgcggctcgccgtgccgatcagccccaggacgccgccgacgcccggtagtccctacaggctcctccggctgccgccgccgccgcccccggcgtccggctccaactacgcgtccccggcgatgacgccgacccaccacgagacggcggcgccgtcgctggacgccatcgccgccgagctgtcggcgtacgccagcaggcaggcgctgggcggcggcctcctcctccccgacgtgaaggtggagttcgccggcgcgaacctggtgctgaagacggtgtcgcagcggtcgccggggcaggcggtgaagatcatcgccgccctggagggccgatcgctggagattcttcacgccaagatcagcaccgtcgatgacaccgccgtcaactccttcactgtcaagtatatctttgggcagattggaattgagtgcgagctcagcgctgaagagttggtacaggtgattcagcaaacgttcacatga

SEQ ID NO: 12014 - DNA, 1119 bp, Oryza sativa
  Clone ID: TFbOSC400032j.C1.o27.fg
atgccggcggcgggggggctggcgaggtacggctcggcgccggggtcgctgctggcgtcgatcgccgactcggtgatccggggccgcggggttggggttgtcgatcagctgcatcatcatcagcatcagcatcagcttccgccgccgccgccgccgcagcagcagcagatggtggggaggtacttctccgcggagtcgtcggggctcacctcctgcgagtccagctgccggacgacgacgacgacgtccacagcggcggcggccgatgtcgggcggcacccgctcgagcgcgcgtacggcggctccggcgagatccacgtcgacgcctcctccgccgccgtcccgctcttccgccacagcagctcccccgccggcctcctctcccgcctcatggctgacccgcacggcaatggcatggccgcgacgagagggatgggcggctactccggcggcggcggcgacgccggcgcgatggcgcacaggaggctgagctcgcagtggagcttctcgcggcaggacctgccgcagatatcggagatgggcggcctcatccccgacatcggggagagcatcgtcaccggcggcggcggcaacagctccagcgatggcgccggccacggcgcgcagtcctcctccttcctctcctccaggaacttctccatgagctcctgggacgacaccaactccatcatgttctcgcccccgagcagcagcaagaaggcccgcgtcgccgccgccgccgccggcgaccacggcgacgacatggtctccagcttcagcaacatcgactcccagtttggcttgtcgaagcagtcgtcgctggagatggccggcatggatgacttcttgcagctccagccagactccgtcgcctgcagggcccgggcaaagcgcggctgcgcgacgcacccgcggagcatcgctgagagggagaggagaacgaggattagcaagaggctgaagaagctgcaggatctcgtgccgaacatggacaagcaaacgaatacatcagacatgttggatattgctgtaacctacatcaaggagcttcagggccaagttgagaagctaaaacatgaccaagcaaactgcacttgctcaggcaagcacgattgctga

SEQ ID NO: 12015 - DNA, 1281 bp, Oryza sativa
  Clone ID: TFbOSC400853j.C1.o7.fg
atggacgccgagatggccatgggcgagagcttcgcctactactgggagacgcagcgctaccttgagtccgaggagctcgacagcatgtacctgccgacgcaggatgactccaactacgagtcgagctcgccggacgggtcgcactcgtcgtcggcgccggcgccggcggccgtgggcggggacgcagccgccgcggtggcgggtagcggtggcgggatgacgacgatgatgatgggcggcggcggcggcggtggcgacgacgccggtggcgcgaacaagaacatcctcatggagcgcgaccgccgccgcaagctcaacgagaagctctacgcgctccgcagtgtcgtgcccaacatcaccaagatggacaaggcgtcgatcatcaaggacgcgatcgagtacatccagcgcctgcaggcggaggagcagcagatgctccgggaggtcgccgcgctcgagtccgccgccgcggcgagcgccgccccggccgcggcgaacccgttcgccggcctcggcgccgacgaggaacacgagtacggccaccaccacccctcgtcgtcgtcggagcggacgaagaaggtgaagcgggcgctgtccgtgtcgtccatcagcgacgccctgctcgccgcggcggcgccggcgccgccggtggagatccaggagctgcgcgtgtcggaggtgggcgacagggtgctggtggtgagcgtgacgtgcagcaagcgccgcgacgccatggcccgggtgtgccgcgccctcgaggagctccgcctccgcgtcatcaccgccaacatcacctccgtcgccggctgcctcatgcacaccctcttcgtcgaggtagatcacatggatagtgtccaaatgaagcagatggtggaggctgctctctcccagcttgtggcgaccggcaggtgtggaagtgcttcacatgactacttgctatttgtcgaccacggcgccgtcgtcaatgtccgatactgtgaattcttcctgctgtgcagctccagaaccctcgccaatctccctccccggctctctttggaggctgtggcggcgcatacaccgatgccgccgttaactcgagttgaggtgggagcaaccgggacaggggtgcgcttcatgtgggagtcattgccctcgctgatgaggatggtgccgattgggtcattgaagccagcggccaatgtcagagcttgtgcggaggtggctgcaacatcgggggagtcgaacctcacgtgcagccagcaacaagtccacctccgtctcaagctttcttgcgcttaa

SEQ ID NO: 12016 - DNA, 1017 bp, Oryza sativa
  Clone ID: TFbOSC418099j.C1.o14.fg
atggatgactcgagcttcttcatgcagtgggcgatggacacgctgcaccagctcccctccgactccaccgccgccgcagcctacgccactgacgtcgccggcgacagcggcgccttcccgtcgctgcaagctctccgcaacgcctcggcggccggcggcggcggcggattccgggacctgacagtgcaggtggaccaggtccaccgcgccaacagctggagctccagcgacagcccaggcggcggcgctgccacggccgccgccgggtggtccccgcatgtcaccggcggcggcggcagggggcacaggccgatgagctggaacttcagcgcggcgtcggcgcagccgaccaccgaggatagcggcggtggaggcggcggcggagtagttccggcgccgctgcaggcgatggagactaccgcgacagcgagagcggcggtgaagaaaggaggaggcggcgggtcgtcgtcgtcggcggcggcgccgggatacgtgcaggaccacataatcgcggagcggcggcggcgggagaagatcaaccagcggttcatcgagctctccaccgtcatccccggcctcaaaaagatggacaaggcgaccatcctcggggacgcggtgaagtatgtgaaggagttgcaggagaaggtgaagacgctggaggaggaggacggcggcgggcggccggcggccatggtggtgaggaagtcgtcgtgctccggccggcagtccgccgccggcgacggcgacggcgaagggcgggtgccggagatcgaggtgcgggtgtgggagaggagcgtgctggtgcgggtgcagtgcgggaactcgcggggtttgctggtgaggttgctgtcggaggtggaggagctccggctgggcatcacccacaccagcgtcatgccattcccggcctccaccgtcatcatcaccatcaccgctaaggcaagctcgctctctaaccatcctgcattgctttgcttatatatatgcatcaaattaccatgtgtaatttccagctag

SEQ ID NO: 12017 - DNA, 2067 bp, Oryza sativa
  Clone ID: TFbOSC401909j.C1.o20.fg
atggaggcgttcatggcctccgccgacctcccggccttcccgtggggggcggcctccaccccgccgccgccgccgccgccgcctcaccaccaccaccaacagcagcagcagcaggtcctgccgccgcctgcagcagctccggcggcggcggcgttcaaccaggacacgctgcagcagcggctgcagtcgatcatcgaggggtctcgggagacgtggacgtacgccatcttctggcagtcctccatcgacgtctccaccggcgcctccctcctcggctggggcgacggctactacaagggctgcgacgacgacaagcgcaagcagcgctcctccacccccgccgccgccgccgagcaggagcaccgcaagcgcgtcctccgcgagctcaactccctcatcgccggcgcaggcgccgcccccgacgaggccgtcgaggaggaggtcaccgacaccgagtggttcttcctcgtctccatgacccagtccttccccaacggcctcggcctccccggccaggccctcttcgccgcccagcccacctggatcgccaccggcttgtcctccgccccctgtgaccgcgccaggcaggcctacaccttcggcctccgcaccatggtctgcctccccctcgccaccggcgtcctcgagctcggctccaccgacgtcatcttccagaccggggacagcatccccaggatccgcgccctcttcaacctcagcgccgccgccgcctcctcctggcccccccaccccgacgccgcctccgccgatccctccgtgctctggctcgccgacgcgccccccatggacatgaaggactccatctccgccgcagacatctccgtctccaagccaccacccccgccgccgcaccagatccagcacttcgagaacgggagcaccagcacgctcacggagaatcccagcccgtcggtgcacgcgccgacgccctcgcagccggccgcgccgccccagcggcagcagcagcagcagcagagcagccaggctcagcagggccccttccgccgggagctcaacttctccgacttcgcgtccaacggcggcgccgcggccccgcctttcttcaagcccgagaccggcgagatcctaaacttcggcaacgacagcagcagtggccggaggaatccgtcgccggcgcccccggccgccaccgccagcctcaccaccgcgccggggagcctgttctcgcagcacacgccgacgctgacggcggcggcgaacgacgccaagagcaacaaccagaagaggtccatggaggccacctcccgcgccagcaacaccaacaaccacccggcggcgacggcgaacgaggggatgctgtccttctcgtcggcgccgacgacgcggccgtcgacggggacgggcgccccggccaagtcggagtcggaccactcggacctggaggcgtcggtgcgggaggtggagagcagccgcgtggtggcgccgccgccggaggcggagaagcggccgcggaagcgcgggcggaagccggcgaacgggcgggaggagccgctgaaccacgtggaggcggagcggcagcggcgggagaagctcaaccagcgcttctacgcgctgcgcgccgtggtgcccaacgtgtccaagatggacaaggcgtcgctgctgggcgacgccatctcctacatcaacgagctccgggggaagctcacggcgctggagacggacaaggagacgctgcagtcgcagatggagtcgctcaagaaggagcgggacgcgcggccgccggcgccgtcgggcggcggcggagacggcggggcgcggtgccacgcggtggagatcgaggccaagatccttgggctggaggccatgatccgcgtgcagtgccacaagcggaaccacccggcggcgcggctgatgacggcgctgcgggagctggacctggacgtgtaccatgccagcgtctccgtggtcaaggacctcatgatccagcaggtggccgtcaagatggccagccgcgtctactcgcaggaccagctcaacgccgcgctctacacccgcatcgccgagcctggcaccgccgcccggtaa

SEQ ID NO: 12018 - DNA, 834 bp, Oryza sativa
  Clone ID: TFbOSC400825j.C1.o44.fg
atgctgcagctgagcgagctgcaccggcaggccggcggcggcgaggaggacgggagcggcgcgttctcgccgctgccgctgttcacggaccggacgaacgtgccgccgcgggaggagatggagggcggcttcaagtcgcccaatgccgccgccggaggcgagcacgcgctgttcaacgggttcggcgtgcacggcggcagcggcggcgccgggcagccgccgttcggccagcttcggagggagaggatagcggagcggatgaaatcgctgcaggagctagtcccaaacgccaacaagacggacaaggcgtcgatgctggacgagatcatcgactacgtcaagttcctgcagctccaagtcaaggttctcagcatgagccggctcggcggcgccgccggcatggcgccgctggtggcgagcatgtcgtcggaggggaacagcaacgggagcagcaatggcggcggtggcaaggcgagcaagggcggcaccggcggcgagggcggcggcggcggcggaggaggaggaggaggtggcaccggtggtgggatgcgggtgacggagcagcaggtggcgaagatgatggaggaggacatgggcacggcgatgcagtacctgcaggggaaggggctctgtctgatgccgatctccctcgcctccgccatctcgtcggcgacctcatcggcgtcgctcctctcccgcccgtccatccgccacgccggcgcgccgccgcagacgatgctcgatgccgccggcccgacctcgccggcggcgatgtctaacggcgatgacccacggcacgcaaaggcggacggcggcgccggcgggacgcaatga

SEQ ID NO: 12019 - DNA, 1104 bp, Oryza sativa
  Clone ID: TFbOSC412868j.C1.o5.fg
atgcagccgagcagccgcgacacggtcgccggcggcggcggcgaggggacgcaggatgacttcttcgaccagatgctctccacgctgccgtcggcgtgggccgacctggggggcggcggcggcggcgcggcggggaagtcgccgtgggaggtcgatccggcagcggcggcggcggcgtcgcaggtgttcgacgagtcggcgctgctcgcgtcccgcctccggcatcaccagatcggtggggctggcggcggcgggggagagaagccggtgatgctgcagctgagcgagctgcaccggcaggccggcggcggcgaggaggacgggagcggcgcgttctcgccgctgccgctgttcacggaccggacgaacgtgccgccgcgggaggagatggagggcggcttcaagtcgcccaatgccgccgccggaggcgagcacgcgctgttcaacgggttcggcgtgcacggcggcagcggcggcgccgggcagccgccgttcggccagcttcggagggagaggatagcggagcggatgaaatcgctgcaggagctagtcccaaacgccaacaagacggacaaggcgtcgatgctggacgagatcatcgactacgtcaagttcctgcagctccaagtcaaggttctcagcatgagccggctcggcggcgccgccggcatggcgccgctggtggcgagcatgtcgtcggaggggaacagcaacgggagcagcaatggcggcggtggcaaggcgagcaagggcggcaccggcggcgagggcggcggcggcggcggaggaggaggaggaggtggcaccggtggtgggatgcgggtgacggagcagcaggtggcgaagatgatggaggaggacatgggcacggcgatgcagtacctgcaggggaaggggctctgtctgatgccgatctccctcgcctccgccatctcgtcggcgacctcatcggcgtcgctcctctcccgcccgtccatccgccacgccggcgcgccgccgcagacgatgctcgatgccgccggcccgacctcgccggcggcgatgtctaacggcgatgacccacggcacgcaaaggcggacggcggcgccggcgggacgcaatga

SEQ ID NO: 12020 - DNA, 576 bp, Oryza sativa
  Clone ID: TFbOSC400803j.C1.o1.np
tactaaagtagagcaagcaacagaggtttcatctcagcaagagaggatatcaatggaggaggacaaccaaaagagttgctccaaaatgcaaagcaaggaagattcttctgatggtgatggtactaaagaagattatgttcatgtccgggcaaagcgaggccaagccactaatagccacagccttgcagaaagactgaggagaaaaaagataagcgagaggatgaagctgcttcaagatcttgtcccaggctgcagtaagatcactggtaaggcagtcatgcttgatgagataatcaattatgtacagtcactacaacgtcaagttgagtttttgtcgatgaaactcgcaactgtcaaccctgagcttagctttgatattgagcagattctatcgaaacaaagcttcagtgttctctctagagtttacttgagccgtcttaacctgaaaacatcacctttttatgcaattttttatacaacaaaaatcttgaaacatagttttctgctgatattcctcgaataaatagaggaatggcaatatgcacgtcctctagaagaactgaaactaaacaaact

SEQ ID NO: 12021 - DNA, 1056 bp, Oryza sativa
  Clone ID: TFbOSC900340j.C1.o13.fg
atggcactggaggccgtgctgctctcgcgtggtgatctgtttggtcgtcgtcgttgcgccatggaaggaggaggaggtggttggagcagcccgttcagtggcttcgagggagtgatggatttggacggcggcaactgggacgccgccgcgtgctcatcgatgcttctgcatggcttccaggagctagagatccctgcggccgccgctgctgctgctgccatggcgccgccgccgccgccggtagagcctgctaattgcgcggagaatgcaggaggggttggtggtcatcaggaggatcaggctgcggtggcggcagcggcgacggcggtgcagtcggggaggaggaagcggcggcgggcgagggcggcgaagaacaaggaggaggtggagagccagcggatgacccacattgccgtcgagcgcaaccgccggaagcagatgaacgagtacctcgccgtgctccgctccctcatgccgccgtcctacgcgcaaaggggtgatcaggcgtccatcgtcggcggcgcaatcaacttcgtcaaggagctggagcagctgctccagtcgctggaggcgcggaagagttcccggcaatgcgcggcccacgacgcggcggcagcggcggcgccgttcgccagcttcttcaccttcccgcagtactcgatgagcgccgccgccgccgcggcgccggtggctcccgttgtgaacgagttgcacggccgtgacgacggcggagcaggcaccgccgaggccgaggcgtcagggtcgaagccgtcggcggtggccgacgtcgaggtgaccatggtggagagccacgccaacctgcgggtgctgtcacggcggcggccgaggcagctgctccggctggtggtggcgctgcagggccaccggctcaccgtgctccacctcaacatgaccagcgccggccacatggttctctactcgttcagcctcaaggtggaggatgattgccagcttacgtctgtggatgagattgcaaccgccgctcatcagatcattgagaagattcaagaagagcagggctgtagtttagattag

SEQ ID NO: 12022 - DNA, 747 bp, Oryza sativa
  Clone ID: TFbOSC400376j.C1.o32.fg
atggagcagctgttcgtcgacgacccagccttcgcgagcagcatgtcgtcgcttgaggcggacatcttctccggcgccggccagctgccgtcctcgccgtggctggacctagacctcgacgacgatgtccaagacctctccatggcgccgacgacggcgaacgcggtgtcctccggctacggctccggcggatccggctcccacaggaagctcagccacaacgcctacgagcgcgaccgccggaagcagctcaacgagctctactcctccctccgcgctctcctccccgacgccgatcacactaagaagctgagcatcccgacgacggtgtctcgcgtgctcaagtacatacccgagctgcagaagcaggtggagaatctggagaggaagaagaaggagctgacgacgacgagcaccaccaactgcaaaccaggagtgttggggagccagctgatgagcgagggcatggctcccatcgtttcggctacctgcatcaatgacatggagatcatggttcaggtcagcttgttgagcaatgtggcgggttcagttcttcctctctccaagtgtatcaaagtactggagaacgaaggtcttcacttcatcagttcatcgacttcctccggatttgggaacaggacattctacagtatccatcttcagagaagtgaaggaacgatcaacgaggagtgcccagcattttgtgaaaggttggagaaagtcgtcaggaacaaagcaaagctttaa

SEQ ID NO: 12023 - DNA, 1293 bp, Oryza sativa
  Clone ID: TFbOSC19437j.C1.o1.fg
atggagcttgacgaggagtccttcttggatgagctcatgtcgctgcggcgtgatggatcggcgccgtggcaggcgccgccgtacccgggtggcggcggcggcggcggcggtggcggcatgatgatgagtgacctcctcttctacggcggcgacggcggcagcgcggaggcgaggggcgggatggacgcgtcgccgttccaggagctggcgtccatggcggcgccgccgcctcagcatccgcacgaggagttcaacttcgactgcttgagcgaggtctgcaacccgtaccgcagctgcggcgcccagctcgtcccctcggaggcggctagccagacgcagacgcagctcactcctctccgcgacgcaatggtggcggaggaggagacgagcggcgacaaggcgctgctccatggcggcggcggctcgtcgtcgccgacgttcatgtttggaggtggcgccggagagagctcggagatgatggccggcatcagaggcgtcggcggcggcgtccacccgcggagcaagctccacggcacgccgtcgaagaacctcatggccgagaggcggcgtcgcaagcggctcaacgaccggctgtccatgctccggtccatcgtgcccaagattagcaagatggacaggacctcgatccttggtgacaccatcgactacgtgaaggagctgacggagaggatcaaaaccctcgaggaggagatcggcgtcacgccggaggagctcgacctgttgaacacgatgaaggattcctccagcggcaacaacaacgagatgctcgtgaggaattccaccaagttcgatgtcgagaaccggggcagcgggaacacgaggatcgagatatgctgcccggcgaaccccggcgtgctgctgtcgacggtgagcgcgctggaggtgctggggctagagatcgagcagtgcgtcgtgagctgcttcagtgactttggcatgcaggcctcctgcttacaagaggacgggaagaggcaagttgtcagcaccgacgagatcaagcagacattgttcaggagcgcaggctatggcggaaggaattatagtagatcgagtaccatttatgagttcatattcatcagcagtggtagtacctcgtttctgaacacaccagagagcaaattaaagatttgctcaagtattgtaagctttgcatttgtgaatcggtatgggaaccggccgtgtgatttgtcgaacattggatttgaattaaacgccaagaaatggttcatctggttttgtcccgagctatatatcatatgcgcgcgcatatga

SEQ ID NO: 12024 - DNA, 648 bp, Oryza sativa
  Clone ID: TFbOSC401716j.C1.o98.fg
atgcatgacccacgcggcttccccatccacccgcagccgtaccacctccaccccacggccggcggcctcggcgagggcaggatgcggggcggcgggcggcggcgccccggcgccaagctctccaccgacccgcagagcgtggcggcgcgggagcggcggcaccggatcagcgaccgcttccgcgtgctccgcagcctcgtgccgggcggcagcaagatggacacggtgtccatgctggagcaggccatccactacgtcaagttcctcaaggcgcaggtcaccctgcaccaggccgcgctcgtgcagcacgaggagggctgccagcacgccgacgtcgccgcggcgttctccgccgccgacgccgatctggcccttgagctgaaccatcgccacggcggcgccggcgatgatgacgccgggatgacgacgctggagatggcgccgatgcaagaggcggtgggctacggcgacggcccggctcatcagatgatgcagcaagcgctcgatccagcggggcagctgatgatgggcggcgctcatcagctgcctcctttgccttgctgtgtcttcgtccaggagactgacccctcgtgctactcggtgtgcaatgtccacggtgaggagtctggtgcgcaaggatcttattag

SEQ ID NO: 12025 - DNA, 897 bp, Oryza sativa
  unsure (1)..(897): unsure at all n locations
  Clone ID: TFbOSC400780j.C1.o2.gm
atggcgcggcggtgcgggaatangcactccttcgtcgtcgcctttttgtcgtgctgcccctgtccaccggtcgccgacctcgacctgctcgagagctgcgtcacgcaggcggcggcgccccccgtcacggctccggcgaccagggcggagcggaggaggaagaggccgaggccgcgcccgcgcgccgcgccgccgccggagaagcgcaagaagcccgaggaggccgagaaccagcggatgacgcacatcgccgtggagcgcaaccgccgccgcctcatgaacgaccacctcgcctccctccgatcgctcatcccctccaactacatccctcgaggtgaccaggcgacggtggtgggcggggcgatcgactacgtgaagcagctggagcagcagctggtggcgctgcaggcggcggcggcggagcggagcggcgtcggcgtggtggcggcggcggccaccgcggcgtcggacggcgtgttcgtgtccccgcagtacacgagctactccgaagcgcgcggcggcagcggcgtcgacgtggaggcgacggccgcggtgggggggcacgtgcgggtgcgcgttgccggcaggcggtggaccgggcggctcgtgcgcgccgtcgccgccatggaggacctccgcctcaccgtgctgcacctcgccgtcacctccgtcggacatgacgccgtcgtctactgcttcaacctcaagatggaggaaggatgcgagatggcgacggcggacgaggtggcgacggtggtgcaccagatcttcgcgtgggcccaagaccacggcagcagtggtcactcctggcagtctcaggctcatgccggcctactgctcgaggaagacctctactgtagcaagagggagagtgtaaaagtgcagagtagtgtgtag

SEQ ID NO: 12026 - DNA, 201 bp, Oryza sativa
  Clone ID: TFbOSC29119j.C1.o1.fg
attaggggttatgtcgtagttgctgtgccttgtaaggacaaggctcctttcgtgaccaaggctgagaagctcaaggctgagtacaccaagaagattgacgcctacaacaacaagcaggcaggaggcccggctacctcaggcgactctgacaagtccaagtccgaggtgaacgacgaggacgagggcagcggtgacgagtga

SEQ ID NO: 12027 - DNA, 225 bp, Oryza sativa
  Clone ID: TFbOSC16612j.C1.o1.fg
gtgagcaaggctgcaggggagaagtggcgagctatgtctgagcaagagaaggcaccttatgtggacaaggctggccaaaagaagcaggactacgagaagaccaaggccaacttcgataagaaggagagcacaagctcaaagaaagctaagacccatgatgatggagaaggctctgacaagtccaagtctgaggtcgacgatgaccaggatggtggtagcgatgag

SEQ ID NO: 12028 - DNA, 612 bp, Oryza sativa
  Clone ID: TFbOSC400021j.C1.o5.fg
atggcggggaaatccggcgcacgcacgaggaagcgcgtggaggcgacggattccgccgtcctgaagcgcgcgcgcgacggcagcgccttcacccgctgcgaggcttgcggcaagagcgtctccgtggtcctcatcgacatgcacaactgcagcctcgacgacaagatccgcatcagcctagaggctcaggtggtggagcaggccgtggaggtggcagcgagcaagaagaagagcggcaagaacaacaacaacaatggcgagggggccaaaaagggcaagcgcccacccactgcctttttcctcttcatgagtgacttcaggaaggagtacaaggcggagcaccctgacaacaagagcgtctccgctgtcgccaaggaaggaggggagaggtggaaatccatgtctgacgaggacaagaagccttacttggacaaggctgcagagctcaaggccgagtaccacaatggcgagcgcagcgacgagaacaatgttggtggcaacgcaggcgagcaggaggtagatcagccacccaagaaaggcactgatgaagacgaccaagaagatgaagatggtgcagaggaagagaagaacgagctagacgacgacatctag

SEQ ID NO: 12029 - DNA, 438 bp, Oryza sativa
  Clone ID: TFbOSC423122j.C1.o6.fg
atgaagggcaaggccgacgcctccaagaagggcgagggcaggctcaaggccgccggcggcgccgggaagcggaagaaggccgccgctagcggcaagccgaagcgcccgccgtctgctttcttcgtcttcatgtctgagttcaggcaggagtaccaggcagcgcatcctgacaacaagagtgtcgccgccgtgagcaaggctgcaggggagaagtggcgagctatgtctgagcaagagaaggcaccttatgtggacaaggctggccaaaagaagcaggactacgagaagaccaaggccaacttcgataagaaggagagcacaagctcaaagaaagctaagacccatgatgatggagaaggctctgacaagtccaagtctgaggtcgacgatgaccaggatggtggtagcgatgaggaaaatgaggacgatgaagagtaa

SEQ ID NO: 12030 - DNA, 525 bp, Oryza sativa
  Clone ID: TFbOSC408633j.C1.o3.gp
atgaaaataagctgaaatttctcaagcttgctgagttataaaattgaagcagaataccccaatccatacgaaatgttacgcctaaaccagaccaaacgcaacagataacttcgcaccaatcaccaaagctactgttttctccattggattcagagaagagaatcctcgtcagcgttaggaccaccaccaccatcgccatccatggcgactaggacgaggccgaggaggacgtacagggggaggcgtcgccgccgccgccgccgctggccgccgccttggtgtactcctccatgtccctcttgtacgccgccatggcctccgcggccttgccgttccacgcctgcttctccgcctccccgagctccttccacttcaccgacacgagcgcggtcagcgtggagctcgccacgccggggcgctcctccgccagctgccgcctcgcctccttgctgaacagcaggaacgacgacgccggcttcttgggccggttcgggtcggcggcagcggcggcgccgcccaccttct

SEQ ID NO: 12031 - DNA, 2055 bp, Oryza sativa
  Clone ID: TFbOSC400426j.C1.o30.fg
atggacctagggtttctccctgatgcggtagatgcagtaaatggagctttgaagctaaactggaaaatagaatggaatcctctgagctttgaagctaaaatggaaaatggattggaatcctctgtgagtttcgaagctaaactggaaaatagattggaatcctctaatcctggccagtttaaagtgtattctggaggtcttgcatggaagagacagggtggaggaaagaccattgagattgagaaatctgatttaacgtcggtgacatggatgaaagtccccagggcctatcagcttggagtcaggaccaaagatggcctgttttacaagtttattggcttccgtgaacaggatgtaagcagtctgaccaatttcatgcaaaagaatatgggcctctcaccagatgaaaaacagctttctgttagtggtcaaaactggggagggatcgatataaatgtcacactctccattgtaggaaatatgcttacctttatggttggttcaaagcaagcatttgaagtgtcgctggcagatgtctcacaaacacaaatgcaaggcaaaacagatgttctcttagagtttcatgttgatgatactactgggggcaatgagaaagattcgcttatggatttaagctttcatgtacctacttcaaatactcagtttcttggagatgagaatcgcactgcagcccaggtcctatgggaaacaataatgggtgttgctgatgttgattcttctgaagaggcagttgtcacctttgaaggaattgctattcttacaccaagaggacgttatagtgttgagcttcatctgtcatttttgcgtctccaaggacaagctaatgattttaaaatccaatatagcagcattgttcgcctttttcttttgccaaagtcaaacaaccctcatacatttgtggttgtcactcttgatccaccaatccgtaaaggacaaacactgtatcctcacattgtcattcagtttgagacagaggcagtagttgaaagaaatctggcattaactaaagaggttctggctgaaaaatacaaggacaggctggaggaatcttacaagggtctgatacatgaggtattcaccaaagttcttcgtggtctatctggtgctaaagttacaaggccaggttctttcagaagttgccaagatgggtatgcagttaaatcgtctctcaaagctgaagatggactgttgtatccacttgaaaagggcttcttctttctgccaaagcctcccaccctcattctacatgaagagattgagtttgttgaatttgaacgtcatggtgctgggggtgccagtatttcatcacactatttcgacctcctagtcaagctgaaaaatgatcaagaacatctcttcagaaatattcaaaggagtgaataccataacctcttcaactttatcaatggaaaacacttgaaaataatgaaccttggagatggtcaaggcgcaactggtggggttacagctgttctacgagacactgatgatgatgctgttgatccacatctagaacgaattaaaaatcaggctggggatgaggaaagtgatgaagaggatgaagattttgttgcggataaggatgatagtggatcacctactgatgattctggtggggaggattcagatgctagtgaaagtgggggtgaaaaagagaaattatccaaaaaggaagctagtagttcaaagccacctgtgaagaggaagcctaagggaagggatgaagaaggttcagacaaaagaaagccgaagaagaaaaaggatcctaatgcccccaaaagagcaatgacaccattcatgtacttctcaatggctgagcgaggaaatatgaagaataacaatcctgatttgcctacaaccgagattgcaaagaagctcggggagatgtggcaaaagatgacaggcgaagagaagcaaccttacatccaacagtctcaagtcgacaagaaacgatacgagaaggaatctgctgtctaccgtggcgcagccgccatggacgtggactctggctccggcggcaacgagtctgactag

SEQ ID NO: 12032 - DNA, 441 bp, Oryza sativa
  Clone ID: TFbOSC900350j.C1.o14.fg
atggcgactccaggtgagttttgttggtggttttgtgcttgtgctcgcgggtggtttcggctctcggtgaggaagaccaaggcggagaaggacccgaacaagccgaagaggccaccgagcgcgttcttcgtgttcatggagcagttcaggaaggactacaaggagaagcaccccaacgtcaagcaggtctcggtgattggcaaggctggtggtgacaagtggaagtccatgactgatgctattaggggttatgtcgtagttgctgtgccttgtaaggacaaggctcctttcgtgaccaaggctgagaagctcaaggctgagtacaccaagaagattgacgcctacaacaacaagcaggcaggaggcccggctacctcaggcgactctgacaagtccaagtccgaggtgaacgacgaggacgagggcagcggtgacgagtga

SEQ ID NO: 12033 - DNA, 402 bp, Oryza sativa
  Clone ID: TFbOSC400934j.C1.o22.fg
atgaagacgaggtcgcagacggcgccgaagccgctgaaaacggtgcggctgcctcctgtcaagccgcggcccaagccgccgccgccgcagccgcagccgccgccgtcccggaagaaggggcagcccctcgtcgaccggcgccgccccaagaagccgcccaccgccttcttctacttcatggaggattttcggaaaacttacaaggaagaaaatccaagtgtaaaatcaatgcaagaagtagggaaggcatgtggcgagaaatggaatacaatgacatttgaggaaagagtgaagtattatgatatagcaaccgagaagcgtgcagagtatgagaaggcggtggctgaatttgacaagaaaaaggaaagcggtgaattgtccgaggaatcagattacgactag

SEQ ID NO: 12034 - DNA, 1941 bp, Oryza sativa
  Clone ID: TFbOSC15468j.C1.o2.fg
atgacggacggccaccacttcaacaacatatccctcggcggccgcggcggcaacaaccctggccagtttaaactttattcgggaggacttgcatggaagaggcaaggtggaggaaagaccattgaggttgaaaagtctgatatcacttctgtgacatggatggcaatccccagatcctatcagcttggtgtttcaacaaaggagggcctcttctacaggttctttggcttccgtgaacaggatatcagttcattgactaacttcatggaaaagaacatgagaatcacaccagaggagaagcagctttctgttggtggacataattggggcggaattgaaatcaatggcaatatgcttagctttaatgttggttcaaaggaagcatttgaagtctctctagcagacgtagcacaaactcagatgcaaggaaaaacagatgttgttctggagtttcatgtggatgatactactggtggtaatgagaaagattcattgatggatttaagctttcatgtaccaacttcaaatactcaattccctggagatgagaatcgtccttcagctcaggttttatggcaggctatcttgaataaggctgatgttggctcatcagaggaagctgttgttacatttgatggaattgctattcttactccaagaggtcgatacagtgttgaacttcatctgtcattcttacgactccaaggacaagctaatgatttcaaaattcaatatagcagtattcttcgcctctttgttttaccaaagtcaaataatcctcatacctttgtggttatcactcttgatccaccaattcgcaaaggacagacattatatcctcacattgttattcagtttgaaactgaagcagtcgttcaaagggatctgacattaagtgatgaggttttggctgaaaagtacaaggatagactggagaactcttaccagggtctgatacatgaagtgttctccaaggtccttcgtggcctatctggtgctaaagttacgaggccaagcacgttccgcagttgtcaagatggatatgcagtgaaatcatcactcaaagctgaagatggttgctctatccgctggagaagggcttcttctttctaccaaagcccccaacactcattctgcatgaggagctgtagctctttatggcagattgagtatgttgaatttgagcgacatggtgctgggggtgctagtatctcatctcactattttgatctcctggtcaagctgaaaaatgatcaagaacatctattcagaaatatccaaagaaatgaataccataatctcttcaatttcatcagtggcaagcatttgaaaatcttgaatcttggagaagctcaaggtagagctggtggcgttacagctgttcttcagagcactgatgatgatgctgttgatcctcatctggagcggatcagaaatcagactggcgatgatgagagtgatgaagaggatgaagattttgtggcggacaaggacgacagtggatctcctactgatgattctggagaggagggttctgacgctagtttaagtggaggagaaaaggagaaatcttccaaaaaggaagctagtagctcaaaggcgcctttgaagaagaggaagccaaagggtggggatgcggcggaaggctcggagaaaagaaagccaaagaaaaagaaggatcctaatgcccctaaaagagcaattgcaccattcatgtacttctcaaaagctgagcgagctaatctgaagaacagcaatccggagctggctaccacagagattgcgaagaagcttggggagaggtggcaaaagatgacagccgaggagaagcagccatacgtcgagcagtctcaagttgacaagaagcgctacgcggaggagtcagccgcctaccgcggggcggctgccatggatgtggactccggccctgcttcggactga

SEQ ID NO: 12035 - DNA, 1515 bp, Oryza sativa
  Clone ID: TFbOSC408633j.C1.o1.fg
atggcgacggcgggtagtaggaagggcgggaggggccggaaggcgctgacggcggtgctggacaacgacgctaacatctccgccgggaaggccgacgtggccgctgccgccgggatcctgtcgccgccgcagaaggcgaagagggcgacgtcgaagagcagcaaggggaaggccgcggctgcggcggcggcggaggaacaggcgtcggtggtggacgcggtgtcggagctgcaggggatgctggaggagctgcggctggagaaggagaaggcggaggagatggtgcgggagcgggacgaggtcatccgcaggaaggaggaggagcagggtcgcctccaggccgagctcaagaaggtccagcgcgccaaggagttcaagcccaccgtgagcattcctctcgtgaaggcattgatcgagaaagaccaggaaggagagaagaagaagggcaagggcaaggccggccatgagaggaagaagccctgcccggcgtacgtcctctggtgcaaggaccagtggaacgagatcaagaaggagagcccggacgccgacttcaaggaggtctccaacgctctgggagccaagtggaaggcgctgggcgcggaggagaagcagccgtacgaggagaggtacaggcaggagaaggaggcgtacctgcaggtggtcgggcaggagaagcgcgaggccgaggcgatgaagctgctcgaggaggagcagatgcagaggaccgccaaggagctgctcgagcagtatctcaagttccggcaggaggccgacgacgacggcgacggtggtgacaacaagaaggcgagcaagaaagggaagaagaagaagaaggagaaggacccctcaaagccgaagcagcccatgtccgcctacttcgtctacacccagcagcgccgcgcggcgctcgtcgccgagaagaagaacgtccccgagatcggcaggatcaccggcgaggagtggaaggcgatgtccgaggcggagaaggcgccgttcgaggcggcggcgcggaagcagagggaggagtaccaggtggagatggcggcgtaccggcagaggaagcaggaggaggcggcgtgccaggagaaagaggaggaggagcagaagaagatcatgaagcaggaggcgctccagctgctcaagaagaaggagaagacggacaacatcatcaagaagaccaaggaggagcagaggaagaagaaggtgggcggcgccgccgctgccgccgacccgaaccggcccaagaagccggcgtcgtcgttcctgctgttcagcaaggaggcgaggcggcagctggcggaggagcgccccggcgtggcgagctccacgctgaccgcgctcgtgtcggtgaagtggaaggagctcggggaggcggagaagcaggcgtggaacggcaaggccgcggaggccatggcggcgtacaagagggacatggaggagtacaccaaggcggcggccagcggcggcggcggcggcgacgcctccccctgtacgtcctcctcggcctcgtcctag

SEQ ID NO: 12036 - DNA, 1812 bp, Oryza sativa
  Clone ID: TFbOSC25282j.C1.o3.fg
atgtcgtccgccgcggggggaggaggagggtacgggggcggaggcggcgagcatcagcatcagcagcagcagcaccacctgctgcttgggcaggcggcggggcagctgtaccacgtgccgcagcacagccggcgggagaagctgcggttcccgcccgaccacccggcggagtcgccgccgccgccgccgcccgggtcgtggccgctgcccccggcgttctactcctacgcgtcgtcctcgtcatcgtactcgccgcacagcccgacgctggcgcacgcgcagttggtggcgcatgggatgccgccgggggccgcgacgagcggaggggcccagatcccgagccagaacttcgcgctgtcgctgtcgtcggcgtcctcgaaccctccgcccacgccaaggaggcagtttggcggccccggcggcggcggcggggccgccgggccgtacgggcccttcacgggctacgccgccgtgctcgggcggtccaggttcttgggccccgcgcagaagctgctcgaggagatctgcgacgtcggcggccgccccgcgcagcttgacaggggctccgacgagggtttgctcgacgtagacgccatggacgccgcgggaagcgtcgaccacgagatggacggcagcgatcgcgccgtcgcggacgcggtcacggtctccggcgccgagcagcagtggaggaagactaggctcatctcgcttatggaagacttcaaggctcttttaagctcccttctaaaactagcaggaggtgatccgcagtttatctataatcaaaaggtttgcaagcgatacaggcaatactaccagcaactccaagctgtagtatcgtcctttgagactgttgcgggtctgagcaatgctgctccttttgcttccatggctcttaggacaatgtcgaagcatttcaagtatttgaagggcattatactgaaccagctgcgcaatacgggcaagggtgctacaaaagatggtctcggcaaggaagacacaacaaactttgggcttatgggcggcggcgctggcctactaaggggaaacaatgtgaattcgtttagccaacctcacaacatatggcgcccgcaaagagggctaccagagcgtgctgtttcggttcttcgtgcatggctattcgaacacttcctgcacccgtatccaactgacagcgataagcagatgcttgctaaacagacaggattaactaggaaccaggtatcgaactggtttatcaatgcaagggttaggctctggaagccaatggttgaagaaattcacaacctcgagatgaggcagctgcagaagaatccgtctcttgacaagaatcagctctccatgcagcacacccaacattcgtcggacagcagcgggaagccctgtgatccatcaaactcgctgcaagggcaaagtagcagcatgaccaggaatcacagcatctccgcctcccggcacatcgaggacggcctctcccagatgccccatgacatctccggtcaggtgagcttcgcatacaacgggctcgccgcgcatcacagcatcgcgatggcgcaccaccaccaacctgacctcattggcaccggtggtgccgcgaatgctggcggtgtctcactcacccttggccttcaccagaacaataaccgagcttacattgctgagccccttccggccgcgcttccgctcaatcttgcccatcgtttcggactggaggacgttagtgatgcctacgtgatgagctcatttggtggtcaggaccggcatttcaccaaggagatcggtggccatttgctccatgactttgttggttga

SEQ ID NO: 12037 - DNA, 1812 bp, Oryza sativa
  Clone ID: TFbOSC401969j.C1.o5.fg
atgtcgtccgccgcggggggaggaggagggtacgggggcggaggcggcgagcatcagcatcagcagcagcagcaccacctgctgcttgggcaggcggcggggcagctgtaccacgtgccgcagcacagccggcgggagaagctgcggttcccgcccgaccacccggcggagtcgccgccgccgccgccgcccgggtcgtggccgctgcccccggcgttctactcctacgcgtcgtcctcgtcatcgtactcgccgcacagcccgacgctggcgcacgcgcagttggtggcgcatgggatgccgccgggggccgcgacgagcggaggggcccagatcccgagccagaacttcgcgctgtcgctgtcgtcggcgtcctcgaaccctccgcccacgccgaggaggcagtttggcggcggcggcggcggcggcggggccgccgggccgtacgggcccttcacgggctacgccgccgtgctcgggcggtccaggttcttgggccccgcgcagaagctgctcgaggagatctgcgacgtcggcggccgccccgcgcagcttgacaggggctccgacgagggtttgctcgacgtagacgccatggacgccgcgggaagcgtcgaccacgagatggacggcagcgatcgcgccgtcgcggacgcggtcacggtctccggcgccgagcagcagtggaggaagactaggctcatctcgcttatggaagacttcaaggctcttttaagctcccttctaaaactagcaggaggtgatccgcagtttatctataatcaaaaggtttgcaagcgatacaggcaatactaccagcaactccaagctgtagtatcgtcctttgagactgttgcgggtctgagcaatgctgctccttttgcttccatggctcttaggacaatgtcgaagcatttcaagtatttgaagggcattatactgaaccagctgcgcaatacgggcaagggtgctacaaaagatggtctcggcaaggaagacacaacaaactttgggcttatgggcggcggcgctggcctactaaggggaaacaatgtgaattcgtttagccaacctcacaacatatggcgcccgcaaagagggctaccagagcgtgctgtttcggttcttcgtgcatggctattcgaacacttcctgcacccgtatccaactgacagcgataagcagatgcttgctaaacagacaggattaactaggaaccaggtatcgaactggtttatcaatgcaagggttaggctctggaagccaatggttgaagaaattcacaacctcgagatgaggcagctgcagaagaatccgtctcttgacaagaatcagctctccatgcagcacacccaacattcgtcggacagcagcgggaagccctgtgatccatcaaactcgctgcaagggcaaagtagcagcatgaccaggaatcacagcatctccgcctcccggcacatcgaggacggcctctcccagatgccccatgacatctccggtcaggtgagcttcgcatacaacgggctcgccgcgcatcacagcatcgcgatggcgcaccaccaccaacctgacctcattggcaccggtggtgccgcgaatgctggcggtgtctcactcacccttggccttcaccagaacaataaccgagcttacattgctgagccccttccggccgcgcttccgctcaatcttgcccatcgtttcggactggaggacgttagtgatgcctacgtgatgagctcatttggtggtcaggaccggcatttcaccaaggagatcggtggccatttgctccatgactttgttggttga

SEQ ID NO: 12038 - DNA, 3228 bp, Oryza sativa
  Clone ID: TFbOSC21053j.C1.o5.gm
atgcccgacgggcacgggggccacgacccgctgcggccgcgcccatcccgccagttcagtcaccaacccaccaaaccccaccgcgaccgcgactccgacgtctccgccacgggccaaagtcgaaaaatcgaggggactttcccatctccatcccgcggcgggcgcacggtggcccaggagggcgcccgcggctactgctgcttccgctcaaagcttcaagttcccgtgcgcttctgcttccccactacctcccgctggtctcggtgcccactgcgcagcgcgggctcttcaataactattatcggtactcctggtggtcttcttggtagttttaagatagaattaactggggctactgtacctggtgaaccagaccctccaattgtgcttcattacaatgtccgtcttcttggtgataaacttacagaagatcctgtaatagtccaaaatacatggactatagctgacgactggggttctgaagatcgttgcccatctcctggttcagatgctaaggacattgcaaaagtggatgagttagaaaaatgcggtagcatggtgggcaatgatcaaaaacaagcatgggccactaagttaaagtccaatgtttcaagcatacaacctgcctggaaaaagaacacagaacctaagaaatattttcccttcagacaaggatatcttgctatagcaattcttcgtgttggagcacatgggatccatatgactgtagatgggaaacatgtcacttcatttgcctttcgggaggatttggagcctggatttgttggtgaagctccaccagttcccatggacaaacccctggatctttttattgggatcttttctacagctaacaatttcaagcgcagaatggcagttcgcagaacttggatgcagtatgatgctgtccgctcaggaaaggctgcagttcgattctttgttggcctggaatggcctgaggagagttatcctccatgggcacatggtccgggatacattgtatcacaagacatagcaaaagaagtttacaggaaacacaagagaggagaacttaagatgttcaaactagaagatgtcgcaatgggaatatggatcaatgagatgaagaaggatgggttggataagtacggggacaacgctgggattgacggggtgtcgtcgccgatgacgttgaggcggtactacaaggagcagggcaatgtcatgcctggcgaggacttcctcgagctcgacctgagggcggcgcgcggaggcggaggcggcgggcgcacggctgcggaggctgctgaggacgagcgcgacaacggaggctgcgcgcggcggaggctgacggcggcacatgctcatttatctagactgtatcttggttataaccccttcctcaaagcatttatccaggacttccctaagcttatcaagactgatctatctgttcctacagaggagaaagtttttcctgaggcagcatcctttttgaatggttctaagcaaattgatgcgtccgatcttccatcagatgattcagcagacaatgattatgaccctactttggctcaagggcacaaggtggatgaagaaaaatcttctggagaagatggtggtgaaggattagattctgatgactcatcttctgaggattctgaatcttctgagaaggaaaagtctaaaacttcacagaatggaaggacagttgatgatcttggtttgccttctgaggattcagaggatggtgactttgatccagcaggtccagattccgacaaagaacaaaatgatgaatcaaactcagatcagtcagatgaatcagattttacatctgactctgatgatttttgtgctgagattgctaaatcctgtggtcaggatgaaatctcaggcccttcatcatcacaaatcagaacagtcgatcgcaccgatggaagtggttttgatgcgtcgtcgtcgtcgttgccgaccggtggcggcgcgcgcagaagaagattgaggccgatgcgcgcggggagggagggagcggctccctgtgatcttcgccgtggcgtcgtcgttgtcgttgttgctgacccggcggcggtgcgcgcgcggaggaagacagaagccggcacgcagacggagggaggaaggcgctggagctcgccggcgtgcggagggcgggcggcggcatcacgcgcgcggagaaaggaggaggctggcgcgcgtggagtgccgccggatccaccgcttgcacaccaccacggcctgagctccaccaccgttgctcctcttcctcgtcatcgagctcaccgtcgccgccacgacagctcggcgccaccgcccccacagctcggcgtcgccgcccccacagatcggcgccgccccgcgccccatcagaccgccgccgccctccacctccacagcgggcgccggcggggctgtacatcacgccgctgccgccgcctcctcagctcgccgccgccgcccccacagatcgttgccgccgccccctcagatcggcgccgactcggaccccctcaaagcgccgccgctgccgccctccaccacaacgagtgggcgccggcggggcagaggcttatggtaaagcatcatctgattcaagtgacgatgaagagtggtatggaaatagtacacccgaaaaagaaactgaaggcacatttcaaggaagatccataccctagtcgtgcaacaaaagaaaatctggcacaagagttaggcctcacatttaatcaggtcactaaatggttttccagtactcgtcattacgcaagagtggcagccacaaaaaaggagaacaacattgaaaatcatacggctgagaataataacaataccaacactgttgatagcatacaactgagaggatccaatgatattgttagtgtagatagaaatgatatggtctccgaggaaaggacaggacaaagtaatctcaatgaaggtactccattaagatcagataccagctgtgggcagagtgtggctgtgactcctatggtacacccagaaaaccagggcaatgattcctcaagtaatgttagaacaccaaatgctaagtctgcggagaaattgatccctggactggaaaattcagatgaggctaggcgaaaggcggtacaacgggaactgagaaagatgaagactggcagaatttctgataagatgacacttggaagcacatcctgcagcactccagttacaggaatgggttcagttgactgtaacagtttagcatag

SEQ ID NO: 12039 - DNA, 2397 bp, Oryza sativa
  Clone ID: TFbOSC401975j.C1.o17.fg
atgccgccggtgatcggccggaacggcgtggcgtacgaatcgccgtcggcgcagctgcccctcacccaggctgatatgctggacagccatcatctgcagcaagcactccagcagcaatacttcgatcagatcccggtgacgacgacggcggcggcggacagcggcgacaacatgctgcacggccgcgccgacgccggcgggctggttgacgagttcgagagcaagtcgtgcagcgagaacgtcgacggcgccggcgacggcctctccggcgacgaccaggaccccaaccagcggccgcgcaagaagcgttaccaccgccatacccagcaccagatccaagagatggaagctttcttcaaggagtgcccgcacccagacgacaagcagcgcaaggagctgagcagggagctgggtcttgaacctctgcagaaccagcacgagaggcacgagaacgcgcagctgcgggcggagaacgacaagctgcgcgcggagaacatgcgatacaaggaggccctgagcagcgcgtcgtgccccaactgcggcggccccgccgccctcggcgagatgtccttcgacgagcaccacctccgcgtcgagaacgcccgcctccgcgacgagatcgaccgcatctccggcatcgccgccaagcacgtcggcaagccccccatcgtctccttccccgtcctctcctccccgctcgccgtcgccgccgcccgctcccctctcgacctcgccggcgcctacggcgtcgtcacccccggcctcgacatgttcggcggcgccggcgacctcctccgcggcgtgcacccgctcgacgccgacaagcccatgatcgtggagctcgccgtcgccgccatggacgagctcgtccagatggcccagctcgacgagccgctctggtcgtcgtcgtcggagccggcggcggcgttgctcgatgaggaggagtacgcgcgcatgttcccgcgcggcctcggccccaagcagtacggcctcaagtcggaggcgtcccgccatggcgccgtcgtcatcatgacgcacagcaacctcgtcgagatcctcatggatgtgaatcaattcgcgacggtgttctcgagcatcgtgtcgagagcgtccacgcacgaggtgttgtccacaggcgtggcaggcaactacaatggtgcactgcaagtgatgtcaatggagtttcaagtgccgtcgccgctggtgccgacgagggagagctatttcgtcaggtactgcaagaacaactccgacgggacatgggccgtcgtcgatgtctctctcgacagcctccgccccagccctgtccagaaatgccggcgcaggccgtctggctgcctcatccaagaaatgcccaatggctactccaaggtgacatgggtggagcatgtggaggtggacgacagctcggtgcacaacatctacaagccattggtgaactccggcctcgcattcggcgcgaaacggtgggtcggcacgctggaccggcaatgcgagcgcctcgccagcgccatggccagcaacatccccaatggcgaccttggagtgattacaagcgtggaggggaggaagagcatgttgaagctggcggagaggatggtggcgagcttctgcggcggcgtgacggcgtcggtggcgcaccagtggacgacgctgtcgggcagcggggcggaggacgtgcgcgtcatgacgaggaagagcgtcgacgaccccggcaggccaccgggcatcgtgctcaacgccgccacctccttctggctccccgtccctcccgccgccgtcttcgacttcctccgcgacgagacctctcgcagcgaggtgcccaatttgccccccatccctagggaatttatccaatttgctgaccaaattttatacgtgatcaaattcattcctgacgagtttggatttccgcagtgggacattctgtccaacggcggcgccgtccaagaaatggctcacattgccaacggccgtgaccatggcaactctgtctcgcttcttcgtgtcaatagtgcaaattcaaaccagagcaacatgctgatcctgcaagagagctgcacggacgcgtcgggctcctacgtggtgtacgcgccggtggacatcgtggcgatgaacgtggtgctcaacggcggcgacccggactacgtggcgctgctgccgtcggggttcgccatccttcccgacgggccgtcggggaacgcgcaggccgccgtcggggagaacggctccggctccggcggggggtccctcctgacggtggcgttccagatcctcgtcgactccgtgccgacggcgaagctctcgctgggctccgtcgcgacggtgaacagcctcatcgcctgcacggtggagcgcatcaaggccgccgtctgcagggacagcaaccctcagtag

SEQ ID NO: 12040 - DNA, 2037 bp, Oryza sativa
  Clone ID: TFbOSC900171j.C1.o8.gm
atggcggcgtactaccacggcggcgccggcacggacatccagtccggcaccgacggcctgcagacgctgtacctcatgaacccgagctacgccggctacggcgacgccgccgccgccgccgccgcgcccggggcggcggccaacatgatgctcctgaactcggcggtgacctccatgacgccggtgtcgttcggccaccagccgtcgccgtcgtcgtcgtcggcggcgcagcacttcgtcggcatccctctccaggcgccgccggcttccgggtacaacctgtggaccccggcggcggccaccggcgcgggcgacatgtcgccgccgacgccgcagcaccagcatcagcaagctcacggcggtggcgcggcgggtgtcagtgctgtcctcagcctgtcgtcccgcgaggcggcgccgccggtgacggtggcggccgtggtggccgccggcgacgaggggaagtacctgcaggcggtggcgcagggcgcggcgtcgcacgggcagatggtgatgagctccaagtacctcaaggcggcgcaggagctgctcgacgaggtggtgagcgtcagcaagggcgtggacgacgtcaaggccgccgcggcggcgaagagcccggcctcggtgaagaagaaggaggactcggagggcgtgtccggcggcggcacggaggatggcggcggcgccaagagcggcggcgcgccgccgccgccggagatgtcgacggcggagcggcaggagctgcagatgaagaaaggaaagctgattaacatgcttgatgaggtggagcagcggtacaggcagtaccaccagcagatgcaggtggtggtggcgtcgttcgaggcggtggcggggggcgggtcggcgaggacgtacacggcgctggcgctgcggaccatctcgcggcagttccggtgcctgcgggacgcgatcgcggggcaggtgagggcggcgagccgggcgctgggggaggccgtcgacgccgacggcggatgcggccgcacggtggggtccaggctccggtacatcgaccaccagctccggcagcagcgcgcgctgcagcagctgggcatgatgcagagcagcgcgtggcgcccccagcgcggcctccccgagcgctccgtctccatcctccgggcttggctcttcgaacacttcctccacccatatcccaaggattcggacaagatcatgctcgccaagcaaaccggcctcaccaggagccaggtttcgaactggttcatcaatgccagggtgaggctgtggaagccgatggtggaggagatgtacctggaggagaccaaggaccaggacggcggcggcggcgccggcgccggcgacgaggggagcaagcccggtgggagcaagggcggcggcgccggcgtcaatggcggtgtggttgacagtgccgcgaagatggacagcaaggcggcgcacatggagagcggcggcggcgtacatccgtcgctgctcgagctcgccggtgaccaccaggcgcaggcggggttctacgacgacgacgacgaggatggcggcgccgccgccgcgctgcagcagaagctgaagaaggcgaggacggaggagcagcagcaggcggcgttccacgtgtccgacgtggccacgctgcacgcgcatgccgcggcggcggcggcggcgaggcacgacgaggtgagccaccgggagctcctcatgaagttcatggagagcggcagcgccggcgccggcgccggcgccgccgcgagggaccaccaccacgaacaccatggcggcgtcggctactcgctgttcgcgccggcgccgtacgggcagttcgccacggagcagttcgcgttcgccggccacggcggcggtggcggcggcggcggcgtgtcgctcacgctcggcctcccgcacggcgccgagcagacggcgtcgttcctcatgaccagcagcaacggcagcgacggcgccggccacgtcgccggcggcggcggctacgacatgaacatgcagagcacaaagtccttcgcggctcagctcatgagagacttcgtggcctag

SEQ ID NO: 12041 - DNA, 1944 bp, Oryza sativa
  Clone ID: TFbOSC401411j.C1.o9.fg
atggctacttactattcaagccctggtagcgaaagagactcgcagaccatgtactcaagagacccaggcagtgcatcctatcctatgtcatcagctctagggaacttgctctatctgaacaatccatcttctggaccttatacggagttcagcggcattctgcagcctcagcagaattgcatggagatgcctggccctgggcatgcgtcagcaatgtcacaagacccctcttcaagggagtccgacatgctttcttcgcaccagggtcaacgctctttcagccatgtcaaagatatgaaaaatgagatgttgatgcatatgatggatggagcacaaggtagtggctctgagctcatccatgatgatgcccacactggttcacagcttgagtttggtgttctgaataatcacaactcatcaagtgttccatcaatgcaaagccaagggctatctctgagcttgaacacacaaatcatggcgccttccttaccgtactggtctataaagccagacatgttaacgccgcagtcttaccatgacaaccttagaggggaagacatgcggatgaagaatttgcagtccgaagcttcacgcgcaatccggaactcaaggtatctcaaggcagcacaagaactgcttgatgaggtcgtgagtgtttggaagagcataaaacaaaaggctcagaaagagaaggttgaatcaggaaaagcagatggcaaagagactgatggagggccaaaaagtgagggtgtatcttctaatccacaagaatctggcgctaatgcagcacctgagctttccactgctgagaagcaagagcttcagaacaaaatggcaaaactgatggcaatgttggatgaggtggaccggaaatacaagcattattaccaccaaatgcaaaccgtggtttcatcgtttgatgtggtagctggaccaggatctgcgaagccttacacagcagttgctcttcagacaatctcacggcactttcggtgcctgaaggatgctatcaatgatcagatcaatgttatcaggaaaaagcttggcgaggaagagaactcatctggcaaggagggaaaattaacccgcctccggtacattgatcagcagctaaggcaacaacgtgctttccaacagtacggtatgattccacaaaacgcctggagaccacagaggggactgcctgaaaactctgttacaattcttcgcgcttggctgtttgaacacttcctccatccgtacccaaaagattccgagaagttaatgcttgctaggcagactggcctgactaggagtcagatttcgaattggttcataaatgcccgtgtccgcctttggaaaccaatgattgaagacatgtacaaagaagagattggtgatttagagcaagactccaactcttcctctgacaatgcaccaagaagtaaggataaaatggcatcttcagaagacaaggaggatctcaaaaactccagggcacggatttgcgaaacaagccaattgagcgagtcgagaaccagcattggagcaatgaatgttggcggagcgcctgttggcttccagaatgagcccaatcctgatgacagtttcatgaacctgatgctgaaggaccagcgatcgaacgaagtggatggcggcctccttctccacaacactgtcgcgcagcactcagacgagaacgcccggttcatggcctatcacttggcagagcttgggagatacggcaatggcaatgtgtcgctgacactgggcttgcagcactccagcagcaacctcgttcctaatgctcagccaggtttccctggtgttaatgaggatgacatctacaatgctactgctcctcttggtgtcaccgtcgcatcttcggactatgattcgatgaatcagatggatcaacggcaacggtttgagcattcacctcttctgcatgattttgtggcctga

SEQ ID NO: 12042 - DNA, 1929 bp, Oryza sativa
  Clone ID: TFbOSC401247j.C1.o7.fg
atggctacttactactcgagccctggcaatgaaagggactcgcaagctatgtacccagcggattcaggcaattcatcatatcctgtgccatcagcaataggaaacatgttatatcctggcaatgggtcttctgggccatacacggaattcagtggcattatccagcatcagcagaatttcatggagctgcctggccatccaactgcgatctctcaagattcatcgtcacgggaacctaacatggtcgcgtcgtacatggatcagcgctcttttggacctgccaaagatatgagaaatgagatgttgatgcatctgatggatggagcacataatgctggtgctgatctcatccacaatgacactcatagcagcgcgcagattgagtttggcctattgaacaaccacaattcgatgagcgttgcaccagcaccaggccaaggattgtctctgagcctcaacacgcatatcctggcgccttcgtatccatactggtctgcgaaaacagagttgctaacaccacactcttaccatggtgatgacaacagaatgaagaatatgcaatctgaggcctcacaggcaatcagaaactcaaagtatctgaaagcagcacaagaattgcttgatgaggtcgtcagtgtttggaagagtataaagcagaaggctcagaaagaccaggctgaagcaggaaaatcagataacaaagaagccgaggggggttcgaaaggtgagggggtatcttccaacccacaggagtctactgccaatgctgcaccagagatttctgctgctgagaaacaagagctccagaataagatggcaaaacttatggccatgttggatgaggtggaccgaaagtacaaacactattatcatcaaatgcaaattgtagtctcatcttttgatatggttgctgggtctggagctgccaagccttatactgcagtggcccttcagacaatctcaaaacatttcagatgtctgaaagatgctatcaacgatcagatcaatgttatccggaagaaacttggagaggaggagagttcatctggcaaagagggaaaattaacgcgcctccgttatattgaccagcaattaagacaacagcgcgctttccagcagtatggtttgttacagcaaaatgcttggaggccacagaggggactgcccgaaaactcagtttcaattcttcgtgcttggctttttgaacacttccttcacccgtatccaaaagattcagaaaagctgatgctagcgagacaaactggcttaacaagaagtcagatttcaaattggttcataaatgcccgtgtccgcctgtggaaaccgatgatcgaagacatgtataaagaagagattggggaggcggatctcgactcgaactcctcctccgacaacgtaccaaggagcaaggacaaaatagcaacatctgaagataaggaagatctgaaaagctctatgagccagacttatcaaccaagccaattaggtgaatccaaagccaacatcgggatgatgagccttggtggggcaccagccggcttccacaacgaaggcaaccaggatgacagcttcatgaacctaatgctgaaggaccaaaggccgggcgaagccgaaggcagcctcctccatgatgccgtcgcccatcattccgatgagaacgctcggttcatggcttaccatttgtcggggctcggaagatacgggaacagcaatgtgtcattgacacttggcttacagcatcctgacaacaggctttcggtacagaacactcatcagccaggtttcgccggtgctggagaagaaatttacaactccaccgcttctctcggtgtcgctgcagcttcctcttcggactacgaatccacgaaccaaatagatcaaaggcaacggttcgaaccatcgcctctaatgcatgattttgtggcctaa

SEQ ID NO: 12043 - DNA, 2655 bp, Oryza sativa
  Clone ID: TFbOSC401273j.C1.o3.fg
atgtggaccctacatgtcatcctctctctcttcttcctccctctctttcccttctctctctccacttcggccttctgcaagaggcgatggcggcagcggcagcgacggcggcggtggcgcgagggtaggcgctggaggcactggagcggtggcggcgacggacggggaccggagtggcggcggcgcttcgggctagagttggcgtggatggaggcggaggcggcgacagaggagatggcaggcggtcgagggccggagcgacggcgggtcggcggagagcctggcggccggtggtggctagcggggagagagctagtggcgaaggccgcccccatcttcctccctcctcgccgggctccgcacgcacctgccccgatcggtggagcggattacgcggttgggtccgtaccacgggctgccaaaggcggacggcttgggcttcgcggcggacttacggatggtgatgcgggcctcgccgaagagggatgtggacgccgcgcgaccattactgcggaggagagcgccgtggcgaatcgaacagctgctggaacccggttggctatctccactagtagcaacttccacaaggctgcttcggcgaaaaagaaaagaagaagtcagaaaaagacgacaagagaaacaacccaactgcaagaatccttgggatcatctctgtccccgttctgggtggtttctgtcatactccaggaactgtcttgttctagctctttgcttggtctgaaagtcgatttctgcacaggtactgcgaaagctttgggaatagtattgcagaaagcgcagcaatctgaagcttactgtccaagtctgtctcttcttctgcttctgaagacgatggccacattcttctcctcttccaccaatcagagagacctcaccggcggcggcggcgacggaggcgacatgtcgttccagcactacccaccgccgtctaacccttactcggactcgtcggccggcggcctgatcccgctcccggcgagcatcgtgtcgcatagccacattgcgcacggcggcggcgacgagccggcggcgttcagggaagcggcgacggcggacggcggcgagatgggcctgcagacgcagctgctcatggcgcacggcgcggcggcgcggggacaccagggcgggctatcgcttagcctcggcacgcaggtgccggtgtctctctaccagtacaggccggcgggcatggcggccgcctcgctgctcagcccgagccagtcgtcgccgatggcggggaggagcgcgcagaacagcatctacgtgcagaactcgaggtttctcagggcggcgcgcgagctgctcgacgaggttgtcaatgtccgcgacgcgatcaagcggaagggtgacaagaaccagggcaaggattccggcgagtgcaagggcggtgacgccgccggcgacgacaaggccggctcgaacccgcaggagcaggagagcaattcagcccccgagctctcgccgtcggagaggcaggatctccagaacaaggtcaccgcgctcatggccatgctcgatcaggttgatcggaggtacaggcactaccaccaccagatgcagatcgtgatgtcgtcgttcgacgcggtggccggcggcggcgcggcgaggccgtacacggcgctggcgctgcagacgatctcccgccacttccggtcgctgcgggacgcgatcggcgcgcaggcgcaggcggcgcggcggggcctcggcgagcaggacgcgtcggcgcagggcggcggcggcctctcccggctgcgctacatcgaccagcagctgcggcagcagcgcgccatgcagcagttcggcatgatgcagcagccgcagcacgcgtggcgcccccagcgcggcctcccggagtccgccgtctccgtcctccgcgcctggctcttcgagcacttcctccacccgtatccgaaagattccgagaagctgatgcttgcgaggcagacgggattgtccagggggcaggtatcgaactggttcatcaacgcgcgcgtgcggctgtggaagccaatgatcgaggagatgtacaaggaggagttcggcgcggagatggactccaactcgtcgtcggagaacggcggcggcggcggcggcaagggcaaggacgaggcgatctcgtcggaggaccgcgacgagttccagagcccgtcgagcgccgccgcggcgaggcacgccggcgtcgcgggccagctcaacaacccgttcaagtcggaggcgatgggcggcgccgccctggacgtcggcgtcggcgtcgtcggcctgtccagctgcctcggcggcgccatgggcacgtacgccaccggcctcaacctgaaccaccacgtgcaccaccccggcgccggcggcaccagcctactgcacgacgcgctgcaccaccaccaccacggcggcggcggcgacgccaggttcgtctcctacggcgacatggccgacttcggcggcggcggcggctacgacggcggcagcgtgtcgctgacgctgggcctgcagcactgcaacaacgccggccccgtcccggccgagcagcagggcctgctctacggcagcgccggcgacttcgactacatcaacggctccgacgaccggcagcggttcggcccggcgtcgcagctgctgcacgatttcgtcgcgtga

SEQ ID NO: 12044 - DNA, 2655 bp, Oryza sativa
  Clone ID: TFbOSC410066j.C1.o3.fg
atgtggaccctacatgtcatcctctctctcttcttcctccctctctttcccttctctctctccacttcggccttctgcaagaggcgatggcggcagcggcagcgacggcggcggtggcgcgagggtaggcgctggaggcactggagcggtggcggcgacggacggggaccggagtggcggcggcgcttcgggctagagttggcgtggatggaggcggaggcggcgacagaggagatggcaggcggtcgagggccggagcgacggcgggtcggcggagagcctggcggccggtggtggctagcggggagagagctagtggcgaaggccgcccccatcttcctccctcctcgccgggctccgcacgcacctgccccgatcggtggagcggattacgcggttgggtccgtaccacgggctgccaaaggcggacggcttgggcttcgcggcggacttacggatggtgatgcgggcctcgccgaagagggatgtggacgccgcgcgaccattactgcggaggagagcgccgtggcgaatcgaacagctgctggaacccggttggctatctccactagtagcaacttccacaaggctgcttcggcgaaaaagaaaagaagaagtcagaaaaagacgacaagagaaacaacccaactgcaagaatccttgggatcatctctgtccccgttctgggtggtttctgtcatactccaggaactgtcttgttctagctctttgcttggtctgaaagtcgatttctgcacaggtactgcgaaagctttgggaatagtattgcagaaagcgcagcaatctgaagcttactgtccaagtctgtctcttcttctgcttctgaagacgatggccacattcttctcctcttccaccaatcagagagacctcaccggcggcggcggcgacggaggcgacatgtcgttccagcactacccaccgccgtctaacccttactcggactcgtcggccggcggcctgatcccgctcccggcgagcatcgtgtcgcatagccacattgcgcacggcggcggcgacgagccggcggcgttcagggaagcggcgacggcggacggcggcgagatgggcctgcagacgcagctgctcatggcgcacggcgcggcggcgcggggacaccagggcgggctatcgcttagcctcggcacgcaggtgccggtgtctctctaccagtacaggccggcgggcatggcggccgcctcgctgctcagcccgagccagtcgtcgccgatggcggggaggagcgcgcagaacagcatctacgtgcagaactcgaggtttctcagggcggcgcgcgagctgctcgacgaggttgtcaatgtccgcgacgcgatcaagcggaagggtgacaagaaccagggcaaggattccggcgagtgcaagggcggtgacgccgccggcgacgacaaggccggctcgaacccgcaggagcaggagagcaattcagcccccgagctctcgccgtcggagaggcaggatctccagaacaaggtcaccgcgctcatggccatgctcgatcaggttgatcggaggtacaggcactaccaccaccagatgcagatcgtgatgtcgtcgttcgacgcggtggccggcggcggcgcggcgaggccgtacacggcgctggcgctgcagacgatctcccgccacttccggtcgctgcgggacgcgatcggcgcgcaggcgcaggcggcgcggcggggcctcggcgagcaggacgcgtcggcgcagggcggcggcggcctctcccggctgcgctacatcgaccagcagctgcggcagcagcgcgccatgcagcagttcggcatgatgcagcagccgcagcacgcgtggcgcccccagcgcggcctcccggagtccgccgtctccgtcctccgcgcctggctcttcgagcacttcctccacccgtatccgaaagattccgagaagctgatgcttgcgaggcagacgggattgtccagggggcaggtatcgaactggttcatcaacgcgcgcgtgcggctgtggaagccaatgatcgaggagatgtacaaggaggagttcggcgcggagatggactccaactcgtcgtcggagaacggcggcggcggcggcggcaagggcaaggacgaggcgatctcgtcggaggaccgcgacgagttccagagcccgtcgagcgccgccgcggcgaggcacgccggcgtcgcgggccagctcaacaacccgttcaagtcggaggcgatgggcggcgccgccctggacgtcggcgtcggcgtcgtcggcctgtccagctgcctcggcggcgccatgggcacgtacgccaccggcctcaacctgaaccaccacgtgcaccaccccggcgccggcggcaccagcctactgcacgacgcgctgcaccaccaccaccacggcggcggcggcgacgccaggttcgtctcctacggcgacatggccgacctcggcggcggcggcggctacgacggcggcagcgtgtcgctgacgctgggcctgcagcactgcaacaacgccggccccgtcccggccgagcagcagggcctgctctacggcagcgccggcgacttcgactacatcaacggctccgacgaccggcagcggttcggcccggcgtcgcagctgctgcacgatttcgtcgcgtga

SEQ ID NO: 12045 - DNA, 3372 bp, Oryza sativa
  Clone ID: TFbOSC400780j.C1.o27.fg
atggcgcatgatccgaacctggggttcgcggattacttctcggcggcagatgcatcggcgtcgtcggtcacgacgctgatgccggcgatggacgaagcggcgccggagctgttcgggttgcaggccgggatggagcttctcggcgtgcgcggtctgggtatgagtatgatgcccggcgcggcaggcaaggtcgccgcgctggtggccgacgctggggacgacggcggcggcggctccaccatgcgcttcctcagcgagcagcaccaacagccgagccaggcgccgctgtcgctgtcgctgtgccgcccggacggcgtgctgcacctcggcggcgcggcgcggccgcagcaccaactggcgcccgcggcgccatggatgacgcaccacgacgcgtcgtcgtcggcgccgcaagtgcacggcgcgtggcacctgcgcagctcgaggttcctcctcccgacgcagcagctcctccaagaattctgcagcctccccgtggacagcaccaagcgcggcaacggcgccaaggcagcgacgcagcaagaagacggccgcggcgacgggtcgtcgtcgtcgtcggcctcgtggaccccgtcgccgcagatccaggccatggaagccctggagctgcagaggctcaaggacaagctctacatcatgctcgaagaggtggacaggaggtacaggaggtactgcgagcagatgagggcggtggccggggggttcgaggcggtggccggggagagggcggcgggggcgtacacggcggtggcggcgaggacgatatcgaggcacttccggagcctgagggatgggatcgtggcgcagctgcaggcggcgaggaaggcgctcggggagaaggacgtgagcgcggccgggacgacgcgggggcagacgccgcggctcagggtgatcgaccagtgcatcaggcaccacaagtcgctgcagggcgtcgccgccatggacagccacccgtggcgcccccagcgcggccttcccgaccgcgccgtcaccatcctccgtgcctggctcttcgagcacttcctgcacccgtatccaagcgacgtggataagcacatcctggctcgacagacgggcctctcacgtagccaggtgtccaactggttcatcaatgcgagggttcggctgtggaagccaatggtggaggagatgtacgtcgaggagatgaagggccaggacggcggcgacggcagcggtggacaggggagcctaaaccctaagcctacctgcagccacgcctccgaggcgcgcggcggccagcagctggtcgtcggcgatggcgacggcggcgaacagaagccgacgagggcgcagcttcgccacgacgccgggtcgctggcctccgtcgtcaacgtcgacgtcgcggccggcgcgggcggcgtggcccggctgcaccaggcggagaacttcggcatcatggaccacctcgacttcgacgcgtacgacgacagccaccaccagcagcagcacggcgggttcggcggcgtgtcgctgacgctcgggctgcagcagcacggctcccacggcggtggcggcgtgaacatcgcgttcggggcgccggggtccgcgcacggcggcgccgggttcttgtacccgggcgagcagatggcgcctgacgccatgcatccggggcacggccaccacgtcgtcggcggacagttcggcgtggccatggacggcgacgccgcctcgcacgcgcaagagcgaaatattatactggcaaaaatgtttacaaaaatatatcctgccgcacaagtggagagcggcaaggccttatttggcatgaaaggaggaggcggcgatcggcatcatcacaaggacgccattgtcatgcacgccgccggcaaggcgcccaagtgcaaggcttccttcttcctctgcagcctcctcctctactttctcctcccggtgctcgccctgtacgtcgttgccctcgccgtgtcgccgttctactcgggtagctcgtgcccggaggagagccttgccagtggcgacgttgcacatctcgcggccgccggcgatgctggcaacaggcgtaacgactcgtcgccgccgtctgatgacgccgcgccgaccgggctgggtcacattgtgttcggcattgccgcctcttcggagctctggaagagccggagggagtacatcagaacatggtggcggccggagcagatgagcgggttcgtgtggctggacaagccggtgtacgagttctactcgaggaacgcttccacggggcttcccggaatcaagatcagcgggaacacgaccaagttcccgtacacgcacggccgcggcagccggtcggcgctgcggatcacccgcatcgtgtcggagagcttccggctgggcctccccggcgcgcggtggttcgtgatgggcgacgacgacacggtgttcttcccggacaacctcgtggacgttctgtcccggtacgaccacacgcagccgtactacatcgggaatccgtcggagagccacatccagaacctcatcttctcgtacggcatggcgttcggcggcggcgggttcgccatcagccgcgccctggccgcgcagctggcgcacatgcaggacgggtgcatcgaccggtacccggcgctctacggcagcgacgaccgcatccacgcgtgcgtggcggagctgggcgtgccgctgacgcgccacctgggtttccaccagtgcgacctgtggggcgacgtgctgggcctcctgggcgcgcacccggtggtgcccctggtgacgctgcaccacctggacttcctgcagccggtgttcccgacgacgaggtcgcggacggcggcgctgaggcggctgttcgaggggcccgcgcggctggactcggctggcgtggcgcagcagtcggtgtgctacgacggcgacaagcagtggacggtgtcggtgtcgtgggggttcgcggtggtggtgacgcgcggggtgctgtcgccgcgggagatggagatgcccatgcgcacgttcctcaactggtaccgccgcgccgactacacggcgtacgccttcaacacgcggcccgtggcgcgccagccgtgccagacgccgcaggtgtactacatgcggcagtcccgcctcgaccgccgccgcaacaccaccgtcaccgagtacgagcgccgccgcgtcgcgcccgtcaagtgcggctggcgcatccctgaccctgccgcgctgctcgaccgcgtcatcgtcctcaagaagcccgaccccaacctctggaaaaggtctccgaggaggaattgctgcagggtgttgtcgtcacccaggcaagggaaggaccggaagatgaccatcgatgttggcgtctgcaggggcggcgagttcgccagaattgaggtagccaggtag

SEQ ID NO: 12046 - DNA, 3684 bp, Oryza sativa
  Clone ID: TFbOSC400992j.C1.o51.fg
atggagctcgtccccttcaagcccgaggccggggccctggtcgagtcgggcggcggggcccacggggactcgatcccggccatggtggcggcgcagcaggaactgctgcacgcgcaggtggaccagctccagctcctcgtcgtcgcgcagtgccgcctcaccggcgtcaaccccctcgcccaggagatggctgctggggcattgtctatcaagataggtaaaaagccaagggatttgttaaatccaaaggctgtcaagtccatgcagtcactttttgctatgaaggatactattggaaaaaaagaaactcgggaaattagcgcatcttttggggttactgttacacaggtgagggagttctttgcaagtcaacgtacgcgagtaagaaaatttgttcgcttatcacgtgagaaagccctgagaatagagtcatccaaggctcctgacaatgtatgctccataagcactgagcagacacctgttgacattgaggcacatgctcaagttattgagcctctgagaacattagaaccattggaggcgcaacaaatttctttgccgcatctggtggttcctcaaatctctttacaattgccggtggtcctgcagagctgtgcaatccctgttgccccaataggtgtaatgcaacccaccgaggctaagactaatcccgatcccattcaaaaggaaactaagcaagaggaagttgctggagttgagtcagaagataagaagtttttggaaagtatctttgttctaatgcggaaggagaatacattctctggacaggtcaaattgatggaatcaattctacaaataaacaatgtaactgttcttagttggttcttaacaatgggtggtttggccattgtatcgacgtggttgggccaagcagttactgaggagcaaacaacagttattcttgttgttttcaaggtgcttcttcatctcccattacataaagctctgccagctcatatgtcaactgtattgcaaactattaacaggttgcggttttataggacacaagacatatcaagcaaggcgaggaacctcctctccaggttgagcaaagtgcttgtaagaagtcaggcattgaagaaatctcagaaggacttaatctgtaaacaaaggataagtgaaattctccgtgatgagtcttggaaatctgaagttgatattactgaggacatccttgccttgactgatgatgcaagtgagagcagaatgcctgagcccagaaaaacgccattgctgctcactgcttctgcggacgaatcaaataaaaagagttctctgcagacaaaatccaaagagaaaaggaaagttctacttgtagaacatccaaatcggaaagctgctggcaagaatgttaaccctgtcagaagcacatctacgaacaatagtagaccgttatctgcagatgatatccaaaaagcaaagatgcgtgccatgttcatgcaggagaaatatggcaaggttgacacaagcaaagtgattgaaaaacctcatatgatggaaattcaaaaaccgtctggcttagttgattcaaatgtaccgcttgtgcccagaacccctcttacttcaatcattaaacaacctgttgaccctagcccatcaacctctaaacaaagtacactatctccacctgataagccagaaattgcagttagcttgaagctgaacgtaacagccaaagaaaactttatagagaaattggattccaagagagttatttggcagataccaccagcttggaacaagcatcctgctatcaaattgttggaagagcaggggatggcaattttctgtagtgatatgagaattgagaagttaccagtcattccccataaacaaacatggggcagctattaccataatttcaggcagttcattgcaacagttcctctttttgtaggaaggcttgcaaaggtttggatagaccctgcttggagtttaggtgctggagagaacagcaaagaatttgaggtccaaacccagagaaacaggcgtgagaaggaaaccttttatgctagtctaaaggacataccgttgaatccaaagggcccatgggatgtggaaatggactttgatgacagccttacaccggaaattccaattgagcagccaccagatgctgacgctatggaaacggatagcgtgagcacagcccctccaaacattgtggttcctgttgtggacaagcaaataggatcaacctcatcagtatctccagcagttgctgctggtgcgaacggtgcaacttctgaaccagatcttgagctgcttgcggtgctgctcaagaatccacaacttgtctttgctctaacttctaatcagggtgggaccctgccaagtgagcagaccgttgcacttctggacatgttgaagcagactggccttggactatcagagctggtaaatagcctggccaacaattctggggtccaaaaagagcccgaatctggtcctgaagctatccctgcttcgcttccatcgccaactcctccaaaagacctgatagccagggatggctggagttcagagttcccatcacaagtgaggacccaaaacttgcagcacgcccatttgccaaacagagcaaatgcacctcctgttgcaagcagcgtgcagcaaagtttctcaaatgttgtcagttcgttgccttcacaaccttatgcttcagcttctgctttgccggcacagactcgaactaatatgacatctctcccccagtcgatgatctccgtaaatccgtcaactcaacatgttgctcctatgaataatcttctgagcagagccacggtacaccagcacacccaatcatatgctttaacgtctgatcctgttgcagtggcggtccatcatcagccagcggtgaacaaactagcccatgaggttcagagcatctcacaccctgctgtatcacattcttcggtggctgaatcacatgcctcttacacatcatacacctggcaatctagtgttgctaccattgccgccactgggcgaaatgctacacctgatcgatgggctgcacctgcacgcactactaattcctttaacgctgccccatcaaattcaaaccatgtgacgtatcctaaccagaatgcttacagtaaccacagcacacaagctactacatacaattcttatggttcagctccagtctcgtcccactccctccacccagggcagggactggaccgaaatggctacactcacgcagcggagtaccagacgacaatggcgcgagacgccctatggcggaactcgcggtctcctgagcttggtgctggtgctgtgtatggtagtagctcacaaggctatgttcccgagccctcaaggcagtggaactacgggcagcagagctacaatcctgagccttattctaggcagtggagttctgggcaacaaagctacaacactgtcactgctgagccttccaggcagtggagctccgggcagcagagctacagcaacccagctgagccttcaaggcagtggagttcatcagcacatgcacaaccaagctacaaccctgagccttcaagaccctggaattcaggtcatcagagtcaaaaccctgaggcatcgaggcaatggagtcatcatcatggaaagcaagaacgttataatccgacagatggtagaaattcttatgatcaacattggaggagatga

SEQ ID NO: 12047 - DNA, 1074 bp, Oryza sativa
  Clone ID: TFbOSC401196j.C1.o32.fg
atggatacatatggatggatgatggaatggaaggtggacagacgttaccggcgataccgtgagcagatgagggcggtggaggtgtcgttcgaggcggtggccggcggcggcgcggcgcaggtgtacacgaagctggcgatgcgagccatgtcgcggcacttccggtgcctgagggacgcgctggtggggcaggtgcgcgcgctgaggaacgccatgggggagagccagagggacgccgccggcggcgtggcggcggcggcgcccggtgccaccaagggcgacacgcctcggctgcgggtgctggaccagtgcctgaggcagcagagggcgttccagcagtccggcgccgtcgacagcttcccgtggcgcccgcagcgcggtctgccggagcgcgccgtcgccgtcctccgcgcctggctcttcgagcacttcctccacccgtatccaaatgatgtggacaagcacattttggcgcgccaaacaggcttgtcaagaagccaggtttcgaattggttcatcaatgcaagggtgaggctatggaagcctatgatagaagacatgtacaaggaagaaacgaagccggaatcatctgatggcaacaacaaattaaaccctagcgcagccggcaacaaacagcagcatcgagatgatcccaagaagaattacacggcaacgacagcagaagccagcttagtacaacaaagcagctaccatctccaccttcgcagcagcggaaaccgtaactcctcctcgttgatgatccctgcagcagcatcaacatccatcgatcatcaccatgacagcagccaccagctgttgggcggccatagctattcttcagcagcaggattgcatcatggtcatggcggcgccgtgtcgcttactctagggctccagcagcagcagcagccatttgcggcgtcgatgatgcatcagcatcagcagcaccagcaccagcaccagcagcagcagtcattcatggtggaggcggcggaggaagaagaagatgacgtgctcccttacaggaacctcatggagtctcagttgctgcatgattttgcaggagctagctaa

SEQ ID NO: 12048 - DNA, 996 bp, Oryza sativa
  Clone ID: TFbOSC22451j.C1.o13.fg
atggcgttccactaccaggaccacgcgctggcgatggacgccgcggctgcggcggcggagacgggcggccaccaccaccctgggttcgtcggggcgggaggagttgtggggggaggaggaggaggagggtgggagcgggagaaggccgccatcgcggcgcacccgctgtacgagcggctgctggaggcgcacgtcgcgtgcctccgcgtcgccacccccgtcgaccagctgccccgcatcgacgcgcagattgcggcgcgccccccgccgctggccgccgccacggccgcagcggcggccgcggcggccggaggggcgccgtccggcggcgaggagctcgacctcttcatgacccattatgtattgctcctttgttcgttcaaggaacaactacagcaacatgtgcgtgttcatgcaatggaagcagtaatggcttgctgggaacttgaacaaactttacagagccttacagttgtgactcttactgcaggggcatctcctcgtgaaggttctggagcaactatgtctgatgacgaagacaatcaggttgatagtgagagcaacatgtttgatggaaatgatggatcagatggtatgggctttggccccttaatgctgacggagggcgagagatcattagttgagcgtgtacggcaagagctgaaacatgagcttaaacaggggtacagagaaaagcttgtggacattagggaagagatactccgaaagcgaagagctggaaaactcccaggagatacagcgtctactttgaaagcatggtggcaggctcactctaaatggccatacccaactgaggaggacaaggctcgcttggtgcaggaaacagggttgcaactaaaacagatcaataattggtttatcaaccaacgtaaacggaactggcacagcaatcctgcttcatcctcatcagacaaaagcaagagaaaaagaaaaagaagcaatgcaggtgatggcaaggccgagcaatcttggtag

SEQ ID NO: 12049 - DNA, 1041 bp, Oryza sativa
  Clone ID: TFbOSC401247j.C1.o8.fg
atggtggccagcaagcagctccactcgcagcgatgtggcggccactactgccagctgcaccaccaccggccggaggagatcgccggcgccggtgccgagagccaccggagggacgggtcgagcggctgcggcggcgctggtccgatggtcgtgctgaccctcgggtccggcgccgcggcggctgaagacgacggtggcggccgctcgcgctgctgctgcggtgccggtggcgccgcgccggcgacgatggtttccgcgttgcgtggttcgaggtacctgctgccggcgcaggagctgctccgcgaggcggtgtccgccgccgccgccagcgcgcgaggtggcgacgacgacgacgaggcggtggcgagcttcccgcacgacggcaagagcaccggcattggcggcggcggcggcggcgtccaagccaagctcctcagccttctcagcgagctggagagccggcacgagcactacttcggggagctgaggcgggtgtcggcgtcgttcgagccggcgctgggcgccggcgccacggccgggtacacggcgctcatggcgcaggccatgtcgcaccacttcggcagcctgcgccgcgccatactgcgcaagctcaggctccacgccgccgcggcggccaggacgaggtcggcgttgctgcggctggcccgggacgccatggaggaggacgacgagggcgacggcgaggaggaggaggaggtggtgaacagggtggtccggcggacgaagcaggcggcggcggcgagggcggagcaggcgtggaggccgctccggggattgccggaggacgccgtgggcgtgctccgggcatggctcttcgaccatttcctccacccgtatccgaatgacaacgagaagctcatgctggccgtggctacgggtctaagcagaacccaaatatcgaactggttcatcaacgcgcgagtgcggctgtggaagcccatggtggaggagatgtacaacgacgagttcgacgacgacgacgccggcagcggcggcggcggcgcttcgtcctcctcgtga

SEQ ID NO: 12050 - DNA, 921 bp, Oryza sativa
  Clone ID: TFbOSC400780j.C1.o16.gm
atggagatgggcgtggggtcgttcaccggcggcggaggaggcggggagtgctcgtcgtcgtcggcgacggcggcggctgctgcggcggctgcggcggcggcggcggcggcggaggcggaggagcggcagctgctcaagggggagatcgcggtgcacccgctgtgcgagcagctggtggcggcgcacgtgggctgcctgcgcgtggcgacgcccatcgaccacctcccgctgatcgacgcgcagctcgcgcagtccagcggcctcctccactcctacgccgcgcaccaccgccccttcctctccccccacgacaagcaggagctcgactccttcctcgcgcagtacatgatgctgctgtgctcgttcagggagcagctgcagcagcacgtccgggtgcacgccgtggaggccgtcatggcgtgccgcgagatcgagcaatccttgcaggacctaaccggtgcaactttggaggaagggacaggggcgaccatgtcggaggacgaggatgagacggcgccgatgctggagggcccgatggatatgggctcggacgggcacgacctcatgggcttcggcccgctcatgcccaccgactccgagcgatccctcatggagcgggtcaggcaagagctcaagattgagctcaagcagggcttcaagtcaaggattgaggatgtgagagaagaaatattgaggaagaggagggcaggaaagttgcctggggacaccaccaccatactcaagcaatggtggcagcaacactccaagtggccataccccacggaggatgataaggcaaagcttgttgaagagactggcctgcagctcaagcaaatcaacaactggttcatcaatcagagaaagcgtaactggcacaacaactcacagacatcaacccttaaatcaaagcgtaaaaggtaa

SEQ ID NO: 12051 - DNA, 614 bp, Oryza sativa
  Clone ID: TFbOSC900358j.C1.o14.hg
agcctgagcggaaggcgcggctggcgcgcgacctcggcctgcagccgcgccaggtcgccgtctggttccagaaccgccgcgcgcggtggaagaccaagcagctcgagcgcgactacgccgcgctccgccattcctacgactccctgcgcctcgatcacgacgcgctccgccgcgacaaggacgccctcctcgccgagatcaaggagctgaaggcgaagctcggggacgaggaggcggcggcgagcttcacgtcggtgaaggaggagccggcggcctccgacgggccaccggcggcgggatttgggtcgtccgacagcgactcaagcgcggtgctgaacgacgtggacgcggccggcgccgcgcccgcggcgacggacgcgctggctccggaggcgtgcacgtttctcggcgcgccgcccgccgcgggcgcgggcgcgggcgcagcggcggcggcgagccacgaggaggtgttcttccacggcaatttcctcaaggtggaggaggacgagacggggttcctcgacgacgacgagccgtgcggcgggttcttcgccgacgatcagcccccgccgctgtcgtcgtggtgggccgagcccacggagcactggaactga

SEQ ID NO: 12052 - DNA, 1785 bp, Oryza sativa
  Clone ID: TFbOSC400320j.C1.o15.fg
atgagcggcaatccatcgttctcgcagctcggtgcggtggacgccgccatgaacggcggctacttcatggcggcgagcggcaatggcgccgacgtgccgctgttccatccggccatggcgccgccgcatgatcacggcgggagcttcggctacggcgacgcggcggcggcggcgatggacgtcggcgcgcacttcgcggcggcgaacaacctcgtgctcgcgtccctggcgacccagctgttcggcgccgcgccggcggcggcggcgcacgggcatggcgactacctcggcgcgacgacgccgccggaggaggagatggggggcgggtacgacgtcgccgtcggcgacagctccggcggcgcggtgagcctcgcgtgcctcggccacggccagccgggcgacatggcggcggggtggtgctcgacgtcggcgaggaagccgagctgcaactggagcagcagcaacgccggtgtgcacggtggttcgtattacctcgccggggtgccggaggctgccggcttcgtgtccgcggcggcggcggcgagcgagctgtcgctgagcctgtgctccaagtcgtcctcggacagcatgctcaacgccggcggcgaccagtgctcgtcggcggcgagccgttccgggctgacgcagatgagcagggtggtggtggtggagcccgagccgccgctcgtaccgtactacccggcggcgaacttcgccgtggtggtggcgcggtcccgatacgccgcggtggcgcagcaggtgctcaacgacgccgtcggctgcgtgctgggcggcgtcgcggacgccgccgccgactcggccagcggcgtcgacagcggcagctcgaggccgtcgagctgctcggtggccggcggcgcgccgtcgtccgccgtgagctccaacaaccagctcatcgcctcctccggcgagcacacgcacggcggcggcgacgcttcggctcagcggctcaggagcgagctcctcaccatgctccagctggtgagctcgcccttctccacacgactcccgaggcatcagttcaagcaaatttcgtactaccatttcgaatcaaatttgaaaccatcttttgacgacgatacgaattcaaatgcgcagatggatcagaagtacaaccaatgcctcgacgagatccagagcacgacggcgaggttcaacaccctgacgcacgccacggcgcgcgccgccgggatgagcagcagcagcatctgcgcgccgttcgcgcaccgcgccgtgtcggcaatgtaccacggcctgaggcgccgcattgccggcgagatcatgtccgccgccgccgcggccggcaggccttgccgcggcggcgagtcgtcgtcggcggtgaccggcggcgagagggagcggagctgggagtcggcgttcatccagaagcactgggcggtgcagcagctgcggcgcggcgagcagcagtgctggcggccgcagcgcggcctcccggagaagtccgtcgccgtcctcaaggcctggatgttcgagaacttcctccgcccgtatccgaaagacagcgagaaggagatgctcgcagcaaggagcggcctcagcaggaaccaggtgtcgaattggttcataaacgctcgagttcggctatggaagccaatgatcgaggagatgtgcgaggagctgaagaggagctcgggtggtggtgctggaaatcaagctctagcaatggagcatatgaacagccaagatgtggtacaaaaatgtggtgctggtttatctgcatttgcagcactgaatccagctacctga

SEQ ID NO: 12053 - DNA, 375 bp, Oryza sativa
  Clone ID: TFbOSC401238j.C1.o6.fg
atgtcatcctctctctttcttcttcctcctctctttctttctctcttctctccccttcggctagccgcagggagcacgggctggggcggtagtgggcggggacaagagaggcggagggagctgaagcggcgccggcggcggcacacgctctccagcctcagcggcaagcgtggtgcgccatctgccgctgccgccgccgtcggcggcagcgacgacgaggactccgacgacggatcccgcaagaagctccgcctctccaaggaccaagccgccgtcctcgaggacaccttcaacaagcacaacaccctcaaccccaagcagaaggcggcgctggcgaggcagctgaatctgaagccgcggcaggtggaggtgtag

SEQ ID NO: 12054 - DNA, 606 bp, Oryza sativa
  Clone ID: TFbOSC900153j.C1.o1.fg
atggatggggaggaggacagcgagtggatgatgatggacgttggagggaagggcgggaagggcggcggcggcggcggcgcggcggacaggaagaagcggttcagcgaggagcagatcaagtcgctggagtccatgttcgcgacgcagaccaagctggagccgaggcagaagctgcagctcgccagggagctcggcctgcagcctcgccagctggagaagctggcggagatgctgcaggagccacgggggaagtacggcgataatgccggggacgacgcgcggtcgggcggcgtcgccggcatgaagaaggaggagttcgtcggcgcgggcggcgccgccacgctctactcgtcggccgagggtggcgggacgacgacgacgacgacggccaagttgatgccccacttcggcagcgacgacgtcgacgcggggctcttcctccggccgtcgtcgcagcatcatccgccgccgccgcacgccggtgccggcttcacgtcctccgagccggccgccgaccaccagtccttcaacttccactcgagctggccgtcgtccacggagcagacctgcagcagcacgccatggtgggaattcgagagcgagtga

SEQ ID NO: 12055 - DNA, 1857 bp, Oryza sativa
  Clone ID: TFbOSC400292j.C1.o1.fg
atgtccactagcagcaatccatcctatcaccagctgggcctcgacgccatcagctgctgcttcgtcgccggcggcggcggtgcagaggcggcggcgccgttctttggttttgggttcggggatgtggacggcgagttcttggtcgcctcgccggtggctgctgttggcgacgagctggcgtgcgccgtgcctctgcggcggccgcaggggagcgtgtcggaggaggaggtgaatgccgccgcggtcgccgccgccgcggccggtggcgcggagagctgcagcaccgtgcactcggtgctgggttcggtggagtttgggtgtggaacgtcgtcgggtgtcaccattgctcaggcgtcgaggatgggaaggctcgccggagaggcgccgtgcggcgacgccggcggcggcggctggatctatggagggtccggcattgcgccgttacatggtgcgtactacctgtccgggttctcctccggcgccggcgccgggttcttgagccctttcgccgcgagctccgtggcggcggcggcgcccgcggcgagcgagctgtcgctgcggctcggcgccaccaagtgttcgtccccgagcagcatggcgaacgcgtcgtcggaagtgagctgctccggcttaacccacgtgagcagcggaggcggcctcggctaccaccaggcagcagccgccggcgccggcgccgccctgttccaccccactcacggcgacgacgccgcagccgccgccgccggcgagctaaggcaagcgtaccactcgagggcgcctccgcatttctcgcaggtggtgtcgcggtcagcggtgctcgcgcacgtcgcgcaggagctgctcaacggcttcgtcgcctgcctgctgcaagacgtcgccgcggacgcggccagcggcgtcgacggcggcgaggcgagccaggcgctcctcgtcgggcttttcggcgaggatcacgacggcgccgacggaggatgcctcacccgggagcggcggtgcgaggtgggcggcggaggcgcagcgtctgaggaagctactccaactggtgagttcttggctcagttcctcgtcgaacacctaagaaaccgtttcttggtgcgaaccaatggcgatgagatgcaggtggacgagaagtgcaaccaatgcgtcgaggagatgcagagcacggcggcgaggttcaacagcatggtgcgctccaccggcggcggcggcggcgggctgacggcggcgttcgcggggcgggcggtggcggcggcgtacaggagggtgaggaggcgggtgatgggacagctggtggcggcggcgacggcgaggtcgtcgtcgtcggcggcggcggcggcgctggaggagaaggagcggagctgggagtcgtcgttcatccagaagcactgggcgatgcagcagctccggcgaggtgaccagcagtcgtggcggccgcagcgcggcttgccggagaagtccgtcgccgtgctcaaggcctggatgttcgagaacttcctccgcccgtatccaaaggacagcgagaaggacatgctggcggcgagaagcggcctgagcaggagccaggtctcaaactggttcataaacgcccgcgtccgactgtggaagccgatgatcgaggacatgtacgaggagctcaagaagacctccggaggaagcgatggcgcagcagagattgagcatcttagcagcaaagatgtgctcagtttagaaaggtcaaaaaagccatcacatttggctgttcagtgtgatggaaaacaccatgacagattcgcagtcactcagatggagggagtgtttgaagagaaggggattgaggagattgggaagatacgcaaaacgagggttgtaatattgtag

SEQ ID NO: 12056 - DNA, 556 bp, Oryza sativa
  Clone ID: TFbOSC8589j.C1.o1.np
ccgaaagcgtgcgcggagggaatgtgcggtgggagcggcggcggaagcaaagggggaggtgcggcgaccccttcgacgcggtggtgcccgacgccggagcagctgatgatcctggaggagatgtacaggagcggcgtgcgaacgcccaacgcggcagagatccagcaaatcacggcgcacctcgcctactacggccgcatcgagggcaagaacgtcttctactggttccagaaccacaaggcccgcgagcgccagcgcctccgccgccgcctctgcgcgcggcaccagcagcaaccctcaccgccctcctccacggtgcctccggctcccactgctgctgctgccggtgccgtcgtgcaggtgcaccccgcggtgatgcagctacaccaccaccaccaccaccatcacccatacgctgcggccgccgctgcccaaagtcatcacctgcagcagcagcagcagcagcaagctgagtggccggcggcggtggactactgcagcactgcatcggcgtcagcgtcggcaactgctgctgacatggcgatcccgccgtgct

SEQ ID NO: 12057 - DNA, 870 bp, Oryza sativa
  Clone ID: TFbOSC32301j.C1.o11.fg
atggatcacatgcagcagcagcagcggcagcaggtgggtggagggggaggagaggaggtggcggggaggggtggtgtgccggtgtgccggccgagcgggacgaggtggacgccgacgacggagcagatcaagatcctgcgggagctgtactacagctgcggcatcaggtcgcccaactcggagcagatccagcggatcgccgccatgctgcgccagtacggccgcatcgagggcaagaacgtcttctactggttccagaaccacaaggcccgcgagcgccagaagaagcgcctcaccacgctcgacgtcaccaccaccaccgccgccgccgccgacgccgacgccagccacctcgccgtcctctccctctcgcctacagcagctggcgcgacggctccctctttcccgggcttctacgtcggcaatggcggcgccgtgcagacggatcaggccaacgtcgtcaactgggactgcaccgccatggcagccgagaaaaccttcctgcaggactacatgggcgtgagcggcggcggcggcgccgccgcggcggccccgacgccgtgggcgatgacgacgacgactcgcgagcccgagacgcttccactcttcccagtcggcggcggcggcggcgacggcgcgcatcgtcacgccggccacggcggtttcccgtccaacttccagcgctggggttctgctgctgctaccaccaacaccattacggtccagcagcatttgcagcagcacaacttttacagcagcagcagcagccagctgcacagccaggatgggccggcagcaggcacatccctggagctcactctcagctcctactactgctcatgctcaccttaccctgcagggtccatgtga

SEQ ID NO: 12058 - DNA, 870 bp, Oryza sativa
  Clone ID: TFbOSC401125j.C1.o10.fg
atggatcacatgcagcagcagcagcggcagcaggtgggtggagggggaggagaggaggtggcggggaggggtggtgtgccggtgtgccggccgagcgggacgaggtggacgccgacgacggagcagatcaagatcctgcgggagctgtactacagctgcggcatcaggtcgcccaactcggagcagatccagcggatcgccgccatgctgcgccagtacggccgcatcgagggcaagaacgtcttctactggttccagaaccacaaggcccgcgagcgccagaagaagcgcctcaccacgctcgacgtcaccaccaccaccgccgccgccgccgacgccgacgccagccacctcgccgtcctctccctctcgcctacagcagctggcgcgacggctccctctttcccgggcttctacgtcggcaatggcggcgccgtgcagacggatcaggccaacgtcgtcaactgggactgcaccgccatggcagccgagaaaaccttcctgcaggactacatgggcgtgaccggcggcggcggcgccgcagcggcggccccgacgccgtgggcgaggacgacgacgactcgcgagcccgagacgcttccactcttcccagtcggcggcggcgccggcgacggcgcgcatcgtcacgccggccacgccggtttcccgtccaacttccagcgctggggttctgctgctgctaccaccaacaccattacggtccagcagcatttgcagcagcacaacttttacagcagcagcagcagccagctgcacagccaggatgggccggcagcaggcacatccctggagctcactctcagctcctactactgctcatgctcaccttaccctgcagggtccatgtga

SEQ ID NO: 12059 - DNA, 603 bp, Oryza sativa
  Clone ID: TFbOSC401161j.C1.o1.fg
atggaggctcttagcgggcgagtgggggtgaagtgtgggcggtggaacccgacggcggagcaggtgaaggtcctgacggagctgttccgagcggggttgcggacgccgagcacggagcagatccagcgcatctccactcacctcagcgcattcggcaaggtggagagcaagaacgtcttctactggttccagaaccacaaggcccgcgagcgccaccaccacaagaagcgccgccgcggcgcctcctcccccgacagcggcagcaacgatgacgatggccgcgccgcagcccacgagggcgacgccgacctcgtcctgcagcctcctgagagcaagcgggaggccagaagctacggccatcatcaccggctcatgacatgctacgtgagggatgtggtggagacggaagcgatgtgggagcggccgacgagggaggtggaaacgctggagctgttcccactcaagtcgtatgacctcgaggtggacaaggtccggtatgtgaggggcggcggtggcgagcagtgcagggagatctcgttcttcgacgtcgctgccggccgggatccgccgctggagctcaggctttgcagcttcggcctctag

SEQ ID NO: 12060 - DNA, 855 bp, Oryza sativa
  Clone ID: TFbOSC401921j.C1.o7.fg
atggaccgcactgcgactgcaagctgggaggtcatgagccggcgaggtgagcagcagcagcagctgatgatgcaagctccggccagccataatggtggcagcggcggcggcgagccggcgaggtcgcggtgggcgccgaagccggagcagatcctgatactggagtccatcttcaacagcggcatggtgaacccggccaaggacgagacggcgcgcatccgccgcctcctcgagcgcttcggcgccgtccgcgacgccaacgtcttctactggttccagaaccgccgctcccgctcccgccgccgcgcccgccagctccagcaagcctgcggcgccgccctccatcagctcccctccgccgccgccgccgccggagccggaggaggaggagattactatcaccaccaccaccaaccttcgtcttctcctttcctcatgcacggcggtggcggcggcggcgtggtcacttcgacgaccgcggcgccagcggtggcggcgtccggccacttcttggcggacgaggtcgacggcggcggcgacgacgacctcttcgccatctcccggcagatgggcctcatggctcgccacggcggcggcgaccaccattacagcagctacgcggacagcgacgccacccagctcagctaccaaccaaccgggacgatccaagtgttcatcaatggcgtcgcatacgatgtgccgagcggcggagcgctggacatggccggcacgtttggccgcgacgccatgctggtgcactcctccggcgaggtccttccggtggacgagcacggcgtgctcatcaacagcttgcagatgggggagtgctactacctggtttcaaaatcgatctga

SEQ ID NO: 12061 - DNA, 993 bp, Oryza sativa
  Clone ID: TFbOSC19014j.C1.o1.np
atcgtcgtcgtcagccatggctccatctctcatgcccatcctcctgctcccagctaattgacccacaaacatacaatgccaacattgttgcacgataagcatgcaactccagcaaatgggtatcttcctttgccatcacctcagcaacagcgattttgcggcagattgcagcaaaatcagaacaactatcccgcccggaaatcgaacaaaccaaacaaaaataagagaaatacactagaggatgatattggcggtggtggtgaagacgatgacgacgcgctggaagcactttttaagcagttggaagaagatctcaagaatgatgatttgtctgttgaggatgatgacgatggaatttcagaagaagatatggcaagatttgagcaggagttggcagaggcaatcggggatattgctgatgctgatgaatctggagagggttcgtcattaggctctgaggcttatgggaatgatgaaaaaacggatgaaatcaaacggccagagctgaaaaactggcaacttaagaggctggctcgtgctctcaaaataggtcgccgtaaaactagtataaagaatcttgcaggggaactaggcctggataggactttggtcattgaattgctccgaaatccacctccaaaacttctattcatgtctgattctttgcctgatgaagacccttctaaacctgaaatcaaggaaatagagccctctccagtagttgataacgctgatgtcactgaaaccaagccacagacggaacttcctgttcatgtcatgtgcgcagaatggtcttcacagaaaagattaaaaaaggtgcaactggagacattagaaagagtctactcccgaaccaaacgccctacaaatacaatgatcagcagcatagttcaagtgacaagccttccacggaagaccattgttaagtggtttgaggatagaagggaacaggatggggtacctgaccatcgagttgcattcaagagatcccta

SEQ ID NO: 12062 - DNA, 1545 bp, Oryza sativa
  Clone ID: TFbOSC33862j.C1.o2.fg
atggcggcgatggtgggggcgccgctcgccgtggccgcggccgccgccgcgccaggggcgcgagtgttcctggcacggccgctcctccgccgctcgccgcggggcgtcgcctgcgcccttcgccggaggccctccaagtacaagaataaaatccagaatgaggaggttgtagtagaggatgatattggcggtggtggtgaagacgatgacgacgcgctggaagcactttttaagcagttggaagaagatctcaagaatgatgatttgtctgttgaggatgatgacgatggaatttcagaagaagatatggcaagatttgagcaggagttggcagaggcaatcggggatattgctgatgctgatgaatctggagagggttcgtcattaggctctgaggcttatgggaatgatgaaaaaacggatgaaatcaaacggccagagctgaaaaactggcaacttaagaggctggctcgtgctctcaaaataggtcgccgtaaaactagtataaagaatcttgcaggggaactaggcctggataggactttggtcattgaattgctccgaaatccacctccaaaacttctattcatgtctgattctttgcctgatgaagacccttctaaacctgaaatcaaggaaatagagccctctccagtagttgataacgctgatgtcactgaaaccaagccacagacggaacttcctgttcatgtcatgtgcgcagaatggtcttcacagaaaagattaaaaaaggtgcaactggagacattagaaagagtctactcccgaaccaaacgccctacaaatacaatgatcagcagcatagttcaagtgacaagccttccacggaagaccattgttaagtggtttgaggatagaagggaacaggatggggtgacttttagtactctattagatcaaacccatgctttgccttactttaatcgaaatcgtgttgctattttcaatatggagaaatttcggagttcatcagaaggaaactatgtggaaacaggggagggaggtagcatctggggacctgcaaggctgcaacacagagatagtgagagaggagtggtggttttggtggtgcagatgatggctggcttgcaaagatcagcgacaacattcagaaggtccggttcgtcaggcctggtctgggacgagcggttcttgaccgaggacgcagaggcggccaaggccggcgatggcgatggcggtggcggcacggaggagccccagccggagctccggcattccaagagcgtcgggagcatcggcatgatgcgccgtgtcgctgccgacgacggcgacgacagcgagaagacgacgaagcagcagaggaagaagaagaagaagaagaagaaggacggtcagaaggaggacgacaaccgcagccagcaggtgttcaggaccaaggacatcgccccggacgtcgacccgccgtcgccgagggtgtccggctgcatcctctgctccatcttctccggctccggctcgtcgtcgtcggcgacgtcgcgccgcgccaagccgaggaagaagtga

SEQ ID NO: 12063 - DNA, 1806 bp, Oryza sativa
  Clone ID: TFbOSC401166j.C1.o11.fg
atggcgcacgatccgagcctagggtacgcggattacttcgcggcggaggtggatggcaccggcgccacggagttgtatgggttgcagcagcatcagcagggggttggggtggcggagatgttcggggtgagggggctcatgccggcagcgcacgcgcacgagcagagcaagggtgtgggcgcgctcgtcgtcggcggcggcggcgtcgatgatggaggcgcgacgacgctgccgacggtccacttcggcgggctcggcgagctgcaccaccaccaacaccggcagagccaggcgccgctgtccctctcgctccacaggccggaggcggccgcgacgtcgctgctgatgcagcagcagcagcagcacctccaccaccagccgtcgccgccggcgggcgcggcgtcgacgtggcagctgcagcagggtgcgtggcatctccgcggctcaaggttcctcctcccgacgcagcagctcctgcaggagttctgcagcctccccgtgaagagcaccaccagcccatcatcggcaagcaaggcaaccaaaccgccgcaagaagaggccgccagcggcggaggctcgtcgtcgtggaccgcgccgacgcagatccagtccatggacgcggccgagctgcagcggctcaagggcaagctctacaccatgctcgaagaggtggataggaggtacaggaggtactgcgagcagatgagggcgctcgcggcgtcgttcgaggcggtggccggggagagggcggcggcgtcgtacacgcggctggcgtcgaggacgatctcgaggcacttccggagcctgagggacggggtggtggcgcagctgcaggcggtgcggaagcagctcggggagaaggacacggcggtgcccgggatgaccaagggcgagacgccccgcctccgggtgctcgaccagtgcctccgccagcacaaggcctaccaggccggcatgctcgagagccacccatggcgcccccagcgcggcctccccgagcgcgccgtctccatcctccgtgcctggctcttcgagcacttccttcacccaagaatgtttgccggtttcgtgacgatgctcaagctctcaccgcggtacccaagcgacgtggataagcacatcctcgcgaggcagaccgggctatcacgtagtcaagtggcgaattggttcatcaacgcgagggtgaggctgtggaagccaatggtggaggagatgtacgcggaggagatgaaggacgaggagggcagtggacagtccacgcaggcgagcaacccgcagaaccctaaccctagcagctacacgtcggaggtgcgcggcggcggcggcggcggcgaggaccgcggcgagcagaagccgtcgcgggcgcagctgctgcacgacgccggctcgctggcctccgtcgtgagcatcgggcacggcggcgcgggacggacgatggtcgatcaccaccatcaccagagccttaattttggcacgatggaccagctcgacttcgacgcgtacgaggcggccggcggcgggcaggggttcggcgccggcggcggggtgtctctgacgctggggctgcagcagcagcacgcggacccgcacgacggcgtgaacgtcgcgttcgccgccgccgcggcgccgcccaattcgtccggtgtcgccgcggagtacctattcatgggcggcggcgagcatcagcagcagctgcctcaaaccgcccagttcggcgccgtcatggaaggcgacgccgcgtcgcactaccgtggcctcagcgccaccgccgccgggttccacctcctccacgacctcgccgggtga

SEQ ID NO: 12064 - DNA, 921 bp, Oryza sativa
  Clone ID: TFbOSC9739j.C1.o1.fg
atgatggccttaggcgtgccaccgcctccctcgcgcgcctacgtgtccggcccgctacgcgacgatgacacttttggcggtgatcgtgttcggcggcggcggcggtggctcaaggagcagtgccctgccatcattgtccacgggggtggcaggcgtggaggggtcggccacagggccctggctgccggagtctctaaaatgcgtctcccagccctaaacgccgccacccaccggatcccctccacctcgcccttaagtatccctcagaccctcaccatcacccgcgatcctccctacccaatgctgcctcgaagtcacggccaccggaccggcggcggcggcttctccctcaagtcctcgcccttctcgtcagtgggcgaggagagggttccggacccgaagccgcggcggaacccgcggccggagcagatccggatcctggaggccatcttcaactccggcatggtcaacccgccgcgcgacgagatcccgcgcatccgcatgcagctgcaggagtacggccaggtcggcgacgccaacgtcttctactggttccagaaccgcaagtcccgctccaagaacaagctgcgctccggcgggacaggccgcgcggggctcgggctcggcggcaaccgggcctcagagccgccggcggcggcgacggcgcaccgggaggccgtggcaccgtcgttcacgccgccaccgatcctcccgccccagccggtgcagccgcagcagcagcttgtctcgccggtggcggcgcccacctcgttgtcgtcatcgtcctccgaccgctcgtccgggtccagcaagcccgcgagggctacgttgacgcaggcgatgtccgtgacggcggccatggacctgctctcgccgctccgccgatcagctcggccacggcaagagcagcgccatgtctag

SEQ ID NO: 12065 - DNA, 305 bp, Oryza sativa
  Clone ID: TFbOSC9739j.C1.o2.np
atggagacagggatttttatacaggtttgggcccttgaattgtcagtcgacaacaggatagcctttctccttaaatccgtgcccggcgagatcaaagatagcactttcatctctcctgacagtatccggagacaccgtagggtactagccgtgcttatccctaaagtcaatattcggcgacgtgtcttggtgtatgtaggcttttatgttgtggcttctatatcgattgtgttgggttgtttccgtataagacatgatatgtgatgggtcctgccgagatttagtcaactactattaggtatgtg

SEQ ID NO: 12066 - DNA, 1659 bp, Oryza sativa
  Clone ID: TFbOSC413563j.C1.o7.fg
atggcctcaccgaacaggcactggccgagcatgttcaggtccaatcttgcctgcaacatccagcagcagcagcagcctgacatgaacggcaacggcagctcgtcctcttccttcctcctctcgccacctactgctgcgaccaccggcaacggcaagccctccttgctctcctcagggtgtgaggaggggacgaggaatccggagccgaagccgcggtggaacccgaggccggagcagataaggatactggaggggatcttcaactccgggatggtgaacccgccgcgcgacgagatccgccgcatccgcctgcagctgcaggagtacggccaggtcggcgacgccaacgtcttctactggttccagaaccgcaagtcccgcaccaagaacaagctgcgcgccgccggccaccaccaccaccacggccgcgccgccgccctgccgcgcgcgtcggcgccgccgtcgacgaacatcgtactcccctctgcagcggcggcggcgcccttgacgccgccgcggcgccatctcctcgccgcgacctcctcctcgtcctcctcctccgaccgctcctccgggtccagcaagtcggtgaaaccagctgctgccgcgctgctgacgtcagccgccatcgaccttttctcgccggcgccggcgccgacgacccagctgcccgcgtgccagctctactaccatagccatcccacgccgctggcacgtgatgatcagctcatcacctcgccggagtcgtcgtcgctcctcctgcagtggccggcgagccagtacatgccggcgacggagctcggcggcgtcctcggctcgtcgtcccacacgcaaaccccggcagcgatcaccacccacccatcgacgatctcacccagcgtgctcctcggcctatgcaacgaggcactagggcagcatcagcaagagaccatggacgacatgatgatcacctgctccaacccctccaaggtgttcgaccaccattccatggacgacatgagctgcaccgacgcggtgagcgccgtgaacagggacgacgagaaggcgaggctggggttactgcactacggcatcggcgtcactgctgctgcaaatccggcaccacatcatcatcatcatcatcatcatcttgcctctcctgtgcatgatgctgtctcggctgcagatgctagtacggcggccatgatccttccattcaccaccactgctgctgcgacgccgagcaacgtcgtcgctacaagctctgcactcgctgatcagttgcaagggcgtttgttccgagattggacgtgtgcatggcatccttcttctcaaaaagatgctttcaacatcgcctctctctctggcttggatttccgcatgcatagatatgctagctttttggcagtcataaacttgccagagggaggggcggcgccgccgccgccctcggcgacggtggtggcggtgagccgcgacgacgagacgatgtgcaccaagaccacgagctacagcttcccggcgacgatgcacctcaacgtgaagatgttcggcgaggcggccgtgctggtgcgctacagcggcgagccggtgctcgtcgacgactccggcgtcaccgtcgagccgctgcagcagggcgcgacctactacgtgctggtatctgaggaagctgtgcattga

SEQ ID NO: 12067 - DNA, 1524 bp, Oryza sativa
  Clone ID: TFbOSC400934j.C1.o31.fg
atggccgggtcgccgccctccctcctctccggctcctccgccggcagcgccggcggcggcggctactccctcaagtcgtcgcccttctcgtcagtgggcgaggagagggttccggacccgaagccgcggtggaacccgcggccggagcagatccggatcctggaggcgatcttcaactccggcatggtcaacccgccgcgcgacgagatcccgcgcatccgcatgcagctgcaggagtacggccaggtcggcgacgccaacgtcttctactggttccagaaccgcaagtcccgctccaagaacaagctgcgctccggcgggacaggccgcgcggggctcggcctcggcggcaaccgggcctccgcgccggcggcggcgcaccgggaggccgtggcgccgtcgttcacgccgccgccaccaatcctcccggcgccccagccggtgcagccgcagcagcagcttgtctcgcctgtggcggcgcctacctcgtcgtcgtcttcctcctccgaccgttcgtccgggtccagcaagcctgcgagggctacgtcgacgcaggcgatgtccgtgacgacggccatggacctgctctcgccgctcgccgcggcgtgccaccagcagatgctctatcaaggccagccactggagtcgccgccggcgcctgctcccaaagtgcacggcatcgtgccacacgacgagccggtcttcctgcagtggccgcagagcccctgcctgtcggccgtcgacctcggcgccgccattcttggcggccagtacatgcacctgccggtgcccgctccgcagccaccgtcgtcgccgggcgcggcgggcatgttctgggggctctgcaacgacgtgcaagcgccaaacaacaccggccacaagagctgcgcctggagcgccgggctcggccagcactggtgcggctccgccgatcagctcggcctcggcaagagcagcgcggcgtcgatcgccaccgtgtctaggccggaggaggcgcacgacgtcgacgccacgaagcacggtctgctacagtacggctttggcatcaccacgccgcaagtgcacgtggacgttacctcctcggctgctggcgttctgcctcctgttccgtcctcgccgtcgccgccgaacgccgccgtcaccgtcgcgagcgtggccgccaccgctagcctgactgattttgctgcaagtgctatatctgctggcgccgtcgctaacaatcagtttcaaggtctcgcggatttcgggctcgtcgccggcgcctgctccggcgccggagccgccgccgccgccgccgcgcccgaggcgggcagttccgtggccgcggttgtgtgcgtcagcgtcgcgggcgccgcgccgccgctcttctacccggccgcgcacttcaacgtgaggcactacggcgacgaggccgagctgctccgctacagaggaggcagccgcacggagcctgtgcccgtcgacgagtcgggcgtcaccgtcgagccgctccagcagggcgccgtctacattgttgtcatgtaa

SEQ ID NO: 12068 - DNA, 837 bp, Oryza sativa
  Clone ID: TFbOSC401231j.C1.o4.fg
atggacggcggccacagcccggacaggcatgcggcggcggcggcgggggagccggtgaggtcgcggtggacgccgaagccggagcagatactcatcctggagtccatcttcaacagcggcatggtgaacccgcccaaggacgagaccgtccgcatccgcaagctgctcgagcgcttcggcgccgtcggcgacgccaacgtcttctactggttccagaaccgccgctcgcgctcccgccgccgccagcgccagctgcaggcgcaggcgcaggcggccgcggccgccgcctcgtcgggatctcctccgactgcttcgtccggtggcctcgcgcctggccacgccggctcgccggcttcgtcgctcgggatgttcgcgcacggcgccgccgggtacagctcctcgtcgtcctcatcgtggccgtcctcgccgccgtcggtggggatgatgatgggggacgtggactacgggggcggcggcgacgacctgttcgccatctcgaggcagatggggtacatggacggcggcggcggctcgtcgtcgtcggcggccgccggtcagcatcagcagcagcagctctactactcgtgtcaacctgcgacgatgacggtgttcatcaacggagtggcgacggaggtgccaaggggaccgatcgatctgagatcaatgtttgggcaggacgtgatgctggtgcattcaacgggtgctcttcttccagccaacgagtacggcatcctcctccattctctccagatgggcgagagctacttcctggttaggatgcatacctgctgcctgcctaacatcggcttgcgactgcagccaccaagaaaacagtga

SEQ ID NO: 12069 - DNA, 86 bp, Oryza sativa
  Clone ID: TFbOSC14111j.C1.o1.gm
atgacggcggagtcgccggggggcgcaggcacctttcagctgacgggagcgtcattaactgttgaaccggcgtggactggtgactg

SEQ ID NO: 12070 - DNA, 711 bp, Oryza sativa
  Clone ID: TFbOSC407921j.C1.o3.fg
atgaggcttcaccatctgcatgtggcctacctggatcacaaagcgtcgtcgtcctcgtcgtctccggcgccaccatccatctccccgtcgtcgatccccggatcggccgccttccctgctttctccttcaaatgcctccgcccgctcgcgcccaagatctcgctgccggagccgaggaagatgatcgcgccgccggacttcgtcgtccctcgcgccagaaacgcttccaagctgctcaactacactgtgcaggtgccggcggcggggacgacgaggtggaacccgtcggcggagcagataaaggtgctggagatgctgtaccgcggcgggatgcggacgccgaactccgtccagatcgagcggatcacggaggagctcggcaagtacggccggatcgagggcaagaacgtcttctactggttccagaatcacaaggcccgcgagcgccagaagcagaagcgcgccgccctcctcaccctcagcacgctcgacccttccttgctgcccgctaccgctaacgaaaccaaagaggcaccggagaagaaggagaaggacgtggaagatggattggcgagctgcaagcggcggtgcaaggcgtggggtgacggcgccggcgatggagacgcggtggtggcgacggaggcggccggcggctgcaccgacgaagtgaccctggagctcttcccgttgcatccccagggaaaagcttaa

SEQ ID NO: 12071 - DNA, 789 bp, Oryza sativa
  Clone ID: TFbOSC407922j.C1.o1.fg
atgaggcttcaccatctgcatgtggcctacctggatcacaaagcgtcgtcgtcctcgtcgtctccggcgccaccatccatctccccgtcgtcgatccccggatcggccgccttccctgctttctccttcaaatgcctccgcccgctcgcgcccaagatctcgctgccggagccgaggaagatgatcgcgccgccggacttcgtcgtccctcgcgccagaaacgcttccaagctgctcaactacactgttagacacatcaaaccctacttgttcttgatcgatcgatcgatcaggttcatgatcgtgtatatatttggtttgcaggtgcaggtgccggcggcggggacgacgaggtggaacccgtcggcggagcagataaaggtgctggagatgctgtaccgcggcgggatgcggacgccgaactccgtccagatcgagcggatcacggaggagctcggcaagtacggccggatcgagggcaagaacgtcttctactggttccagaatcacaaggcccgcgagcgccagaagcagaagcgcgccgccctcctcaccctcagcacgctcgacccttccttgctgcccgctaccgctaacgaaaccaaagaggcaccggagaagaaggagaaggacgtggaagatggattggcgagctgcaagcggcggtgcaaggcgtggggtgacggcgccggcgatggagacgcggtggtggcgacggaggcggccggcggctgcaccgacgaagtgaccctggagctcttcccgttgcatccccagggaaaagcttaa

SEQ ID NO: 12072 - DNA, 1128 bp, Oryza sativa
  Clone ID: TFbOSC900018j.C1.o17.fg
atggagagcttcgccagtctcgcaggaggtggcagcagcagcaccacagctcggttgccggagctgatctcgccggagaacccggaccacatctcgccgcccccgttgctgtaccagctgctcgccggcccggagtcgtcggcgcggcagcatgggcatgatgggcatcaccacggcggcggtggcggcgaagcagcagcagcagctgtgcagggacaggtctcgccggcaggcgcggaggcggcggtcaaggccgagatcatgtcgcatccacagtactcggctctcctagccgcctacttaggctgcaaaaaggtcggggcgccgccggatgtactgaccaagctcacggctgtgccggcggcgcagcagctggacgaagccgacggccaccctcgtcgccggcacgagccacagcgtgatgacgacccggatcagctcgatcagttcatggacgcgtactgcagcatgctgacgaggtacagggaggagctggagcggccgatcctggaagccgcggagttcttcagcagggtggagacgcagctcgattcgctcgctgagagtaattgtgaaggcacgggatcatcagaggaagagcaagaccctagtgacaagcagctgaagcaccagcttctgaggaagtacggtggctcgttgggcgatctccggcaggtgttctccaagaggaccaagaaagggaagcttcccaaggaggccaggcagaagcttctgcactggtgggagctgcactacaagtggccctatccctccgtacgcacgcatcacatcccgtttgatcaattcaaccacattttctgcaccaaattaactcgtttgaaaatgcgtgaaatttacggggttgtgtatgagcaggagatggagaagatgacgctggcgcagacgacggggctggaccagaagcagatcaacaactggttcatcaaccagaggaagcggcactggaagccgacgccggtggcaggcacggccttcccgacgatggaagctgccggaggcggcttccgacactccggccacggcggcggccttgcggcggcggcggcgctgccgctgtacatgggcaggccgttcgttgtggacggcatgtaccggctcgggtcttga

SEQ ID NO: 12073 - DNA, 1322 bp, Oryza sativa
  Clone ID: TFbOSC900018j.C1.o27.gp
gttccattatgcaagaaaggaagcaaaacaaataaatacatagacttgcaattcctaaatatagttgaagcagagtatgcacaaccaaggcaaacaattgaacactactattgctattgctccattgtcaaccaatttgtccagaacatttcacagccagacacacaaaaggcaaaccagtttgatagtatatccctgcatgcttttgctcaccttctgttttgggaaccagaccttgatcttctgcttgggctcgatgttggcgaggatggataactcgcagagtaactgctggcggcgagagaatctgggcttggggcactcggcgtacacccgctccagcgcctccacctgacccggcgtgtagtgcacgtacttgccggagtccatcccggccttgtcgtacccgctgccgtcactgccgctgccgctccgcatcgggcatcgccaccgctgccgccatcctccactccggccaccaccaccaccaaagtttcccccttcgccaccttcaacacaacaacaacctgagagatttcgagcaaaagtgaaatcatccggagaggatgaggagaaaaaataacctgacatgtgagagggggaaacgaaagaaagaaagaagaaagagaaggaagggagaaatcgatagatggttgtgcgattgcaagcttgcttcctcctctcctctccgtcaggggatgcgtcgacctcggcggcgacggtcatggtgttccacgtagagaggagaggtcgagagttgagaggggaacggttgggaagctgcggaggagaggacggagaggcaacgcggcgaccgtacggcagtcctgcgcaggcggccggtccgacgccgccatgagggaagggcatcggcggcagacgcgcagccggctctgccgccaacgtaggtaccctcgccactgccgccacaagggaagggagggggcacgacggcggatccgccggcgtcgggcgccggatctgccctccccccgccaccaccgccgccgtcaccacaagtggatggagaaggaggaggggagcaccggcggcagctcgggcgggtgccgcctcctccctccccccgtggacgcaaccacaaggtcgaggaggccatcatggtagaggagggcagcacaggaggcatggtggagggcggcaatgttgtcgtccccttgctccgtcgtctttgtaaacgccggcgccgtccttgcccccggccgggaggaggaggccgcatggattggccggggatggggatggcggattggccgggaggaggattgggcagagagatgttgcgtgttggggatgggttggca

SEQ ID NO: 12074 - DNA, 660 bp, Oryza sativa
  Clone ID: TFbOSC100557j.C1.o1.fg
atgaatcaaaatgaatatccttgtctcaaattgaacgacagtaattgtgaaggcacgggatcatccgaggaagagcaagacacgagctgtcctgaggctgaggagatcgaccctagtgacaagcagctgaagcaccagcttctgatgaagtacggtggctcgttgggcgatctccggcaggcgttctccaagaggaccaagaaagggaagctccccaaggaggccaggctgaagcttctgcactggtgggagctgcactacgacaaatggccctatccctccgtacgcacgcatatatatgcttcccatttgatcaattcaaccacatttttctgcaccaaactcgatcttatgaaaatgcgtgaacttctcgggtgtacatgtgtgtatgagcaggaggtggagaagatgacgctggcgcagacgacggggctggaccagaagcagatcagcaactggttcatcaaccagaggaagcggcactggaagccgacgccggtggcaggcatgaccttcccgacagtggaagctgccggaggcggcttccgacactccggccacgacggcggccttgcggcggcggcggcggcggcggcgctgccgctgtacatgggcagctggccgttcgttgtggacggcatgtaccggctcgggtcttga

SEQ ID NO: 12075 - DNA, 2337 bp, Oryza sativa
  Clone ID: TFbOSC31211j.C1.o5.fg
atggtatttggcctcaactgtccagctaagcagattgtatacgtggagaagaaaagaagatggggcccatgtattcaccagctccgcgcgtcctcgtttggctccgagagcctcgtcagaaaaacagcttttttaatcgcatttgcacatgagaaagcaggacacagagagaagggggagaagctgaccaaaaaagatatccgatcgattggaattggaatggatctgggagcggcgtcggcggtggcggtgtcctccagcggcgggcggcgggcgacgggcgaaatcggccagcgacaggtggaatcggctggagagttagggctcacagacaagcagctgcagatgtggttctgccaccggcggttgaaggaccgtaaaccaccgccgaagcggcagcagctggaggaggaggttcatgtgccagttatggcgccgcctcctgtgctgccaccaccgctgccacacagcgagctaacaatggctcctggtgggatgtatggcgagcagttgctgccctcctcttcccgtagaggaactggccggccatcagccattcttgatatgtctgatcttcagtgcctccccctactcacgagccacgcgacattgaagctgattgattgtattcctcatcaagggaaagcatggcagattgtacagcttgatgcacttgacgagaggatggagcactttccggggttggaggatttctacgaggagaagcaccgggccccacagattgccagcggagagcgcttgaagacccttcgagtcagaggtcacacggcgcacatactgttcgacgaccggtacgtcccgtacctacggcgggctaagctcttggcgttcgtgaccatggcgcagcgaccggtgcctctgtacaacgccgctgctctgacggccctagtggaccggtggcgtccagagacacacaccttccacctaccgtgcggggagctgacggtcactctggaggacgtcgccatgatcctgggtcttcctatccggggtcaggcggtcacaggtgacacagcgtcggggaactggagggagagggtcgaggagtaccttggtctggagcctccagtggcacctgatggtcagaggcagacaaagacatcaggggttcctttgagttggttgcgagccaactttggtcagtgtcccgctgaggcagacgaggctacagtacagcgatactgcagggcgtacgtgctgtacatcttcggcagtattctgttccctgactctggtggagatatggcttcttggatgtggctgccgttgctcgcggactgggacgaggcgggtaccttcagctgggggtcggctgccctagcctggttgtaccggcaactctgtgatgcttgccgaaggcaaggcggggacgcgaacctagcaggctgtgtttggttgctacaggtttggatgtggatgaggcttccagttggtcggcccatgtggaggacccatcaggcttggccgcaccaggatgcagaccgacgtcccactgtagctcacctgtgggaatcggtcccatctccagtagtaggccgcaggaatttggcgtactaccactacacaaacgagatggactacctacagccagaacatgtggtgtggatgccatatcaggcacaggaagtgctcgagctagaactgaatcccatgtgccatatagaggatgcgttgaagaccctacggtgcccactgatctgcttctatgcagtggagttccagatgtgccaccgcagactacggcagcgatgtcggaagttggcagcaaggctcggctgcaggtcgactgatgtggtcgaacatgctcatgcccaccaagagggggatgaagaaggggaggtgggtgacgaggagggcgagcaagacaaagaggcggaggaaggagatgaggaggaagaaggggatgaggacagagaagaggaggcggatgagctcggtccctcgcagctagaggacgcaccagagtcgtcacagccggatatctcgcagcccggcccgtctcgaccacgaagccggcgggctccttcgcaggactggaggtacacccccgacgtgcctcgtcctcgcactagagcgccagtgcacctggcgctgaggtcccagcccagccatccagaaggcttgctgggctgggccacggccgaaacggccaagtcccacctcagcgccaggttggctggcgctgagtttcccaatgtcagcgccattttggctggcgctgaggtcccagcccgcaagccatccagaaggcttgctgggcagggccacggccgaaacggccaagtcccacctcagcgccaggtgggctggcgctga

SEQ ID NO: 12076 - DNA, 1050 bp, Oryza sativa
  Clone ID: TFbOSC401214j.C1.o9.fg
atggatcccggccgcgtcgtgttcgactccggcgtggcgcggcgggcgtgccccggcggcgcgcagatgcttctcttcggcggcggcggcagcgccaacagcggcggcttcttccgaggcgtgccggcggcggtgctggggatggatgaatcgcggtcgtcgtcgtcggcggcgggggcgggggcgaagcggccgttcttcacgacgcacgaggagctcctggaggaggagtactacgacgagcaggcgccggagaagaagcggcggctgacggcggagcaggtgcagatgctggagcggagcttcgaggaggagaacaagctggagccggagcggaagacggagctcgcccgccgcctcggcatggccccccggcaggtcgccgtctggttccagaaccgccgcgcccgctggaagaccaagcagctcgagcacgacttcgaccgcctcaaggccgcctacgacgccctcgccgccgaccaccatgccctcctctccgacaacgaccgcctccgcgcgcaggtaatctcattaaccgagaagctgcaagacaaggagacgtcgccgtcgtcggcgaccatcaccaccgcggcgcaggaggtcgaccagccggacgaacacacggaggccgcgtcaaccaccggcttcgccaccgtcgacggcgcattggcggcgccaccgcccggccaccagcagccgccgcataaagatgatcttgtgagcagcggcggcaccaacgacgacggcgatggcggcgcggccgtggtggtcttcgacgtcaccgagggcgccaacgaccgcctcagctgcgagtcggcgtacttcgccgacgccgcggaggcgtacgagcgcgactgcgccgggcactacgccctctcgtcggaggaggaggacggcggcgcggtcagcgacgagggctgcagcttcgacctccccgacgccgccgccgccgccgccgccatgttcggcgccgccggagttgtgcaccacgacgccgcggacgacgaggaggcgcagctcggcagctggaccgcctggttctggagctga

SEQ ID NO: 12077 - DNA, 1089 bp, Oryza sativa
  Clone ID: TFbOSC900339j.C1.o7.fg
atggagctggggttgagcttgggggaggctatggcggatgctgggagggagctggttcttgggcttgggatggggaggagggaggaggcggcggaggcggggaggagggatcatgaggtgaggagggagctggagttcgggtcgatgtcgagcaggtgcggtggttcttcgccggagccgacggtgcggctcacgcttctgcccatggtgcccggccttggcctcccatggccgccgccgccgccgccgtcgtccgagagcaggcatttggaggcgtcgacgcggggattcgacgtgaaccgcccgccgtcgtccggcggcggcggcggcggcggcggcgcggaggaggagcaggacgacgtggccggggcggcactctcgtcgtcccccaacaacagcgccggatccttcccgatggatgacttctccgggcacggcctcggcggcaacgacgcggcccctggcggtggcggcggcgaccgctcgtgctcccgcgccagcgacgaggacgacggcggctccgcgcgcaagaagctccgcctctccaaggagcagtccgcgttcctcgaggagagcttcaaggagcacagcaccctaaaccccaagcagaagctggcgctggcgaagcagctcaacctccggccgcgccaggtggaggtgtggttccagaaccgccgcgccaggacgaagctgaagcagacggaggtggactgcgagtacctgaagcggtgctgcgagacgctgacggaggagaaccggcggctgcagaaggagctcgccgagctccgggcgctcaagacggtgcaccccttctacatgcacctcccggcgacgacactctccatgtgcccctcctgcgagcgcgtcgcctccaactccgccccggccaccgcctcctccgccgcaacatcgtcgacggccgcgccgcccgcggcaccctcatccggcggcattgcggccacctcctcctccgccgccgccgccgcggcgccggaccacaggccgtcgtcgttcgccgcgctgttctcgtcgccgcgtggcttcccgctatccgtagccccgcaggcgcagccgccgacgagctcgtga

SEQ ID NO: 12078 - DNA, 873 bp, Oryza sativa
  Clone ID: TFbOSC400630j.C1.o3.fg
atggagagcgactgccagttcttggtggcgccgccgcagccgcacatgtactacgacacggcggcggcggcggtggacgaggcgcagttcttgcggcagatggtggccgcggcggatcaccacgcggccgccgctgggagaggaggcggcgacggcgacggcggcggcggcggcggcggtggcggggagaggaagcggcggttcacggaggagcaggtgcggtcgctggagacgacgttccacgcgcggcgggccaagctggagccgcgggagaaggcggagctggcgcgggagctcgggctgcagccgcgccaggtggccatctggttccagaacaagcgcgcccggtggcgctccaagcagatcgagcacgactacgccgcgctccgcgcccagtacgacgccctccacgcccgcgtcgagtcgctcaggcaggagaagctcgccctcgcagaccaggttcgtgcgccattgccgaccaatcatcagctatacctgctgcatacgtgcacgcatggtgacaatgcgcgctttgccttcttgcaggtggatgagctgagggggaagctgaacgagcggcaagaccagagcggcagctgcgacggcggcggcgccgaaggggacgacgacgacaagaggaatagcgtgatgaacgcgagcagcagcggcctcgtggaggaggactacgtgagctgcctcgcggtgccggtggtggacgtctcggaggacggctcggcggcgtgcggcgggtcgtcgtacgagtacgaccatcacctagactacttgggcggcggccagctgcccgatccgttctgcggcatgccggatctgtgggagatatggccaatggtggaatggaacgcagtagcatga

SEQ ID NO: 12079 - DNA, 2616 bp, Oryza sativa
  Clone ID: TFbOSC11879j.C1.o12.fg
atgagcttcggtggcatgttcgatggcgccggctccggcgtcttctcctacgacgccggcggcggcggcggcggcggcggagtacacaactcccgcctcctccctacgccgcccgtccccaagcccggcggcgggttcgccgctcccggcctctctctcggcctgcaaactatggacggtagccagctcggcgacgtgaaccggtcgcttgccatgatgggcaacggcgggagcggcagcggcggcgacggcgactcgctgggacgcggccgggaggaagagaacgacagccgctccggcagcgacaacctggacggcgcctccggcgacgaactcgacccggacaacagcaacccgcgcaagaagaagaagcgttatcaccgccacaccccgcagcaaatccaagaactcgaagccgtgttcaaggagtgtccacatcctgacgagaagcaacggatggagctcagccggcggctcaacctcgagagccgccaggtcaagttctggttccagaatcgccgcacccagatgaagacgcagatcgagcggcatgagaacgcgctgctgcggcaggagaacgacaagctgagggcggagaacatgacgatccgggaggcgatgaggaacccgatgtgcgcgagctgcggcggcgcggcggtgctcggcgaggtgtcgctggaggagcagcacctgcgcatcgagaacgcgcggctcaaggacgagctcgaccgcgtctgcgcgctcgccggcaagttcctcggccggccaatctcgagcatctcctccccgggcccgccgtcgctgcaggcgtgctccggcctcgagctcggcgtcggcagcaacggcgggttcgggctcggcgcgctcggggcctcggcggcgatgcagtccatccccgacctgatgggcggctcctccggcctgacgggggggcccgtgggctccgccgccatgcgcctacccgcgggcattggcggcctcgacggcgccatgcacgccgcggcggccgacggcggcgccatcgaccgcgccgtgctcctggagctcgccctcgcggccatggacgagctcgtcaaggtggcgcagatggacgagccgctctggctccccagcctcgacggcgggttcgagacgctcaactacgacgagtaccaccgcgcgttcgccagggtggtcggccagtgccccgccggctacgtctccgaggcgacgcgcgagtccggcatcgccatcatcagcagcgtcgacctcgtcgacagcctcatggacgcgccacggtggtcggagatgttcccgtgcgtggtggcgagagcgagcaccacggacatcatctccagcggcatgggcggcacgcgcagcgggtcaattcaactgatgcacgcggagctgcaggtgctgtcgccgctggtgccgatacgggaggtggtgttcctgcgtttctgcaagcagcacgccgagggcctctgggcggtggtcgacgtctcggtcgacgccgtcctccgccccgaccagaacggcggcggcgggtcgtcgtcgtcgtcgtacatgggctgccgcctcctccccaccggctgcatcgtgcaggacatgaacaatggctactccaaggtcacgtgggtggttcacgcggagtacgacgagacggcggcgcaccagctctaccggccgctgctccgctccggccaggccctcggcgcccgccgctggctcgcctcgctccagcgacagtgccagtatctcgccatcctctgctccaactccctccccgcccgcgaccacgctgcgataacgccggtggggaggaggagcatgctgaagctggcgcagcggatgacggacaacttctgcgcgggggtgtgcgcgtcggcggcgcagaagtggcggcgcctggacgagtggcgcggcgagggtgggggcggcggcggtggcggcggcggggacggggaggacaaggtgcggatgatggcgcggcacagcgtgggcgcgccgggggagccgccgggcgtcgtgctgagcgccaccacgtcggtgcggctccccggcacgctgccgcagcgcgtgttcgactacctccgcgacgagcagcggcgcggcgactgggacatccttgccaacggcgaggccatgcaggagatggaccacatcgccaagggccagcaccacggcaatgccgtctccctcctccgtccaaatgccacaagcgggaaccagaacaacatgctgatcctccaggagacgtgcaccgactcatcgggctccctcgtcgtctacgctccggtggacgtgcagtcgatgcacgtcgtcatgaacggcggcgactccgcctacgtctccctcctcccctccggcttcgccatcctccccgacggccacaacaatggcgcctcgccgtctccggcagaggtcggcagcggcgcctcgccgaactccgccgccggtggcggtggcggtagcaacaacaccgggtcgctggtgacggtggcgttccagatactcgtcaacaacctgccgacggcgaagctcaccgtggagtccgtcgacaccgtcagcaacctcctctcctgcaccatccagaagatcaagtcggcactgcaggccagcatcatctcaccatag

SEQ ID NO: 12080 - DNA, 1056 bp, Oryza sativa
  Clone ID: TFbOSC400138j.C1.o4.fg
atggccagcaatggcgccgccgccggcgccatggccccgttcttcccgcccaacttcctcctccagatgcagcagcctctccccctccaccaccagcacctccaggaccacgcccatggcggccacggcggccaccacctcctccctcctcctcctccctccctctcccccttcctccccgacctcgccatggacgcgccgccgccgccaatgtacgaggcgagcggcggcgatggcggcggcggaggggcggcgtcggaggatgaggaggatgggtgtggagggggagggggtgggggtggtggggagaagaagaggaggttgagcgtggagcaggtgaggacgctggagcggagcttcgagtccgggaacaagctggagccggagcggaaggcgcagctggcgcgcgcgctggggctgcagccgcggcaggtggccatctggttccagaaccgccgcgcgaggtggaagacgaagcagctcgagaaggacttcgacgccctccgccgccagctcgacgccgcccgcgccgagaacgacgccctcctctccctcaactccaagctccacgccgagatcgtggcgctgaaggggggagcggcggcggcggggggaggagggagcagctgcaggcaggaggcggcgtcggagctgatcaacctcaacgtcaaggagacggaggcgtcgtgcagcaaccgcagcgagaacagctccgagatcaacctcgacatctccaggccggcgccgccgccgccgccgccgccggccaacgagagccccgtcaaccgaggcatcccgttctacgcctccatcggccgcggcggcgcaggcggcgtggacatcgaccagctgctcctccgcggcggccactcgccgtccccggctgccgtgacgacgccgccgccgcccaagatggagctcgggattacaggcaatggcggcggcgcggacgccgccgccgccggcgcgggcagcttcggcggcctgctctgcggcgccgtcgacgagcagccgccgttctggccgtgggccgacggccaccaccacttccattaa

SEQ ID NO: 12081 - DNA, 2616 bp, Oryza sativa
  unsure (1)..(2616): unsure at all n locations
  Clone ID: TFbOSC900153j.C1.o15.fg
atgagcttcggtggcatgttcgatggcgccggctccggcgtcttctcctacgacgccggcggcggcggcggcggcggcggagtacacaactcccgcctcctccctacgccgcccgtccccaagcccggcggcgggttcgccgctcccggcctctctctcggcctgcaaactatggacggtagccagctcggcgacgtgaaccggtcgcttgccatgatgggcaacggcgggagcggcagcggcggcgacggcgactcgctgggacgcggccgggaggaagagaacgacagccgctccggcagcgacaacctggacggcgcctccggcgacgaactcgacccggacaacagcaacccgcgcaagaagaagaagcgttatcaccgccacaccccgcagcaaatccaagaactcgaagccgtgttcaaggagtgtccacatcctgacgagaagcaacggatggagctcagccggcggctcaacctcgagagccgccaggtcaagttctggttccagaatcgccgcacccagatgaagacgcagatcgagcggcatgagaacgcgctgctgcggcaggagaacgacaagctgagggcggagaacatgacgatccgggaggcgatgaggaacccgatgtgcgcgagctgcggcggcgcggcggtgctcggcgaggtgtcgctggaggagcagcacctgcgcatcgagaacgcgcggctcaaggacgagctcgaccgcgtctgcgcgctcgccggcaagttcctcggccggccaatctcgagcatctcctccccgggcccgccgtcgctgcaggcgtgctccggcctcgagctcggcgtcggcagcaacggcgggttcgggctcggcgcgctcggggcctcngcggcgatgcagtccatccccgacctgatgggcgggtcctccggcctgacgggggggcccgtgggctccgccgccatgcgcctacccgcgggcattggcggcctcnacggcgccatgcacgccgcggcggccgacggcggcgccatcgaccgcgccgtgctcctggagctcgccctcgcggccatggacgagctcgtcaaggtggcgcagatggacgagccgctctggctccccagcctcgacggcgggttcgagacgctcaactacgacgagtaccaccgcgcgttcgccagggtggtcggccagtgccccgccggctacgtctccgaggcgacgcgcgagtccggcatcgccatcatcagcagcgtcgacctcgtcgacagcctcatggacgcgccacggtggtcggagatgttcccgtgcgtggtggcgagagcgagcaccacggacatcatctccagcggcatgggcggcacgcgcagcgggtcaattcaactgatgcacgcggagctgcaggtgctgtcgccgctggtgccgatacgggaggtggtgttcctgcgtttctgcaagcagcacgccgagggcctctgggcggtggtcgacgtctcggtcgacgccgtcctccgccccgaccagaacggcggcggcgggtcgtcgtcgtcgtcgtacatgggctgccgcctcctccccaccggctgcatcgtgcaggacatgaacaatggctactccaaggtcacgtgggtggttcacgcggagtacgacgagacggcggcgcaccagctctaccggccgctgctccgctccggccaggccctcggcgcccgccgctggctcgcctcgctccagcgacagtgccagtatctcgccatcctctgctccaactccctccccgcccgcgaccacgctgcgataacgccggtggggaggaggagcatgctgaagctggcgcagcggatgacggacaacttctgcgcgggggtgtgcgcgtcggcggcgcaaaagtggcggcgcctggacgagtggcgcggcgagggtgggggcggcggcggtggcggcggcggggacggggaggacaaggtgcggatgatggcgcggcacagcgtgggcgcgccgggggagccgccgggcgtcgtgctgagcgccaccacgtcggtgcggctccccggcacgctgccgcagcgcgtgttcgactacctccgcgacgagcagcggcgcggcgactgggacatccttgccaacggcgaggccatgcaggagatggaccacatcgccaagggccagcaccacggcaatgccgtctccctcctccgtccaaatgccacaagcgggaaccagaacaacatgctgatcctccaggagacgtgcaccgactcatcgggctccctcgtcgtctacgctccggtggacgtgcagtcgatgcacgtcgtcatgaacggcggcgactccgcctacgtctccctcctcccctccggcttcgccatcctccccgacggccacaacaatggcgcctcgccgtctccggcagaggtcggcagcggcgcctcgccgaactccgccgccggtggcggtggcggtagcaacaacaccgggtcgctggtgacggtggcgttccagatactcgtcaacaacctgccgacggcgaagctcaccgtggagtccgtcgacaccgtcagcaacctcctctcctgcaccatccagaagatcaagtcggcactgcaggccagcatcatctcaccatag

SEQ ID NO: 12082 - DNA, 1833 bp, Oryza sativa
  Clone ID: TFbOSC101881j.C1.o2.fg
atggccggcgctagatctgctccaagtgtcgctgccgcccccttacccatgccgctcccgaggcccagcagcagcggatccactctccagaagctcgttggccctgccgccccttcccttgcgccgttgacgctgagagccgcgtttgtctccttccccgcgctgcttccgaggcccggcactagcggatccgccctcccaaggcctgcccgcgccggattccctcctcggtgccccctctcccatgcctctactgccgcccccttccccacgcagccaccctttccctcatcattgccattgcccagctcgacccgctttggccagccagatccactagcagggaggttgggtcgccagatccggaagccctctcttatgcgaggcggtactgggcggcggtggagagagaagggacgccggagggaggagggagaagggtgggagagaggtgtagagagaagggaggcggaaggaccgagggaagagggagagagccgaagggagtttggtgggtgttggattttaattgcgtcaaaatttattttgcagtggcgtcctttacctaccgttagcgaaaacccgatttttgctggtggacacttaagaggagtaaaacccatgagctttgggaatcttggaggaggaggaggagcaggggggagcggcaaggcggcggcgtcgtcgttcctgcagctgccgctgtccacggcggcggcggccaccgcgtactacggcacgccgctcgccttgcaccaggcggcggccgcggctggcccgtcgcagtaccacggtcacggtcacccccaccacggcggcggccaccaccacagcaagcacggcggcgccggtggtggggagatctcggcggcggaggccgagtccatcaaggccaagatcatggcgcacccccagtactccgccctcctcgcagcctacctcgactgccagaaagtcggagcgccgccggaggtgctggagaggctgaccgccacggcggcaaagctggacgcccgccctcccggccgccacgacgcgcgcgacccggagctcgaccagttcatggaggcgtactgcaacatgctggccaagtacagggaggagctgacgcggccgatcgacgaggccatggagttcctcaagagggtggagtcgcagctcgacaccatcgccggcggcgcccatggcggcggcgccggctcggcgcgcctcctcctcgccgatggtaaatctgaatgtgttggttcttctgaggatgacatggacccaagtggccgcgaaaacgagccgcctgagatcgacccgcgcgctgaggataaggagctcaagtttcagcttctgaagaagtacagtggctacttgagcagcctaaggcaagaattttccaagaaaaagaagaaaggaaagctgcctaaggaggccaggcagaagctgcttcactggtgggagctgcactacaagtggccttacccctcagagacggagaagattgcgcttgcggaatcgacaggactagatcagaagcagatcaacaactggttcatcaaccagaggaaacggcactggaagccatcggaggacatgccgttcgtcatgatggaaggttttcacccacagaatgctgctgcattgtacatggatggcccgttcatggcagatggaatgtaccgcctcgacggatggttcgaattaaaatcgaaattacttgtgaaattgctggacctggatgttctacttcctagagctgtgaattttatagtttctggatttggtaatcaggcatgcttggtgaagcatttagaaattatgtatacatttccagatgataattaa

SEQ ID NO: 12083 - DNA, 687 bp, Oryza sativa
  Clone ID: TFbOSC401329j.C1.o51.fg
atgggggccacttctccgtcaggcctggagctcaccatggctgtccccggcctcagctcctctggttcagaaggggccggttgcaacaacaacaacgccggtggcggctgcaacatgagggacctggacatcaaccagccggcgagcggcggcgaggaggaggagttcccgatgggcagcgtggaggaggacgaggaggagaggggcgtcggtgggccccaccgccccaagaagctccgcctctccaaggagcagtcccgcctcctcgaggagagcttccgcctcaaccataccctcacgccgaagcaaaaggaggccttggcgatcaaactgaagctgcggccgaggcaggtggaggtctggtttcagaaccgtagggcaaggacgaagctgaagcagacggagatggagtgcgagtacctgaagcgctgcttcgggtcgctgacggaggagaaccgccggctgcagcgggaggtggaggagctgcgggcgatgcgggtggccccgcccacggtgctctcgccgcacaccaggcagccgctcccggcgtccgcgctcaccatgtgcccccgctgcgagcgcatcaccgccgccaccggcccgcctgccgtgcgcccgccgccgtcgtcagccgccgccgccgccccctcgcccttccaccctcgccgcccctctgcggccttctag

SEQ ID NO: 12084 - DNA, 984 bp, Oryza sativa
  Clone ID: TFbOSC21192j.C1.o3.gm
atggagcagaaagatgaagccgagatggaggaggtggacgaggaggaggaggaggaggtcgacgaagacatggccggcgggcacgcggcgcagtcgccgtcgccgtcgtgcgggctgggcgagaagaagcggcggctggcgctggagcaggtgcgcgctctggagcggagcttcgacacggacaacaagctggacccggaccgcaaggcccgcatcgcgcgcgacctcggcctgcagccgcgccaggtcgccgtctggttccagaaccgccgcgcccggtggaagacgaagcagctcgagcgcgacttcgccgccctccgcgcccgccacgacgccctccgcgccgactgcgacgccctgcgccgcgacaaggacgccctcgccgccgagattcgggagctgagggagaagctgcccaccaagccggcggacacggcggcatcggtgaaggtagaagccggcaatgacgcggcggccggcgccgcggccgccacggtgtgcaaggacggctcgtcggacgacagcgactccagcgtggtgttcaacgacgaggcgtcgccgtactccggcgcggccttcattggattcggcccgtcgttcttggtcgacgacgcgtcggcggcaaccgtgggctgctcgtcgtcgctccccgcgctcgagtccaaatggcacggtccgtactccgacgactcgtgcaaaggcggcgtctatggcttcacggaggaatggctcgctgcctgctccggcgagatggccggcaacgacgccgccggcttcttctccgacgagcacgcctccaacctcaacttcggttgggatcgcctcatctccttcagctttggctcaacgatgcccaggatccacctcggcatggatggataccgctacgccaagtctgagctctcccatgatcatggtggcataagagaggagggggatgtagtggtggcggcagccggcagtgcttggtttggcactgcctag

SEQ ID NO: 12085 - DNA, 1035 bp, Oryza sativa
  Clone ID: TFbOSC412751j.C1.o2.fg
atggagtccggccggctcatcttcagcacggcgggctccggcgccgggcagatgctcttcttggactgcggcgctggcggcggcggcgtcggcggcggggccatgttccatcgaggggcgagaccggtgctcggcatggaggaaggagggcgcggcgtcaagcggcccttcttcaccacccccgacgagctcctcgaagaggagtactacgacgagcagctcccggagaagaagcggcgcctcacgccggagcaggtgcatctgctggagaggagcttcgaggaggagaacaagctggagccggagcggaagacggagctggcgcggaagctagggctgcagccgcggcaggtcgccgtgtggttccagaaccgccgcgcgcgctggaagaccaagcagctcgagcgcgacttcgaccgcctcaaggcgtcgttcgacgccctccgcgccgaccacgacgccctcctccaggacaaccaccgcctccactctcaggtcatgtcgttgaccgagaagctgcaagagaaggagacgacgaccgagggcagcgccggcgcggccgttgacgtcccgggcttgcctgcggcggccgacgtgaaggtcgccgtcccggacgccgaggaaccggcgctggaggaggcggcggcggcgttcgaggagcagcaggagcagcaggtgaaggccgaggacaggctgagcacgggcagcggcgggagcgcggtgtgtgaacacggacgcgccaactgggtggtcgggtgcggccggcagcatctcgccgccgtggacagcagcgtggagtcgtacttcccgggcggcgacgagtaccacgactgcgtgatgggccccatggaccacgccgcggggggcatccagtcggaggaggacgacggcgccggcagcgacgagggctgcagctattacgccgacgacgccggcgtcctcttcgccgaccacggccaccaccaccaccaccaacacgcggacgacgacgaggaggacggccagcagatcagctgctggtggatgtggaactag

SEQ ID NO: 12086 - DNA, 1032 bp, Oryza sativa
  Clone ID: TFbOSC900058j.C1.o14.fg
atggagtccggccggctcatcttcagcacggcgggctccggcgccgggcagatgctcttcttggactgcggcgctggcggcggcggcgtcggcggcggggccatgttccatcgaggggcgagaccggtgctcggcatggaggaaggagggcgcggcgtcaagcggcccttcttcaccacccccgacgagctcctcgaagaggagtactacgacgagcagctcccggagaagaagcggcgcctcacgccggagcaggtgcatctgctggagaggagcttcgaggaggagaacaagctggagccggagcggaagacggagctggcgcggaagctagggctgcagccgcggcaggtcgccgtgtggttccagaaccgccgcgcgcgctggaagaccaagcagctcgagcgcgacttcgaccgcctcaaggcgtcgttcgacgccctccgcgccgaccacgacgccctcctccaggacaaccaccgcctccactctcaggtcatgtcgttgaccgagaagctgcaagagaaggagacgacgaccgagggcagcgccggcgcggccgttgacgtcccgggcttgcctgcggcggccgacgtgaaggtcgccgtcccggacgccgaggaaccggcgctggaggaggcggcggcggcgttcgaggagcagcaggagcagcaggtgaaggccgaggacaggctgagcacgggcagcggcgggagcgcggtggtggacacggacgcgcaactggtggtcgggtgcggccggcagcatctcgccgccgtggacagcagcgtggagtcgtacttcccgggcggcgacgagtaccacgactgcgtgatgggccccatggaccacgccgcggggggcatccagtcggaggaggacgacggcgccggcagcgacgagggctgcagctactacgccgacgacgccggcgtcctcttcgccgaccacggccaccaccaccaccaccaacacgcggacgacgacgaggaggacggccagcagatcagctgctggtggatgtggaactag

SEQ ID NO: 12087 - DNA, 753 bp, Oryza sativa
  Clone ID: TFbOSC401108j.C1.o35.fg
atggagtgggacaaggccaaggcgtcctccggcgaggcggtggacgacaggggcggaggggaaggagggctcgggtacgtgaaggtgatgacggacgagcagatggaggtgctccggaagcagatctccatctacgccaccatctgcgagcagctcgtcgagatgcaccgcgccctcaccgcgcagcaggactccattgcaggaatgaggcttggtaatctgtactgtgatcctctaatggttcccggaggtcacaagatcacagcaaggcagcgatggacaccaaccccaatgcagttgcagattcttgagaacatctttgaccaaggcaatggaacaccaagcaagcaaaagataaaggacataacagcagagctctcacagcatggccagatctcagagacaaatgtctataactggttccagaacaggcgggcacgatcgaaacggaagcaagctgctttaccaaataataatgcagaatctgaagctgaagcggatgaggagtccccaactgacaaaaaacccaaatcagataggccgcttcaccagaacatagccatgagagatcacaatagcgaaaggatctcggagatgcaccactttgacacggagcatgagcaaatccgtcgtatgatgtatgcatccaatgacagtagctcgcgatcgtcaggcagtttgggccagatgtccttctacgacaatgttatgtcaaatccaagtacctcctacaaacacccttgcttcatttga

SEQ ID NO: 12088 - DNA, 963 bp, Oryza sativa
  Clone ID: TFbOSC900132j.C1.o22.fg
atggcggcttcgtcggaggtgtcgatcgacccagatcagtggttctatatatatagcttggaacgcgttgcttacgtgtgtgaacgtgtaggctcaccggtgatggaggaggccgagctgcggcggcggcggcggaagaggccgttcctgacgacgacgcacgacgagctggagctccagatggaggacctcgtcgacgagctgtacggcgtcgacgagcaggggtcgtcgtcagcggcggcgaggaagcggcggctgacagcggagcaggtgcgagcgctggagcggagcttcgaggaggagaagcggaagctggagccggagcggaagagcgagctggcgcggcgtctcgggatcgcgccgcggcaggtggccgtgtggttccagaaccgccgcgcgaggtggaagacgaagcagctcgagctcgacttcgaccgcctccgggccgcccacgacgagctcctcgccggccgcaccgcgctcgccgccgacaacgagagcctccgatctcaggtgatcctattaaccgagaagctgcaagctaatgggaagtcaccgtcaccgtcgccggcgccggcggagcaaaccgccgtgccagccgcacctgaaagcgccaagtcgtttcagctcgaagaaggtcgccgcctctacgacgccgccgggagcaccaccaccaccaacggcggcggcggcggcgtcgcgatgccggcggcgcgcgtggcggcggcaagagcggccagcaacgacagccccgagtcctacttcgccggcgctcgctcgccgccctcgtcgtcggaggacgactgcggcggcgccggcagcgacgacgactacccctcttcctccgtcttactcccggtcgacgctacgctcgtcggcgacgccttcgagcacgccgtggcggcgacggtggcggcggatgaggaggcgccgctaaacagctgggagtggttctggaattga

SEQ ID NO: 12089 - DNA, 744 bp, Oryza sativa
  Clone ID: TFbOSC418226j.C1.o10.fg
atgatggagagggccgaggacctgcgcctgagcctcagtctcagctcgccgcttattgctcctcgtactcaccatgtcgccatgctgttccacgctcctccagagaaaagattcctggagatgccgctgctccctgctgcgaagcggagcgaggtcgtcgcggcagaagaggagcgcgcgggcctgcgcggcggcggcggcagcgacgaggaggacggtggctgcggcatcgacggctcacgcaagaagctccggctttccaaggaccagtccgccgtgctcgaggacagcttccgggagcaccccaccctcaaccccaggcagaaggcaactttggcgcagcagctcgggcttcggcctcggcaggtcgaggtgtggtttcagaacagacgcgcaaggacgaagctgaagcagacggaggtggactgcgagttcctgaagcgctgctgcgagacgctcacggaggagaaccggaggctgcagaaggaggtgcaggagctgcgagcgctcaagctcgtctcgccgcacctctacatgaacatgtccccgcccaccacgctcaccatgtgcccctcctgcgagcgcgtctccaacaccaataacaactccagcgccgccgccgccgccgaccgccgcggcatcaggactactactgccgcaggcggcggcagcgtcgtcgacaccgccgccgacgggggcatcctctgccaccgcccgatcgccgtccggccgcagcagtcatga

SEQ ID NO: 12090 - DNA, 936 bp, Oryza sativa
  Clone ID: TFbOSC422332j.C1.o24.fg
atggagatgatggttcatgggaggagagacgagcagtatggcgggctcaggctcgggcttgggcttgggctcagcctcggcgtcgccggtggtgcagccgacgacgagcagccgccgccgcgccgtggtgccgccccgccgccgcagcagcagctgtgcggctggaacggcggcggtctcttctcctcgtcttcctccgatcatcgggggaggtcggcgatgatggcgtgccacgacgtcatcgagatgccgttcctgcgggggatcgacgtgaaccgtgcgccggcggcagagacgaccacgacgacggcgagggggcccagctgcagcgaggaagacgaggagcccggcgcgtcctcccccaacagcacgctctccagcctcagcggcaagcgcggcgcaccatctgccgccaccgccgccgccgccgccgccagcgacgacgaggactccggcggcggatcccgcaagaagctccgcctctccaaggaccaagccgccgtcctcgaggacaccttcaaagagcacaacaccctcaatcccaagcagaaggcggcgctggcgaggcagctgaatctgaagccgcggcaggtggaggtgtggttccagaacaggagggcgaggacgaagctgaagcagacggaggtggactgcgagctgctcaagcgctgctgcgagacgctcaccgacgagaaccgccgcctccaccgcgagctccaggagctccgcgccctcaagctcgccaccgccgccgccgcgccgcaccacctctacggcgcccgcgtcccgccgcccaccaccctcaccatgtgcccctcctgcgagcgcgtcgcctccgcagccaccaccacccgcaacaactccggcgccgcccccgcgcggccggtgcccacccgcccgtggccgccggcggcggcgcagaggtcgtcggcgtag

SEQ ID NO: 12091 - DNA, 2922 bp, Oryza sativa
  Clone ID: TFbOSC900395j.C1.o10.fg
atggggatggtacgaaagataggccgagctggtcgtgaggcagacgcctcctcctcccccgagctcctccccggtccagcccagccagccagccggaccagccaggacggttcccttccacctactgtaacaccattgaagcgcctcaatattcgtgtggagcaagccgctgacgccgcccccaccgtcggatccgcggtcgggccccacatccgccgttcactgggccgccggacccaccgcccacgccgcggccagtggctacgcgctgcattaacgcccgcctccataacctcccccctcctcatcccggatctacgcgtgcgtggggcgaaagacactgaccgtgggcccttcggctaccgtggggcccagcgtcatggactggctaggctagggagctctgaatcgggttgtgaggcgtgtgggaggggcggggtagatccaaggaagaggactttctcgagtttacgccgtggtgttttgcttcggcgaggaggcggcggcatgagctttgggggcctctttgacggcggcggcgggggaggcatgcagttccctttcgccagtggcttcgcgtcctcgccggcgctctccctcgcgctggacaacgccggcggtggcatcggcgggcggatgctcggcggcggcgctggcgctggttctagcgcgggcggcgcgatgacgagggacactgaggcggagaacgacagccggtcgggaagcgaccatctcgacgccatctcggccgccggcgaggacgacgtcgaggacgccgagcccagcaactcccgcaagaggaagaagcgataccaccgccacacgccgcagcagatccaagagctcgaagcgctgttcaaggagtgcccccatccggacgagaagcagcgcgccgagctcagcaggaggctctccctcgatgcgcggcaggtcaagttctggttccagaatcgccgcacgcagatgaagacgcaactggagcggcacgagaacgcgcttctcaagcaggagaacgacaagctgcgcgccgagaacatgacgatccgggaggcgatgcgcagcccaatgtgcggcagctgcgggagccccgccatgctcggggaggtgtccctagaggagcagcacctgcgcatcgagaatgcgcgcctcaaggacgagctcaaccgcgtgtgcgccctcgccaccaagttcctaggcaagcccatctccctcctgtcgccgccgcccttgctgcagccgcacctctcgctgcctatgcctaactcgtcgctggagctagcgatcggaggcatcggtggcttagggtctctcggtacactacccggctgtatgaatgagttcgccggaggcgtgtcgagcccgatgggcacggtgatcacgcctgcgcgcgcaaccggggctgctataccatcgctggtgggtaacatcgacaggtccgtgttcttagagcttgcaatcagcgcgatggacgaacttgtcaagatggcacagatggacgatccattgtgggttccggcactgcctggttctcccagcaaggaggtgctcaactttgaggagtatcttcactccttcctaccgtgcattggcatgaagcctgccggctacgtctctgaggcctcgagggaatccggtctagtcatcatcgacaacagccttgcccttgtagagaccctcatggatgagagacggtggtctgacatgttctcgtgcatgattgctaaggcaacagtgcttgaggaggtgtctaccggcattgcaggaagcagaaatggcgcgttgctgctgatgaaggctgagctacaggtgctctcacctctagtaccaattagggaggttacatttctccggttttgtaagcagctggctgagggtgcatgggcagtagttgatgtgtccattgatggtttagtgagagatcataattctggaacggcacccacaggtggaaatgtgaagtgtaggagggtaccttccggctgtgtgatgcaagacactcccaatgggtattgcaaggtcacatgggttgagcatacggaatacgatgaggcatcagtgcaccagctctaccgtccactccttcggtctggtctcgcctttggcgccaggcgttggcttgcgacgctgcagcgccaatgcgaatgccttgccatcctcatgtcctctgctacagtgacagcaaatgactcgactgctatatcgcaagagggcaagcgaagcatgctgaagctggcacgccggatgacggagaacttctgtgctggggtgagcgcatcgtctgcacgtgaatggagcaagctggatggtgcgaccggtagcatcggggaggacgtgcgcgtgatggcacggaagagcgtgagcgagcctggagagccaccgggcgtggtgctgagcgcggccacctcggtgtgggtgcccgtggctccggagaagctcttcaacttcctgcgcgatgagcagctgcgtgcggagtgggacatcctcagcaatggaggccccatgcaggagatgacccagatcgccaaggggcagcgggatgggaactcggtttcactcctcagggccagtgctgtgagtgccaaccagagcagcatgctgatacttcaggagacgtgcaccgacgcttctggctccattgttgtgtacgctccggtagacatcccggcaatgcagcttgtcatgaatggtggcgactccacctatgttgctctgcttccatccggattcgccatcctgcccgatgggcctcgcatcggcgccaccgggtacgagacgggcggctctctgctcaccgtggcgttccagattcttgtcaacaaccagcccaccgccaagctcaccgtggaatcggtcgagaccgtgaacaatctcatctcctgcaccatcaagaagatcaagacggcgctgcagtgcgacgcctga

SEQ ID NO: 12092 - DNA, 2568 bp, Oryza sativa
  Clone ID: TFbOSC417639j.C1.o20.fg
atggcagcggcggcggtggggggaaggggggagaggctgtcgtcctcctccccgacggcggcggcgccgcaggtggacgccgggaagtacgtccggtacacgcccgagcaggtggaggcgctggagcgggtgtacaccgagtgccccaagcccagctcactccgccgccagcagctcatccgggagtgccccatcctcagcaacatcgagcccaagcagatcaaggtctggtttcagaatcgcagatgccgggagaagcagcgcaaggaggcctcccggctgcaaactgtgaaccggaagctgaatgcgatgaacaagctgttgatggaggaaaatgaccggctgcagaagcaggtgtcccgtctcgtctacgagaacggctacatgcggactcaactgcacaatccttctgcagccaccacagatacaagctgtgagtctgtggtgacaagtggtcagcaccatcaacagcaaaacccagcagttctgcatccgcaaagggatgcgaacaacccagcaggtcttctcgctattgctgaggagaccttggcagagttcatgtcgaaggcgacaggaactgctgtcgaatgggtgcaaatggttgggatgaagcctggtccggattccattggaatcatcgctgtttcgcacaattgcagtggcgtagcagcacgagcttgcggcctggtgagccttgagcccacaaaggttgcagagatcctcaaggatcgcccctcttggtaccgtgattgccgatgcgtagatatcatccatgttatccctacgggtaacggcggaaccattgagctaatctacatgcagacatatgcaccgacaactttggcggcaccacgcgacttttggactctccgctacacaagtggacttgaagatgggagtcttgtgatctgtgaaaggtcattgactcagtccactggtggcccatctgggcctaacactccgaattttatcagagccgaggtacttcccagtggttatctgattcgaccatgtgagggaggtggctccatgatttacattgttgatcatgttgatttggatgcttggagtgtgcctgaggttcttcgaccgctctatgaatctccaaagatccttgcacagaagatgaccattgcagcattgcgacacattaggcaaattgcgcatgagtcaagcggtgaaatcccctacggtgctggtcgccagcctgctgttttcaggaccttcagtcaaaggctcagcagaggtttcaatgatgctgttagtggatttccagatgatgggtggtctttgttgagcagtgatggtagtgaggacattacaatttcagtaaactcgtctccaaacaagcttgttggatcccatgtcagcccgaaccctctgttttctactgttggaggtggcatcttgtgcgcaaaggcatcaatgctacttcagaatgtacctcctgctctacttgtgcgatttctgagggagcatcgttctgaatgggctgatcctggtgttgatgcttattctgctgcttctttgcgagccagcccatatgcagttccaggcttaaggaccagcgggtttatgggcagtcaggttatactacccctcgctcataccttagagcatgaagagttcttggaggttattaggctcgaaggacatggtttcagccatgatgaggtgcttctatcacgggatatgtaccttctacagctttgcagcggggttgatgagaatgctactagtgcatctgcacagcttgtctttgctcctattgacgaatcttttgctgatgatgcaccacttttaccctcaggattccgtgtgataccactagatacaaaaatggatgggccatctgcaacacgcacgctcgaccttgcatccgcccttgaggttggaccaggtggagcttcgcgtgcttcagttgaagcatctggcacatgtaacagatcagtcctgaccattgctttccaattctcatacgagaaccaccttcgtgagagcgtggcggcaatggctaggagttatgtcagagctgtgatggcatccgtgcagagggtggctgtggcaatagctccttctcgacttggaccccagatcggaatgaagcaccctccagcctctcctgaggcgcttacacttgctagctggattggtaggagctatagggctcacaccggagcagatatccgttggtctgataccgaagatgccgattctcccctggcgctcctgtggaagcacagcgacgcaatactgtgctgttctctgaagcctgctcctatgttcaccttcgccaacaatgccggcctcgacatccttgagacgacgctggtcaacctccaggacatctcgctcgagatgatcctggatgacgagggccggaaggcgctgtgctcggagttccccaagatcatgcagcagggtttcacctatctccctggaggcgtctgcaagtcgagcatggggcggcaggcatcgtatgagcaggcggtggcgtggaaggttcttagcgacgacgacgcgccgcactgcctcgccttcatgctcgtcaactggaccttcatgtga

SEQ ID NO: 12093 - DNA, 771 bp, Oryza sativa
  Clone ID: TFbOSC413762j.C1.o6.fg
atggaaggagaggatctaggttcatggcttggtctcgggatcggcggcggcggttacgcatacggcggcgacgattgccggaggtcaccgtcgtctccgtcgccggtgcagatgttgttctcccagcatgtcaaggaagagatcacgaggggatatgatcatggccgtgatgaagaacaagcttcagggagcaagatcatgaagggagagagaggtgcaaggctaagggtgatgaggtccatcaggaacagcggcggcgacggtagccgctcgcgtgtactgagcctcggcgacgacggcggcgatggcggcagcggcggcggcggcggtggcggcacgaggaagaagctccagctcaccaaggagcagtcgaccttgctcgaggacagcttccgcgtccacaacattctttctcatgctcagaagcacgagctcgctcgtcagctgaaactgaagccgagacaggtcgaagtgtggttccaaaatagaagagccaggacgaagctgaagcagactgaggtggactgcgagttcttgaagcgatgctgcgagagcctgaccgaggagaacaagcagctcaagcatgagctcatggagctgcgtcggctggcttcgccggcggcggcggcggccggctcgcagctctacgtccagttcccgagggcggcggcggcggcgatggtgaacgtctgcccgtcctgcgagaaggtcaccgtgatgggcggcggcggcggcgagacgggaaagagctcctccagctatagctcttaa

SEQ ID NO: 12094 - DNA, 2250 bp, Oryza sativa
  Clone ID: TFbOSC900292j.C1.o25.fg
atgcagagcttgttggatggacaccaccatcagctgccatcactgctgcagcagcaccacaatggacaccatctgcttgatcagcaccagcagcatcagcatcagcttcccccacaggcgacgacgacgagcgagagcgacggccgtgcccctcgcgacgagctggagatgagcaagtccggtggcagcgacaacctggagagcggcggtggcggtggcggaggtggctccggtggtgatcaggaccccaaccagcgcccccgcaagaagcgctaccaccgccacacccagcaccagatccaggagctcgaggccttcttcaaggagtgcccccaccctgatgacaagcagcgcaaggagctcagccgcgagctcggcctcgagcccctccaggtcaagttctggttccagaacaagcgcacccagatgaagacgcagcatgagagacacgagaacaatgcgctgcgcgcagagaacgagaagctgcgggcagagaacatgaggtacaaggaggcgcttgccaacgcgtcctgccccaactgcggcggtccggccgccatcggcgagatgtccttcgacgagcaccacctccgcctcgagaacgcgcgcctccgcgacgagattgacaggatctccgccatcgccgccaagtacgtcggcaagcccgccgcggccgtctcggccgcgtacccgccgctgccgccgtcgaacaggtcgccgctcgatcatatgggcattcccggcgctggcgccgacgtgttcggcgccgacttcgacaagccgctcgtcatcgagctcgccgtggccgccatggaggagctcgtcaggatggcgcagctcggcgagccgctctgggcgccggcgctcggcggcgaggcgctcggcgaggaggagtacgcgcgcacgttcccgcgcgggctagggcccaagtcgccggagctccggtcggaggcgtcgagggagacggcggtggtgatcatgaaccacgtcagcctcgtggagatgctcatggacgtcgggcagtggacggcgctcttctcgagcatcgtgtcgcgcgcggcgacgctggaggtgctctcgacgggcgtcgccggcaaccacaacggcgcgctgcagctcatgtccgccgagttccagatgccgtcgccgctggtgccgacgagggagacccagttcctgcgctactgcaagcagcaccccgacggcacgtgggccgtcgtcgacgtctccctcgacgggctccgcgccggcgccgggggcggatgccagccggcggcggcgcgcggccaccggcgccgcccctccggctgcctcatccaggagatgccgaacggctactccaaggtgacgtgggtggagcacgtggaggccgacgaccagatggtgcacaacctgtacaagccggtggtgaactccggcatggcgttcggcgctcgccggtgggtggcgacgctggagcggcagtgcgagcgcctggctagcgccatggcgagcaacgtggcgtcctcgggcgacgccggcgtgatcacgacgtcggaggggaggcggagcatgctgaagctggcggagcggatggtggcgagcttctgcggcggcgtgacggcgtcgacgacgcaccagtggacgacgctctccggcagcggcgccgaggacgtccgcgtcatgacgcgcaagagcgtcgacgaccccggccgccctcccggcatcatcctcaacgccgccacctccttctggctccccgtcccgccttcccgcgtcttcgacttcctccgcgacgactccacccgcagcgagtgggacatcctctccaatggcggcgtcgtccaagaaatggctcacatcgccaatggccgcgaccacggcaacgccgtctccctcctccgcgtcaacaacgcgaactcgaaccagagcaacatgctgatactgcaggagtgctgcacggacgcgacggggtcgtacgtgatatacgcgccggtggacgtggtggcgatgaacgtggtgctcaacggcggcgacccggactacgtggcgctgctgccgtcggggttcgccatcctccccgacgggccggacggcggcggcgggtcgctgctgacggtggcgttccagatactggtcgactccgtgcccaccgccaagctgtcgctcggctccgtcgccaccgtcaacagcctcatcgcctgcaccgtcgagcgcatcaaggccgccatcaccggcgacaacggcgtcgcgccgccatgcccacggtga

SEQ ID NO: 12095 - DNA, 720 bp, Oryza sativa
  Clone ID: TFbOSC400277j.C1.o16.fg
atgagccgtgaggaggatgagaagctgctgttcccttcgttcgccttcccggcggagtgcttcccggaagccgccacctccggtggcgagcagaagaaggctcggcagcggcggaggaggaaggtgaagccggaagcggcggcagcgttggctggagagagcggaggggatgagcaggcgaagaagcggcggctgagcgacgagcaggcgcggtttctggagatgagcttcaagaaggagcggaagctggagacgccgcgcaaggtgcagctcgccgcggagctgggcctcgacgccaagcaggtcgccgtctggttccagaaccgccgcgcccgccacaagagcaagctcatggaggaggagttcgccaagctccgctccgcccacgacgccgtcgtcctccagaactgccacctcgagaccgagttgctgaagctgaaggagaggctggcggatgtagaggaggagaaggcgaagctagcagctgtcgccgcggcgacgaccggcggcggtggtggcggcggcggcggcagcagcagcccgacctcgtcgtcgttctccacggtgacgtaccacccggcgctggcggggcagttcggcgtggaggcggcggccgaggaggccgacctcacctacatgagtgagtacgcgtacaacagctacatgctggagttggcggcggccggctactgcggcggggtctacgaccaattcagctga

SEQ ID NO: 12096 - DNA, 714 bp, Oryza sativa
  Clone ID: TFbOSC401489j.C1.o8.fg
atggactccgtcgtcgacggcggcctcgacacgcgcctctctctcgccgtcggctgctgcccgccgcggaggaggccggtgttgctgttcggtgaggtgctcccgtcgccggagaagaaggtggcggcggcggcggtggtggctgctgggaagcgaggccgagagcagaggggtgaggctgaggctgaagctacgacgacgaggcagcggcggagctgcaagaagggcaggagggggaggggagacgacgatgacgacgacggtgatcgccggagcccgagcggcggcggcggtgacgaggaaggcgcgagcaggaagaagctccggctcaccggcgagcaggccacgcttctcgaggacagcttccgcgcccacaacatcctctcccatgcggagaagcaggagctggcggggaagctggggctgagcgcgaggcaggtggaggtgtggttccagaacaggagggcgaggacgaagctgaagcagacggaggccgactgcgacctgctccgccgctggtgcgaccacctcgccgccgacaacgcccgcctccgccgcgacctcgccgagctgcgccgctcctcctcctcgccgccggtgtccggcctcgccgtggccacgcccgtcgtctgcccctcctgcgcccacgacgacaagcgccgcctcgccttcgccaccgccgccgccgccgccggcgacatggccagtaactga

SEQ ID NO: 12097 - DNA, 933 bp, Oryza sativa
  unsure (1)..(933): unsure at all n locations
  Clone ID: TFbOSC900242j.C1.o3.np
atggaggatctgtacagcatccacccgggaatctcccgcggcggcggtgggggaggaggaggtgcnnnnnnnnnnnnnnnnnnnnnnnnnnnnnnnnnnnnnnccccggcggatcccccaccgccggcgacgacggcggcggcggcggatctgacggagctgatgaaggcgcagatcgccggccacccgagctacccttccctcctctccgcctacatcgaatgccgcaaggttggtgcgccgccggaggtgaccacgctgctggaggagatcggccgggaggggcgcggcggcggcggcggcgcgacagccggcggggaaattggcctcgatccggagctcgacgagttcatggagacgtactgccgggtgctggagcggtacaaggaagaactcacacggccgttcgacgaggcggcctccttcctcaccggcatccacacccagctcgcctccctctgtggcggcgcgccgccgcccaccgacaactccgatgaaatggtggggtcttcagaggatgagccgtgctcaggagacgccgatgcagcagattttgggcaagaacacagctcccgcttggctgaccatgagctcaaagagatgttgctcaagaagtacagtggctgcctcagccgcctccggtccgagttcttgaagaagaggaagaaagggaaactaccgaaagacgcgcgatcggcacttatggactggtggaacacacattaccgttggccttaccccacggaagaggataaggtgaggctggccgcgatgactggcctcgacccgaagcagatcaacaactggttcatcaaccagaggaagaggcactggaagccatcggaggacatgcggttcgcgctcatggagggggtcaccggaggatcctcctccgggacgacactgtacttcgacaccggcacaattggtcca

SEQ ID NO: 12098 - DNA, 807 bp, Oryza sativa
  Clone ID: TFbOSC400269j.C1.o52.gm
atggcgcaagatgatgaggacgtgggtctagctctgggcctctccctgggctccggcggccacaggcggcagagagaaagtagagacgaagcgccgtcgtcggcggcggcgtccctgctgacgctgaggctcccggcagagagcggggggcagccgcaggtggtggtgaagagggaggtggtgcgggcggaagaggaggagtacgaatacgagtacgagagggcgctctactcgtcgtcggctgcggcggcggacgacgacgagggctgcaacagccggaagaagctgaggctgagcaaggagcagtcggctctgctggaggatcgcttcaaggagcatagcactctcaaccctaagcaaaaggttgctttggcgaagcagctaaacctgaggccaaggcaagttgaggtgtggttccaaaacagaagagccaggacgaagctgaagcagacggaggtggattgcgagcttctgaagcgctgctgcgagacgctgacggaggagaaccgacgcctccatcgtgagctccagcagctcagggctctgacccactccaccgccgccggcttcttcatggccaccaccctccccgtccccgccgccacgctctccatctgcccctcctgcgagcgcctcgccaccgccgccgccgccggagcttcccccaccgccgccgccgaccgcaccaacaagcccaccgccccgcacttgttcagccctttcgccaacgcgcacggcaaggacgggcagtgggcgtgggcggtcggcaaggacggcgacgtggacggcggcgctcaccggcgctga

SEQ ID NO: 12099 - DNA, 966 bp, Oryza sativa
  Clone ID: TFbOSC416036j.C1.o10.fg
atgggcgatgaagaagacctggagcttgtgcttggagtaagagcaactagaagagatgaacaggatgaccagacaacatgcacacaatcatcagaagaagctatggagggagaagaagatgaaactcgccctcatggcgaggctcctgtcgagagcttgagcttccctctgtttgtatcctctgcagagaccggcagtgcgaattcagagatgtgcacacgtggttttgatgtgaacactcggccagcagacggaggcgcagaggcagggaggccttcgtcaccatcttctatgcaggaggcatccacgagacagcaggtagctgatcaggaagctgcagacgatgaggataacggcggtggtggcgcgaggaagaagttgaggctatccaaggaacagtcctcgtttctggaggatagtttcaaagaacacagcaccctgactccgaaacaaaagagtgatttagctaatcggctcaaccttcgaccgcgccaagtggaggtctggttccaaaacagaagagctaggacgaagctgaagcagacggaggtggactgcgagcatctgaagcgctgctgcgagaggctgacgcgggagaaccggcggctgcagagggaggtggccgagctgcgtggcactctccgaaccaccacgtcgtcgtacccgccgctgtacggcctccaccacctaccagctgctgccggcacggtgttccgggtgtgcccttcatgtgagcatagcaaggtcgttgctgcggcagcttctgagagcttctctccgcgcgtcttcgccggcggcggcgcccctgccgccatcaccgctgccgccgccgtgccgtctccgggcgctggctcaccgccgtcgtcgtccgccgctttgttcggcgccagacggcctcattttggccccttcgccgccgccgtcatcccgccggtgctccgccgccagccatcggcgacgtcgtga

SEQ ID NO: 12100 - DNA, 1194 bp, Oryza sativa
  Clone ID: TFbOSC13680j.C1.o2.fg
atggagctggggttgagcttgggggaggctatggcggatgctgggagggagctggttcttgggcttgggatggggaggagggaggaggcggcggaggcggggaggagggatcatgaggtgaggagggagctggagttcgggtcgatgtcgagcaggtgcggtggttcttcgccggagccgacggtgcggctcacgcttctgcccatggtgcccggccttggcctcccatggccgccgccgccgccgccgtcgtccgagagcaggcatttggaggcgtcgacgcggggattcgacgtgaaccgcccgccgtcgtccggcggcggcggcggcggcggcggcgcggaggaggagcaggacgacgtggccggggcggcactctcgtcgtcccccaacaacagcgccggatccttcccgatggatgacttctccgggcacggcctcggcggcaacgacgcggcccctggcggtggcggcggcgaccgctcgtgctcccgcgccagcgacgaggacgacggcggctccgcgcgcaagaagctccgcctctccaaggagcagtccgcgttcctcgaggagagcttcaaggagcacagcaccctaaaccccgtaagcttctcttcctctcatcgatcgaacaccatggcgtcgtcgtcgtcgtcgtcgtcgtctcgctctcctaacgttgcgtctcggttgcgttgtgtcgcgagcagaacagaagctgcgctggcgaagcagctcaacctccggccgcgccaggtggaggtgtggttccagaaccgccgcgccaggacgaagctgaagcagacggaggtggactgcgagtacctgaagcggtgctgcgagacgctgacggaggagaaccggcggctgcagaaggagctcgccgagctccgggcgctcaagacggtgcaccccttctacatgcacctcccggcgacgacactctccatgtgcccctcctgcgagcgcgtcgcctccaactccgccccggccaccgcctcctccgccgcaacatcgtcgacggccgcgccgcccgcggcaccctcatccggcggcattgcggccacctcctcctccgccgccgccgccgcggcgccggaccacaggccgtcgtcgttcgccgcgctgttctcgtcgccgcgtggcttcccgctatccgtagccccgcaggcgcagccgccgacgagctcgtga

SEQ ID NO: 12101 - DNA, 378 bp, Oryza sativa
  Clone ID: TFbOSC100841j.C1.o3.fg
atggacaatggatctcaacaagagtcctctgatctgcatgtgcatcacctccccatcgcaagcatcatcggagtagaggatcgcacagaggaggctgatgatgcagctgtagattaccatgatgatagtagtgaaggccaggatgaggtatcaaacaaacgtatgaaacgtcacactgatgaccaaataaagcatttggaaagtgtgtttgagaggtgcacctatctaggagggaatcaacgtgtacagttggccaagaaacttggcatggaggaaaggcaagtaaaattttggttccagaaccgacgcactcggaagaaggtggcaacctgggtggataagatacaattgtcagttagaaatggagggtctccttga

SEQ ID NO: 12102 - DNA, 2556 bp, Oryza sativa
  Clone ID: TFbOSC401894j.C1.o34.fg
atgcagttcccgttctccggcgctggcccgggcgtcttcacgtcatcgccggcgctctccctcgcgctggcggacgcggtggcaggccggaacagcggcggcggtgggaagatggttaccgcggcccatggcggcgtcggcggaggaggaggaggaggacgcgcgaaggcgagggacgcgttggaggtggagaacgagatgagccggtccgggagcgaccacctcgacgtcgtctcttgcggcgacgcgggcggcggcggcggcgacgacgacgatgacgaggacgccgagcacggcaacccgcccaagcgcaagaagcggtaccaccgccacacgccgcagcagatccaagagctggaagcgatgttcaaggaatgcccccacccagacgagaagcagcgcgccgagctgagcaagcggctcggcctcgaaccccggcaggtcaagttctggttccagaatcggcgaacgcagatgaagatgcaactggagcgacacgagaactcgctgctgaagcaggagaacgataagctgcggtccgagaacctgtcaatccgggaggccacgagcaacgcggtgtgcgttggctgcggcggcccggcgatgctcggggaggtgtccctggaggagcaccaccttcgcgtcgagaacgcgaggctcaaggacgagctcagccgagtgtgcgcgctcgccgccaagttccttggcaagtccatctctgtcatggcgccaccgcagatgcatcagcctcatcctgtgccaggctcgtcgctggagcttgcggttgggggtatcggttcgatgccatcagccacgatgcccatctcgacgatcactgattttgctggcgccatgtccagttcaatgggcacggtgatcacgcccatgaagtctgaggctgaaccatcggcaatggctggcattgacaagtccttgttcttggagctagcaatgagtgcaatggatgagctagtcaagatggctcagatgggggatccgctatggattccaggtgcctccgtaccttcctcgccggcaaaggagagtctaaacttcgaggagtacctaaacaccttcccaccttgcatcggggtgaagcctgaagggtatgtatcagaggcatctagagaatctggcattgtcatcattgacgatggcgccgcgcttgtggagaccctcatggatgagtttgaattcttgcgacagcgacggtggtccgatatgttctcatgcatgattgccaaggcatcaaccactgaggagatttctactggtgttgctgggagtagaaatggtgcattgcttcttatgcaggcagagctacaggtgctttctcctcttgtgcctattagagaggtgaagtttctcaggttctccaaacagctggctgatggtgtatgggctgtagtggacgtttcggctgatgaattgatgagggatcagggcattacttctgcatcctcgactgcaaacatgaactgccgaaggctgccttctggttgtgtgctgcaggacactccaaatgggtttgttaagtatttagttcaaatatcagtattttctgaagtctataatctctctattgatcagtttctggatctgcctcctgctttcatggtcacatgggttgaacatacagaatatgatgaggcatctgtgcacccgctctaccggcctcttctccggtctggtcttgcccttggtgcagggcgatggatcgcgacattacagcggcagtgcgaatgcttggcccttctcatgtcttctattgcattgccagagaacgactcatcagctatccatcctgaaggtaaacggagcatgttgaagttggcaaggaggatgacggacaacttctgtgcaggggtgagcacatcatctacccgtgaatggagcaaactggttggattgacaggcaacattggggaggatgtgcatgtaatggcgcggaagagtgtggatgaacctggaacgccgccaggtgtggtgcttagtgctgctacatctgtgtggatgcctgtgatgcctgaacggctcttcaacttcttgcacaacaaggggctgcgtgctgaatgggatatcctcagcaatggtggccctatgcaggaggtgacaagcattgccaaggggcaacagaatggcaataccgtatgtctactgaaggctagttcttctgttccccttaccaaaaatttcactgtgcagcccaccaaagacaagcagaacagcatgctgatcctacaggagacgtgtgcagacgcatccggttcaatggttgtgtatgctcctgtagacatcccagcaatgcaccttgtcatgagtggtggggattcgtcatgcgtcgcccttcttccatcaggttttgccatcctgcctgctgggcctagcatcggcgcagatcacaagatgggcggttcattgctcaccgttgcattccagatacttgccaacagccagcccagtgctaagctcacggtggagtcagtcgagaccgtgagcaaccttatctcctgcaccatcaagaagatcaagacggcgctgcattgcgacgtgtga

SEQ ID NO: 12103 - DNA, 2373 bp, Oryza sativa
  Clone ID: TFbOSC400544j.C1.o1.fg
atgaacggcgagcttaaacttatggcttcctatgtgagcaagcttaagttcatcttgcaaaaagatcagcagcaggagccccatactgcgaaccttctagtcctacttgggagtagcaatcaggacaaaagaaatggcctctcacagggagaaaacagaatggacacttgtaccagaaagaagccaagaagataccaactcctcaccatgcaacaaaaagaaacgcttaatcgtgcatttcaatcatgtccgaaccctgatagaaatgacttgaagaagttggccaaggaactaaacatgactgagacccaaatcaaatattggttccagaactgcaggacaaagatgaagaaattcaagaacaatgaggagcgcaaactactgcagaaggagaatgaggagctaaagaaggagaatgcagagttgagaaataggatgaagaactcaacatgccgcgcttgtgacctccctttgttccatatagattgccgtcattgggagaatccaatgctcaacaagggtaatcatggcgttacaagtaatctcattcctcaggcagtgtcatccttgctccccagctcaagtggttttgtagcttcaggctccaatcttagtagcaatgctgtgctcatgcccgtatctgccatgccatcatcagttttgcagcctgctccagccgtctctggtgccaattttcccatcttgcacaatctatctgccaatgcaaatgatggctatacggaaaaaaacgtacttcttgatctggcgaaccgtgcaatggaagagttctttagtctaatgaaggagaatgagtctcttcttgtcaaaaaaaaggagaatgggcctctctggctcccacacatggatattctgggagtcgaatcacttaactaccaggaataccttgcaaaatccaggacgattggacaaaaacctgttgacttcaaagtggtcgtcaccagggacactgccattgtcaatggtagctgtgttgacctcgtcaaaagccttttggatgctaaccgctggagagagttgtttccaggcatcgtggcaagtgcaaacaccaccaagatcatctctactgggccctctaacttgcacgacgggttgcttcaattgaaaaatttgcagatgcgtgcagagctccaggtaatgtcacctgaagtcccagtttgcgatgtgacattcttgaggcagagtgtgcagtttggaagtggactgtggtgtgtggttgatgtgtctattgataccatccttcctggagagagtaaaacagctcagtccagtgtgcagaccagcagtacagctgccagacgcatggaagtcaggctgttgccatcaggctgtgttattgaagaaatggagaatggctattccaaggtgacctggatggtgcatgcagcttatgatgagagagcagtgccagtgctttatcattcacttctccgctctgcaaaagcccttggtgcgtgccgctgggtagcatcactccagagacacagccagttcctttccggcctgcacaaatacatcttttgtcctgacagcacaatgacagaagtggtgatgcgaagaaaagtcctgtacctggtgaagcagatgacgagcagcttcacaggcctatttgcgtcgatgtctaaggccacgctgcaagatggtgatgatactcacttcgcgcatcagatagttggtggtgcaacaggtgaacctgccggactgctgctgagcgccaccacaaccatatggctccccggcgtgaacccgaggcacgtgtatgaccacctgcgtgatgagcagtgccatggtgaatggcgctgcctcctcggtgagcagctgcatcagggcaatgccttgccgtatggtgcccccctgaatggtgagaccgtgccagagttctatcgcatggtgaacgggctgcatgaagggcatgctatctccctgatcagccccagagaaatgggtggtaacataagcaacactctgctcctgcaagaggcaagaactgatctttctggctccctcatagtttacgccaggacagatgtgaacaccgtgcattccatcatgaacagtggcctcaaccctgccaccgtcttcctcgtatcctctggatgtgccattcttcctgattgcctggaatcattccctctacacccagctgcaactgcagatcaggccggcacctccagtgccgctatcgctagcaggagcgaaaccggtgggtcattcgtcaccgtcacttaccagatgtttttcagcagccaaggtggcgcagcacctgccagctcatcaattcatcaaggccgtgatgcgctcaagaaagccaccgacattttcaaggtggtcctcgacactctcaccgtggcatag

SEQ ID NO: 12104 - DNA, 1173 bp, Oryza sativa
  Clone ID: TFbOSC401896j.C1.o7.fg
atggccagcaatggcatggcgtcctccccttcctccttcttccctccgaacttcctcctccacatggcgcagcagcaagcggcgccgcctcacgacccgcaagaacaccaccaccaccaccaccatggccaccatggccaccaccatgagcagcagcagcagcagcagcatcaccaccacctgggtcctcctccgccgccgccaccgcacccgcacaacccgttcttgccgtcctccgctcaatgcccgtccctccaagaattccgaggcatggcgccaatgctggggaagcggccgatgtcgtacggcgacggcggcggcggcggcgacgaggtgaacggcggcggcgaggacgagctgtcggacgacgggtcgcaggccggggagaagaagcggcggctgaacgtggagcaggtgcggacgctggagaagaacttcgagctcgggaacaagctggagccggagcggaagatgcagctcgcccgcgcgctcgggctgcagccgcgtcaggtggccatctggttccagaaccgccgcgcgaggtggaagacgaagcagctggagaaggactacgacgcgctcaagcgccagctcgacgccgtcaaggccgagaacgacgcgctcctcaaccacaacaagaagctccaagccgaggaacggagatccatgtgggtttcagtgttggcagaaaggttgttggaatcggtgcctttctcaccaccacgaatagtggcgctgaaggggagggaggcggcgtcggagctgataaacctgaacaaggagacggaggcgtcgtgcagcaaccgcagcgagaatagctccgagatcaacctcgacatctcgcgcacgccgccgcccgacgccgccgcgctcgacaccgccccgaccgcgcaccaccaccaccatggcggcggcggcggcggcggcggcggtggcggcatgatcccgttctacacctccatcgcccgccccgccagcggcggcggcgtcgacatcgaccagctcctccacagctcgtcgggcggcgccggcggacccaagatggagcaccacggcggcggcggcaatgtgcaggcggcgtccgtcgacacggccagcttcggcaacctgctctgcggcgtcgacgagccgccgccgttctggccatggcccgatcaccagcacttccactga

SEQ ID NO: 12105 - DNA, 888 bp, Oryza sativa
  Clone ID: TFbOSC401695j.C1.o34.fg
atggccatcatccatgacacctctgatcaacaagaggacaacatgaggtcgtacatggacggcggcggcgcggcggcgtacgaggaggaggaggaggaggttgaggacgacgacggcggcggcggcggcggcggcggcggcggcggtggggggctcggggagaagaagcggcggctggcggcggagcaggtgcgggcgctggagcggagcttcgaggcggacaacaagctggacccggagcggaaggcccggatcgcccgcgaccttcgcctccaccctcgccaggtcgccgtctggttccagaaccgccgcgcgaggtggaagaccaagcagatcgagcgcgacttcgccgccctccgctcccgccacgacgccctccgcctcgagtgcgacgccctccgccgcgacaaggacgccctcgccgccgagatcgccgacctccgggacagggtggacggccagatgtccgtcaagctggaggccgtggccgcggacgaacaccagccgcctccgccgccgccgccgccgccactggcgtataacagcaaggtggtggacggctcgacggacagcgactcgagcgcggtgttcaacgaggaggcgtcgccgtactccggcgcggccatcgaccaccaccaccaccaaactccggcgagctacgacacggcggggttcacctccttcttcgcgccatccaccacgctcacctcgtccctctccttcccttccatgttccacgcgtcatcgcatttcgatggccaccaagaactcctcgtcggcggcggcggcgccggcgcagtggccgacgccgacctcggaggcgccggattcttcgccggcgacgagcacgccggcggcctctcctggtacggcgccgagggttggtag

SEQ ID NO: 12106 - DNA, 2601 bp, Oryza sativa
  Clone ID: TFbOSC401909j.C1.o27.fg
atggccggggccgcctcctccgccgacgcgctcttcgcctcgccgctcatccccaaccccgctctcgccggcttcatgtcctcctccgccgccatgcccttccaccacttctccaacgccgccgccaccttaatacctaaggaggaggggttgatgggcggcctccatgtggccaaggacgaggggatggacctcgagatggacatggagctcagtggcggctccggcagcgcccacctcgacggcctcctcagcttcgccgacgtcgacgacgaccacaagccgcagcacagcggccatgaccagccgcccgacgccgcccagcccagcggcgccgcggggggcaacgccaagaagaagcgctaccaccgccacacggcgcaccagatccagcagatggaggcgctgttcaaggagtgcccgcatccggacgacaagcagcggctgaagctgagccaggaactgggcctcaaacctcgccaggtcaagttctggttccagaatcgccggacccagatgaaggcgcagcaggacagggcggacaacgtgattctgcgcgcggagaacgagaacctcaagagcgacaacttccgcctccaggccgccatccgcaacgtcgtctgccccaactgcggccacgccgccgtcctcgccgacatgtcctacgaggagcagcagctccgcatcgagaacgccaggctcaaagacgagcttgaccgcttggcctgcatcgccacccgctacggcggcggcggcggacggcagccggtgctgtcgacgtcggccctgagctgcatctcggcgccgccgccggtcctcatgccaccgctcgacctcgacatgaacgtctactcgcggcacttcgccgagcaggcgccggtcatgggctgcggcgacctcatcccgccacccgtcgtgccgcagcacgatggcgcggcggcgtacatgggcgccatgatggcgcccgtgcaggagcaggacaagcagctggtggtcgacctcgccgccacggcggcggaccagctcgccaggatgtgccgcgccggcgagccgctgtgggtgcggcagcgtggcgcggaggtgatggccgtggaggagcacgcgcggatgttcagctggccggtggacggcgcgaagcagggagacggcggcgcggtggcgagggcggaggggacgcgtgacaacgcggtggtcatcatgaacagcatcaacttggtggacgccttcctcgatgcgaacaaatggatggagctgttcccgtcgattgtttgcaaggcaagaacaatccagatcataaaccacggagctgcgtctggtcacctcggcagtggaactctcctcttgatgcaagcagaggtgcagttcttgtcgcctctggtggcggcgcgcgaggtggtgttcttccgttactgcgtgcacaacgccgacgaggggagctgggcgatcgtggatttcccggcggaagggtttgaggaggggctcctccaagcctcggtggtcaggtgccggcggcggccgtccggctgcatcatccaggacatgcccaatggatactccagggtggtgtgggtggagcacatggagatggtcggggaggagaagccgctgcagccggtgttcagggactacgtcgccagcggcgccgccttcggggccacgcgctggctctccatcctccagcgccagtgcgagcgcctcgccagtgagctcgcccgtaacatcgccgacctcggagtgatccgcacccctgaggcaagaacaaatatgatgaagctgtcgcagcggatgatcaccactttctgtgctaacatcagtgcttctggaacccaatcttggacggccctctcggattcaacccaggacactatcagggttacaactcggaagaacactgagcccggacagcccagcggtgtcatcctcaccgctgtctccacaagctggcttccttttacccatcagcaggtgtttgagcttcttgcagatgaacaacagcgctgccagcttgagattttgtcaaacggcggctcccttcatgaggtggcacatattgcaaatggatcacatccaaggaattgcatctctcttcttcgcattaacgctgcaagcaactcgtcacagaatgtggagctcctgctgcaggagagcagcacccaccctgatggtgggagcctggtggtgttcgcgacggtggacgtggacgcaattcaggtgacgatgagcggcgaggatccttcctacatccctctcctccccctgggcttcgccatcttccctgccaccagcccatcacctgctgctgcacccaccatcagctcaagcaccaccaccaccactggcaatggcaatggcgaaaccagtagcactcctccaagaaacagcagcagcaacaacaacaatgcagatgagctgctgcctcccaatggctgcctcctcaccgtcggcatgcaggtgctggccagcgccgtaccttctgccaagctcaacctctcgagtgtcactgcgatcaacagccatgtctgcaacgccattcaccagatcacagctgcactcaaaagttcagcaggtggtgctgggggtgagccggcgtccgatcagtag

SEQ ID NO: 12107 - DNA, 2838 bp, Oryza sativa
  Clone ID: TFbOSC401024j.C1.o1.fg
atggattcgtccggcgatggaggggacgagggagcgggagctgcgccggctggggtggaggaggagagccctgccccggcgtcggctccggctccggctccggcttccgcttccgctcccgttcccgccgccgttggtggtggagcaggcgcctctggatccagcgggaaggtgaagcgcgtgatgaagacgccctatcagttggaggttctcgagaggacatacacagaggatccgtatccaaatgagacgatgagagcggagttgtctgtgaagttagggctgacggacaggcagctgcagatgtggttctgccaccggcggttgaaggaccgtaagccaccgccgaagcggcagcagctggaggaggaggttcctgtgccggttatggcgccgcctcctgttctgccaccaccactgccacacagcgagctaacaatgggtactggtgggatgtatggcgagccgttgctgtccccctcttcccggagaggaactggcagaccatcggctgttccgaggatttctgcatcagaggttgcgcggagatattatgagccaccacaagttatgctacctccgttggcaccaatgcagctcacacgagctgagcaccgggtgattgattctgtggaacgactgataggggagccgctccgggaggatgggccagtgcttggtgtcgagtttgatcctctccctcctggcgcatttggggcgcctattgttccagagcaacagagacagcctttccgatcttatgaggccaaaatgttttctgggcatgatacaaagcacattaaggcatctgcattcttgcctagcatagatccttttgttccaagtacagtttctgggaagagaaagtccatgacaggaagttcttcccatcttggttcacgggcagttcgtgaataccaatttattcctgaacagtcaagtgatatatatgagaggacgacccagtcacgatactatgatgttttaactgaagcttcggattcaaggatgtcgacaggatcacgattcctccatggtgttgaaaaggcacctggctatacattccatggacaaatttctggttctagccatttatctctacatggcaggccaccagttttttcatcgggatcaacagattatgagatggatccatctaatatcaattctagttctgttccaaatgaaagccagtatggaattcctcaggttgctggatttgaaaactccgttgcaccctcagacagaatggtttatcatgatgacgatgcttttcgaatggaaagaaagcgcaaacatagcgaggaagtgaagattgcaaaggaagttgaggctcatgaaaaacgaatcagaaaggagctcgagaagcaagatatgttgaacagaaagagagaagaacaagtgcggagggaaatggagagaaatgatcgtgaaagaaggaaagaagaggagaggttgttgcgtgaaaagcagaaggaagaagagagattccaaagggaacaaaggcgtgaacacaagcgaatggaaaaatatttgctgaagcagtccttaagagctgaaaaaataagacaaaaggaggagcttcgtaaggagaaagaagccgcaaggcagaaggctgccaatgaaagggctacagcacgtagaattgcacgggagtatatggagctcatggaagatgagcgcctagaactaatggaactggtttcacgaagcaaagggttgccctctatgctatctcttgatagcgacacgttgcagcagcttgattcattcagaggaatgctgagacaatttcctagtgaaattgtgagattgaaggtgccattttcaataaaaccatggacaagctctgaagataatattggaaaccttttgatggtgtggaagttcttcattacctttgcggatgttcttgggattccgtcattcacgcttgatgagtttgtgcagtctcttcatgattatgattcaaggttgttgggagaattgcatgttgctctgctgaaatccataataaaagatattgaggatgttgcccggactccttcagttgcttcagggatgactgctaatcctggaggtggtcatccacaaattgttgaaggggcatacgattggggcttcaacatacttgcctggcagcgacacttgaatttgcttacatggcctgaaatattgcgccagtttggtttatctgctggtcttggaccacagttaaggaaaaggaatgctgaaaatgtcaataatcatgatgataatgagggtcgtaatggtgaggatgttatttccatactgagaagtggctcagcagctgtaaatgctgctgctaaaatgaaagaaagaggctacggtaatcgccgcaggtctcgacaccgtctgacacctggaactgtaaagtttgctgcgttccatgtgttgtcacttgaagggagccaaggtctcacgatattggaagttgcagaaaaaatacagaaatctggactgagagaccttacaacaagcaagacacctgaggcatctatatctgctgcactgtcaagggattcaaagcttttcgaaaggactgcaccttcaacatactgtgttaaaactccatacagaaaagatcctgctgattcagaggctgtgttggcagcagcacgtgaaaaaataagggtgtttcagaacactatttctgagtgtgaagaagtggagaaggatgtggatgatgctgagagggatgaagattctgagtgtgatgatgctgacgatgatcctgatggtgatgaagtgaatattgaggaaaaagatgtcaagacttccctggttaaggcacaagatggtggcatgcaagcttga

SEQ ID NO: 12108 - DNA, 810 bp, Oryza sativa
  Clone ID: TFbOSC401651j.C1.o19.fg
atgagaagtccagcagcgcttctcccggtggttgcagatggtggtggtggtgttggggtggaggaggagatggatgtggacgaggacatggcgatgtgcggcggccgcggcggcggcggcggggagaagaagcggcggctgagcgtggagcaggtgcgcgcgctggagcggagcttcgagacggagaacaagctggagccggagcggaaggcgcggctggcgcgcgacctcgggctgcagccgcgccaggtcgccgtctggttccagaaccgccgcgcgcggtggaagaccaagcagctcgagcgcgactacgccgcgctccgccaatcctacgacgcgctccgcgccgaccacgacgcgcttcgccgcgacaaggacgccctcctcgccgagatcaaggagctgaaggggaagctcggcgacgaggacgccgcggcgagcttctcgtcggtgaaggaggaggaggacccggcggcgtccgacgccgaccccccggccaccggcgcgccgcagggctcgtccgagagcgactcgagcgcggtgctgaacgacgcggagatccttccacacaagccagcgccggcggccgccgccgacgccgcggcctcggaggagacggaggcggtggtgaccggcgccgcgctgctccaccacgccgaggtgttcttccacgggcagcttctcaaggtggacgacgacgaggcggcgttcctaggcgacgacggcgcggcgtgcggcggcttcttcgccgacgagcatctcccgtcgctgccgtggtgggccgagcccaccgagcaatggacgacctag

SEQ ID NO: 12109 - DNA, 2661 bp, Oryza sativa
  Clone ID: TFbOSC401367j.C1.o6.fg
atggacgcgagcaagtacgtgaggtacacgccggagcaggtggaggcgctggagaggctgtactacgagtgtcccaagccgagctcgctgcggcggcagcagctggtgcgggagtgcccggcgctggcgaacgtggacccgaagcagatcaaggtgtggttccagaaccgccggtgccgggagaagcagcgcaaggagtcgtcgcggctgcaggcgctcaaccgcaagctcaccgccatgaacaagctcctcatggaggagaacgaccgcctccagaagcaggtctcccagctcgtctacgaccacggccgccacggcgtcgccgccgccgggatgatgcggcgagttcctgccttccctcctcaggccgccgccgccgccggccaccagctcgccaccgccaccgacaccagctgcgagtcggtcgtcaccagcggccatcatcatcagcagcagcagcacaacgtcgtccagccgccgccgcgcgacgcaagcccagctgggctgatgtcgatcgcggaggagacattgacggagtttctgtccaaggccaccggaaccgccgtcgagtggctccaaatgcctgggatgaagcctggtccggattccattggaatcatcgccatctcgcatggctgcgccggcgtcgccgcgcgagcttgcggcctcgtcggcatggagcccgctaaggttgccgaaatactcaaggatcggccgctgtggctgcgcgattgccggtccatggatgtggtgaacgtgctccctgctggcgccaacggcaccatcgagctgctctacatgcaggcaagaacacacaagcctgaaaattctgaacctgaacctgaaattctgaagctgaaatttgtattcgatcttcagctctatgctccgacgacgctggcgccggctcgcgacttctggctgctgcggtacacctccattctcgacgatggaagcttagtggtgtgtgagagatcactcagtagcaagcaaggaggcccaagcatgccacttgtccagccttttatcagaggtgagatgcttcccagtgggttcttgatccggcctagcgatgttggaggcagcgtgatacacatcgttgatcatatggacctcgagccttggagcgtgcctgaagttgtacgacctttgtatgaatcttctgccatggttgcgcagaagatctcgatggcggctttgcgctacctgaggcaggttgcacacgaagatacacgttctgtgatcacaggatggggaaggcagcctgcggctttgcgtgctctgagccaaaagctcaccagaggattcaatgaagctctcaatgggcttgccgatgatggatggtccgtgatcgagagcgatggcgtcgacgatgtttgcatctctgtcaattcatccaaagtgatcggttgcaatgcaacattcagcagtggactccctattgtcagtaccggtgttctttgtgccaaggcatccatgctgttgcaggatgtctctcctccatcactactgcaatttttgcgcgaacaccggtcacagtgggccgacagcaatttagacgcattcttcgcctccacgatgaaaccaaacttctgcaatttacccatgtcccgtcttggaggattcagtggtcaggtcatacttcctttagcacacacgtttgaacctgaagagttcctggaagttatcaagctaggaaacgccagcaactaccaagatacactggtgcaccgtgatctgttcctcttgcagatgtacaatggagtagaggagagcagtgcaggaacatgttcagagctcatctttgcgcccatcgacgcatcgttcagtgatgattccccactgctgccttccggtttccgcatcatcccaatcgattctcctctcgacacgtcgagcccgaactgcacgttggatctcgcgtccacgctcgaagccgcgacgccacggagcaggatcagcggcgtcaatggcggcggcggcggctgtgctgctgctgcggcgagctctagctccaaggcggtgatgacgatcgcgttccagttcgcgttcgacggccacctgcaggacagcgtggccgccatggcgcggcagtacatgcgcaacatcatctcgtcggtgcagaggatcgccgtggcgctctcgtcctcccgcctcgtccctcccggcgccggcgccgccgccgcgcagctctcaccggtgactccggaggcggcgacgctgcccagatggatttgccagagctacagatttcattttggagatgaactcatcaaatctgtagatgcaaacagcagcaatgaatcgattctgaaagcagtttggcatcatccgagtgccatactctgctgctctctcaaggcgatgccagtgttcacatttgcaaaccagtctggcctcgacatgctcgaaacaactctggtggcgctccaagacatgacgctggagaaagttttcgacgatcaagggaggaagaacctgtgcacagagctccccaacatcatggagcaggggatggcgtgcatggagggaggggtgtgcgtgtcgagcgttgggagggcggcgtcgtacgagaaggcggtggcgtggaaggtggtcgacggcgacggcggcggcgcccactgcatctgcttcatgttcatcaactggaccttcctttga

SEQ ID NO: 12110 - DNA, 1577 bp, Oryza sativa
  unsure (1)..(1577): unsure at all n locations
  Clone ID: TFbOSC13680j.C1.o1.np
atgtgtattaaacccctgttcaggaccagccagggtatccttgacagcagcgacgaaaccaacttcgacaagacagctcccactatgaagatctttagctctggtgtgggggaaagagagcaagattgagtactacccactgtactcagcaagacataccggaagaggagggttcgcccctgtccccagcaggcaacgggcagcccccctttcatgctgcggtgaatccggaagccgatcaaccggacaccccggccgacccaactccatcacgcccaccctcgcctgggtacgtcggctagaggaaagctacactataagcccagccgttgcccacgctggcttgtggtaagtacggtaagttcttccagggcatcccgcgaaccggtccttaatcgccatgggcacgactaacaaaaccatgcacccacagcccaccatcatgacttgccttgctctcgtactgatgagaccacagcaacgacttcgaggaaccgcggatcgacgaaacggccgaaatctacgcgacaaacaaagcacacaagcaaaacatgttataagactactgaaacaggaaacaaaaccatttttaatggattctatacatttttatgaatttactaagacttgaatggacttaatcggagctcggatgaattagttatgatttttagaagattatctatgtttttactataaaagaaaaactcttaatcaatttattgcgcaataactcatcccaggactgacgtcagcacaagggggcggcgccgacatgcgggccccacgggtcagcggctcgagagagagtgagggagggacgcaggcacgtgggccccactggcagtggcacaaggcgggaggggttgcggctggcaggcgggccccaccggccgggctccaaaagggggggggggggtggcacctggctcggctcggctccgagccgaccggccggccatggggtggcggcgcgcgcggagctggcggcgggacatggttaccggcggcggagcgggagtcggaggcgacggctggaagcggcggcgggggaggcggcggcggccgacgcggaaggcggcggcgtcggccgaaggcgacggcgagtgcgtggagaggggcggcgcaaacgagagagatgggaaaagggaggagaggggatcctcaccggcgagcacggcggccggcgcgaaggacgaaggcggcggcgatgacccgacgagcgtangggcagacgggcggcgagagagaggtgttccggcggcgggattggatggggatgcggctgccggggtagctttggcggcggcgaagctaacggcggcggcggattggctcggcggcggctctagcggtggcggcgtgcggccagagcacggcggcgagcggcggcgctagaggagatcggcgcgagcgcggtagagggcgtgcgagagcgtggcgaaaaggggaaaagggagagggggacgcggggaagctttataggggctcgggagggggtgtcgccggccgaccggggctttttcctttcctccgggtcacgtgcggcctcgtcaaccggtcaaaccccgccatta

SEQ ID NO: 12111 - DNA, 795 bp, Oryza sativa
  Clone ID: TFbOSC418063j.C1.o13.fg
atgaccaacgcaggaagcacccccaccattgatgatggatatggaggggttgggatggaggcggagggggacgtggaggaggagatgatggcgtgcggcggcggcggggagaagaagcggcggctgagcgtggagcaggttcgcgcgctggagcggagcttcgaggtggagaacaagcttgagcctgagcggaaggcgcggctggcgcgcgacctcggcctgcagccgcgccaggtcgccgtctggttccagaaccgccgcgcgcggtggaagaccaagcagctcgagcgcgactacgccgcgctccgccattcctacgactccctgcgcctcgatcacgacgcgctccgccgcgacaaggacgccctcctcgccgagatcaaggagctgaaggcgaagctcggggacgaggaggcggcggcgagcttcacgtcggtgaaggaggagccggcggcctccgacgggccaccggcggcgggatttgggtcgtccgacagcgactcaagcgcggtgctgaacgacgtggacgcggccggcgccgcgcccgcggcgacggacgcgctggctccggaggcgtgcacgtttctcggcgcgccgcccgccgcgggcgcgggcgcgggcgcagcggcggcggcgagccacgaggaggtgttcttccacggcaatttcctcaaggtggaggaggacgagacggggttcctcgacgacgacgagccgtgcggcgggttcttcgccgacgatcagcccccgccgctgtcgtcgtggtgggccgagcccacggagcactggaactga

SEQ ID NO: 12112 - DNA, 591 bp, Oryza sativa
  Clone ID: TFbOSC900340j.C1.o3.fg
atgaccaacgcaggaagcacccccaccattgatgatggatatggaggggttgggatggaggcggagggggacgtggaggaggagatgatggcgtgcggcggcggcggggagaagaagcggcggctgagcgtggagcaggttcgcgcgctggagcggagcttcgaggtggagaacaagcttgagcctgagcggaaggcgcggctggcgcgcgacctcggcctgcagccgcgccaggtcgccgtctggttccagaaccgccgcgcgcggtggaagaccaagcaaacacttgcaagcgactcaagcgcggtgctgaacgacgtggacgcggccggcgccgcgcccgcggcgacggacgcgctggctccggaggcgtgcacgtttctcggcgcgccgcccgccgcgggcgcgggcgcgggcgcagcggcggcggcgagccacgaggaggtgttcttccacggcaatttcctcaaggtggaggaggacgagacggggttcctcgacgacgacgagccgtgcggcgggttcttcgccgacgatcagcccccgccgctgtcgtcgtggtgggccgagcccacggagcactggaactga

SEQ ID NO: 12113 - DNA, 879 bp, Oryza sativa
  Clone ID: TFbOSC410830j.C1.o4.fg
atggctcaggaggacgtcggtcacctgagcgacgccggcctggcgctgggcctgtccctcggcgggggaggaggagggacgaccgacgcggcggcggcgcaccgtggcggctgccggcggccgtcgccgtcgtcgcagtgcccgccgctggagccgtcgctgaccctgagcttgcccgacgacgcggcggccggcgcggccgcgaccgcgaccgcgaccgcgtccggcgggggcggccctgcgcacagcgtgtcgtcgctgtccgtcggcgcggcggcggcggcggccgtgaagagggagcgcgcggaggaggccgacggcgagagggtgtcgtcgacggcggccgggcgtgacgacgacgacgacgggagcacccgcaagaagctccggctgaccaaggagcagtccgcgctcctggaggaccgcttccgggagcacagcacgctcaacccgaagcagaaagtcgctttagcgaagcaactgaacctcaggccaaggcaggtggaggtctggttccaaaacagaagagcaaggacaaagctgaagcagacggaggtggactgcgagttcctgaagcgctgctgcgagacgctcaccgaggagaaccgtcggctgcagcgcgagctgcaggagctccgcgcgctcaagttcgccccgccgccgccgtcctcggcggcccaccagccgtcgccggcgccaccggcgccgttctacatgcaactcccggccgccacgctcaccatctgcccgtcctgcgagcgcgtcggcgggcccgcgtccgccgccaaggtcgtcgccgccgacgggaccaaggccggccccggccggaccaccacccaccacttcttcaaccccttcacccactccgccgcctgctga

SEQ ID NO: 12114 - DNA, 2142 bp, Oryza sativa
  Clone ID: TFbOSC400884j.C1.o2.fg
atggatttcggcgacgaacccgagggctccgacagccagcgccgccgcaagcgctaccaccgccacacgcctcgccagattcagcagctcgaggcgtacgcgttttctctatttttttttctgctgttgttcttctatgtgttgttggctttcgtccgccatggcggcggcgccatggatggagggatgaaatggatgttcaaggagtgcccccacccggacgagaaccagcgggcgcagcttagccgggagctcgggttggagccgaggcagatcaagttctggttccagaatcgccggacccagatgaaggcgcagcacgagcgggcggacaactgcttcctccgcgccgagaacgacaagatccggtgcgagaacatcgccatccgcgaggccctcaagaacgtcatctgccccacctgcggcggccctcccgtcggcgaggactacttcgacgagcagaagcttcgcatggagaacgcccgcctcaaggaagagctggaccgcgtgtcgaacctgacgtcgaagtatctcggccggccgttcacgcagctgccgccggcgacgccgccgatgacggtgtcgtcgctggacctgtccgtgggcgggatgggcgggccgtcgctggacctggacctcctcagcggtggctcgtcggggatcccgttccagctgccggcgcccgtgtccgacatggagcggcccatgatggccgagatggccacgcgcgccatggacgagctgatccgcctcgcgcaggccggcgaccacatctggtccaagagccccggcggcggcgtgtccggcggcgacgcccgcgagaccctcaacgtcgacacctacgacagcatcttctccaagcccggcggctcgtaccgcgcccccagcatcaacgtcgaggggtcccgcgagtccggcctcgtgctcatgagcgccgtcgccctcgccgacgtgttcatggacacgaacaagtggatggagttcttcccaagcatcgtgtccaaagctcacaccattgatgtgctcgtgaatggcatgggagggagaagcgagtccttgattctgatgtacgaggagctgcacatcatgacgccggccgtcccgacccgggaggtgaacttcgtccgctactgccggcagatcgagcaggggctatgggccatcgccgacgtctccgtcgacctgcagcgcgacgcccacttcggcgcgccgccgccgcgctcccgccggctcccttcggggtgcctcatcgctgacatggccaatggctactccaaggtgacctgggtcgaacacatggaggtggaggagaagagcccgatcaacgtgctgtaccgtgacctcgtgctgagcggcgccgcgttcggggcgcaccgctggctcgccgcgctccagcgcgcgtgcgagcgctacgcctccctcgtcgcgctcggcgtcccgcaccacatcgccggtgtgacgccggaggggaagaggagcatgatgaagctgtcgcagcggatggtgaacagcttctgctcgagcctgggggcgtcgcagatgcaccagtggacgacgctgtcgggctccaacgaggtgagcgtccgcgtcaccatgcaccggagcacggaccccggccagcccaacggcgtcgtcctcagcgccgccacctccatctggctccccgtcccctgcgaccacgtcttcgccttcgtccgcgacgagaacacccgctcccagggcttgaatgcgagccagaacagcatgctgatactgcaggagagctgcacggacgcgtcggggtcgctggtggtgtactcgccgatcgacatcccggcggcgaacgtcgtgatgagcggtgaggacccgtcgagcatcccgctgctgccgtcggggttcaccatcctccccgatggccgcccgggctcggcggcgggggcgtcgaccagcagcgcggggccgctcgccgccgcgcgcggcgggggcggcgggggcgctggcggcgggtccgtcgtcaccgtcgcgttccagatcctcgtcagcagcctgccgtcgtcgaagctcaacgccgagtctgtcgccaccgtcaacgggctgatcaccaccaccgtcgagcagatcaaggccgcgctcaactgctccgcccatggccaccacccctga

SEQ ID NO: 12115 - DNA, 510 bp, Oryza sativa
  Clone ID: TFbOSC5271j.C1.o1.fg
gccttcttcaaggagtgccccccccctgatgacaagcagcgcaaggagctcagccgcgagatcggcctccagcccctccaggtcaagttctggttccagaacaagcgcacccagatgaagacgcagcatgagagacacgagaacaatgcgctgcgcgcagagaacgagaagctgcgggcagagaacatgaggtacaaggaggcgcttgccaacgcgtcctgccccaactgcggcggtccggccgccatcggcgagatgtccttcgacgagcaccacctccgcctcgagaacgcgcgcctccgcgacgagattgacaggatctccgccatcgccgccaagtacgtcggcaagcccgccgcggccgtctcggccgcgtacccgccgctgccgccgtcgaacaggtcgccgctcgatcatatgggcattcccggcgctggcgccgacgtgttcggcgccgacttcgacaagccgctcgtcatcgagctcgccgtggccgccatggaggagccc

SEQ ID NO: 12116 - DNA, 1029 bp, Oryza sativa
  Clone ID: TFbOSC400615j.C1.o41.gm
atggaccgatacggcgagaagcagcagcagcagcagatgtttgcctcctacgtggacgcctccctcctagcagccagcggtgaggtgcagggcgagaggccgagagcgcggaggaggaggaggcgtggggcgaggtgcgttggcggcggcggcggtggtggcgaggtggacggaggggacccgaagaagcggcggctgagcgacgagcaggtggagatgctggagctgagcttccgggaggagcggaagctggagaccgggcggaaggtgcaccttgcctccgagctcgggctcgaccccaagcaggtggccgtctggttccagaaccgccgcgcccgccacaagagcaagctgctcgaggaggagttctccaagctcaagcacgcccacgacgccgccatcctccacaaatgccacctcgagaacgaggtgctgaggctgaaggagaggctggtggtcgccgaggaggaagtgaggcggctcagatcagcggcggggagccacacggcctccggagaaggcggagacatcatgggcttaggcggcagcggcgcctgcgtcgccgggagcccgagctcgtcgttctcgacgggtacctgccagccgccgagcttcggcggcggagatcacctcggagacgatgacctggtgtatgtcccggagtacggcggctacgctgataacagtgtggttgagtggttcagcctggaagtgatagtagtcaacggtggaaccacctcccgagcttttgggaagaggaccatggcggctccaccactaatagtggtgcaggtgtgggatcatgacttggatgtatgtcgacagcaagagaaggtggcaagggaagatggttatcgattttgtcacccgatagccatatccgtctcaagtgtgagtgtgagtggtccaaataagtccggcactctagactccgaagctgaccatgtcaactgttggctcggggccaaggtgaagccccgtgtgcatggacccggacaataccatgctcgacctcaagtatgcctctag

SEQ ID NO: 12117 - DNA, 2181 bp, Oryza sativa
  Clone ID: TFbOSC400998j.C1.o6.fg
atgggggatgaatgggagacttggatagctgcagatatgggccaaaacaaaggggccttaataaatgatggggagcagagaatgagtattccagcaagagaattatttgcagcaattgaggccgactcaggcttgttgcctgtgaacagtagcaacactaatgaaaaaaggaagaggcgtctacagaggctcactggcaaacagtcggaggtacttgaggggtttttcagcatctgtgggcatcccgatgatggacaaaagaggcatctgagtgagacaacaggtcttggtttagatcaagtgaagttttggtttcagaataaaagaacacaagtaaagactatgtgctggaaggaagagaactataagttgtcggtggagaatgaaattctgagggatgagaacaggagagttaagatagctcactgcactgctgtatgcctcacttgctgtaattcatcagtacagaaccagcttgccgttgagatggaaaggttaatggggcagagtgagtggctgcaacaagagattgcacggtcgaatggaacacccccggctgcaaaccttgcctttcaacttaattcatcagcagactatgtattttcagggcaacatgaccaacaaatgattgctgaactagccaaaaacgcaatgcacgcattgattattttggccgaatcccatgtcgctctatggtttcccgtccctggctgttcttatgaagtattgaacaagatggcttatgaccaagcatatcctggggataacagtgcaaacgccattggattcaagacagaggctactcgtgcagtttctatggtgatgatggactacaaaagcgttgtggatttcctcatggatccttacaactaccgaactttctttcctgaagttatttccggggcagtaaccaacaggatctacacgtggcctaccagtgatggttataatggggttatacaactgatgactgtcgagatgatgttcccatcgcccctggtaccggctaggaaatgcacattcctgcgctattgtaatgtgctgaacgaaggattagtggtcgtcattgatgtgtcattggacgatggcagtatcttctccaaatgccgtaaaatgccatcagggtttctgatccaatccataaggccaaacagctgcaaggtcactgccatagagcacgtccttgcggatgacaccggtgttcatgagctctaccagccttgtatgaatggactcgtcttcggagctcggcgctgggtggcgaccatggcgcggcagtctgcacgcatgagagatgttcatcacaacaagacagctccgcaagtcagcacgaaggggaggaagaatctaatgaagctagcggacgacctgctcgcgagcttcgccggcggcatcgccgccactggcggaggaacgtggaccgtcgtgatcggcgccggcacggagaaggacatcagggtcgcgtacaggaggaccaccgagggcagcagcagctacaacgcgatcctgtccgtcaccgcgtccctgcgtctgccgctgcccatgaggaaaaccttcgatctgctcaggaaccttactcaccgctgcaagtgggacgtcctggtgcacggcagcgtggtgaaggaggaggtcaccatcgccagaggcgtcgggaacgacgacactgtcaccgtcctccactgcaagcgcgccggcagggaggacaggggaaggaccatgatcctgcagaacaacgggtacgacgcgtcgggctcgttcatggtctactcccagatcgacagcgagctgatgaacaccatggtcctgagccccagcgacctgccgcccgggcggggcgggccgtccctctaccccaccggcttctcccttctccctgacgtcgaggctgcccaggacagcagcggcatcgccctcggcgaggttgggggaactctcatgaccatgggcttccagattccggtgaagctcgccagtggggatcgcatgtattcccggtctgcggcatcggcaatcaggctcatgactgacaccattgccctcgtcaagaagacgctgatgaacgagcattctggtatctacgggggagaaaagggaggtccgtgtgcagataaaaatcaagaacatgcgaaggggattcatcggctccgatcaccctgcatctcccagaatttgctgaattaa

SEQ ID NO: 12118 - DNA, 924 bp, Oryza sativa
  Clone ID: TFbOSC34011j.C1.o2.fg
atggatctcggcctcagcctcggcctcggcctcgcctcgcagggcagcctcacctcctccaccaccaccacctcctcccccggcgccggatcatcctccccgtgggccgccgcgctcaactccatcgtcggcgacgtgaggcgggatcaggccgcggcgcatgctgccgcggcggtgggggttggggttgggggcgaggagatgtaccaggggagggcgtccacgtcgccggacagcgcggcggcgctgtcgagcgcgagcgggaagagggagagggagctggagcggtcgggatccggggttgacgacgacgacggcgcggacggcgccggcgggcggaagaagctcaggctgtccaaggaccaggccgccgtgctcgaggagtgcttcaagacgcactccactctcaaccccaagcagaaggtggcgctggcgaacaggctggggctgcggccgcggcaggtggaggtgtggttccagaaccggagggcgaggacgaagctgaagcagacggaggtggactgcgagtacctgaagcggtggtgcgagcgcctcgccgacgagaacaagcgcctcgagaaggagctcgccgacctcagggcgctcaaggccgcgccctcgccggcgtccgcgtccgcgatgcagccctcctcctccgccgccgccacgctcaccatgtgcccctcctgccgccgcgtcgccaccgccggcgcgccgcaccagcctaaccaccaacaatgccatcccaaatctaacaccaccatctcctcctcctccaccgccgccgccgccgtcgccgtcgccggcggcaacgtgctgcccagccactgccagttcttcccggccgccgccgccgccgccgaccggacaagccagagcacgtggaacgccgccgcgccgctcgtcaccagagagctcttctag

SEQ ID NO: 12119 - DNA, 501 bp, Oryza sativa
  Clone ID: TFbOSC11877j.C1.o1.fg
atggatggggaggaggacagcgagtggatgatgatggacgttggagggaagggcgggaagggcggcggcggcggcggcgcggcggacaggaagaagcggttcagcgaggagcagatcaagtcgctggagtccatgttcgcgacgcagaccaagctggagccgaggcagaagctgcagctcgccagggagctcggcctgcagcctcgccaggtcgccatctggttccagaacaagcgcgcgcggtggaagtccaagcagctcgagcgcgagtactccgccctccgcgacgactacgacgccctcctctgcagctacgagtccctcaagaaggagaagctcgccctcatcaagcaggcacgcacatcgtcgtcctcatcgattcttgatcgctttctttcttgcttgccttttgcatcgattctgacgcgtgatcggtgcgttcttgcagctggagaagctggcggagatgctgcaggagccacgggggaagtacggcgataa

SEQ ID NO: 12120 - DNA, 3327 bp, Oryza sativa
  Clone ID: TFbOSC401616j.C1.o2.fg
atggcggcggttcggaagatggcggccaatggcctcgcagcaaaaagggagaatacagggacaaagaaatctcccctgcaaatccagatgctggagagattctactctgaggtacaataccctcagtcggaggacattgcagagtatgcaacatctgttggtttgacttacaatcaggtcagaatatggtttaaggagcggaggaggaaagagaggagagaaacggaatctttaggggcgcatatggaaaagcaacttagtgcaagatcaaatgggttcagatgcagcagcagcaggtcttcctcttttagccggtctaccatgtaccgtactgtgaatttacagccagaggacgaccgttatgttgacaagggtatgagcttcacaggagagaaacacacactccgatcacaagttctgtttcccaaggattatatcctgaggaaagtcttccgcaaggatggtccacctcttggaagcgaatttgatccccttccccatagtgcacctggccatctcagagatactacagacgaccatttctaccagaaccaaagagtaataaagaagagaaagattgtggagcctaccactcagagatcttccctgccatgtggggacaatggtcctgtgaggaaacatggagccgggaaaggtctaatgacagtgtggcatgcaatgtattcccatagtagcaaaattcaagatggatctaattttattgatgaaactggttgcttgaggtccttgagaccattagatgattgtggcagaatagaggattgcgatgatggaaagctaattcaggtgccaagtagcagagttactgatccgaagaagcatcctccaatggaatgccatctttcagttgatgaatcacaatccccagtgctacaggctaaccaagtgactttagttgatgatgaggagcttgaactccgtgaattgcaagcaggtcctaacccattgagatgttcagctcacctttcttcaagtgggagacatggctgccctctttgtaaagatttactttccaggtttcctccatcaagtgtcaagatgaaacagccattctccacaagaccttgggggtcatcaccagaaatggtgaaaaagcttttccaggttgtccggtttatctacaatcgttttggttatatggatgtccatcccttcacacttgatgagttggcacaggcatttcatgacaaggttagggaacaggagtttgatatgaatttttggatcaagtctctgaattctcttacctgggttgaaatactacgtcaagttttggttgcttctggttttggttcgaaacatcatatgctgaatcgggatttttttaataaggagaaaaatcaaatggttaaatatggtttacgtcctcgtacactgaagggtgaattgtttgcactattgtctaagaaaggtagtggtggcttaaaggtatcagaacttgccaaatcacctgagattgttgatcttagcatctccagcacagaaatagagcagctgatctattcaactctttctagtgatatcacattatttgagaagattgcgccttctgcatatcgtctccgtgtagatcctcgaattaaaggaaaggaagactctggatcagataccgaggactctggaagtgttgatgatcacagtgatgctagcagtggtgctgatgaatctgatggttcacatgagatgagtttttctgagcatgaacatagaatccttagaagaaagtggaaaaatggtcatgaaaatgtgaatagatgtagtgaaattgatgaaagttattctggagaacgatggcttctggggttgatggaaggcgagtactcagacttaagcattgatgagaagttggattgcttggttgctttaatggatgttgtttctggtgctgattctgctccaagacttgaggaaccatcaagagtcgtgcctagcataccgagagcacagccgcatgtgtcaggtgggaaaataaagaaatcgacaagaaacatttgtcaatctagtgatgagtgctttaatgcatcaggaagcatgtatggtttggattcttctatgcatgagcagtcaagaagcctgagaagtcgtgattatgttgcttactctggaaggaatgatacgtctacaggagttgctcatcaaccacaagttgttctcttaggatccgaccgtaggtataataattattggctcttccttggaccttgtagagcagatgatccaggacatcgtagggtgtacttcgagtcatcagaagatggtcactgggaggttattgattcaccacaggagttactttccctactagcttcgctagacagcagaggtactagggaagcttatcttcttgcgtcaatgaaaaagagacagacatgcctttttgaagccatgaaaaagcattacgaaaatagagatgcagttcaacctgcaatgccatctgatacatctcactctgagacaagtagtggagatggagcttcacccaagctaagtagtggagatggagcttcgccaacatcagacattgacaatgcttctgtccccacaaatccagctgagaatatgataaatgcatcatctgcaatagcaattgaagttgggaggagaggtgatgagaaaatattgaagtgggaaagatctcaaacatttgataaatggatctggacttctttctattcttgcctaactgctgttaagtgtggcaagaaatcattcaaggaatcactagttcgctgtgaaagttgtcatgatttgtattggagagatgaaaagcattgcagaatatgccactctacttttgaagttagctttgatcttgaagaacgatatgctatacatgtggctacatgcagggatcctgaagatgtgtatgatgtgccaaatcataaagttctgccttcacagctacaagcacttaaggcagccattcatgctattgaggcacacatgcctgaagcagcgtttgctggtttgtggatgaagtcttcgcacaagctgtgggttaagcggctgcgacgaacgtcatctttggcagagcttttacaggttcttgttgattttgtgggggcaatggatgaggattggctgtacaaaagttcatcatctgtaagcttttgttcgtatttggatgacattgtcatatacttccaaacaatgccacaaacaacatcagcagttgcactgtgggttgttaaattggatgccctcatcacgccttatttggaaagagctgattctgacagagcattgggcgaagagtctgtgcagacaagaacgcgagcatgcggtgagatagctaggaatcgatga

SEQ ID NO: 12121 - DNA, 637 bp, Oryza sativa
  Clone ID: TFbOSC401000j.C1.o17.np
agcagcagcaccagttcttgatgccaccgcctgcgccggtggtgccgccgcagctgtgcatgccggcgatgatggcggacgagcagtacatggacctgggcggtggcggggcggcggcggcgccggggaggggcggggccggggagaggaagcggcggttcacggaggagcagatacggtcgctggagtccatgttccacgcgcaccacgccaagctggagccccgcgagaaggcggagctggcgcgcgagctgggcctgcagccgcggcaggtggccatctggttccagaacaagcgcgcgcggtggcgctccaagcagctcgagcacgactacgccgcactccgctccaagtacgacgccctccactcccgcgtcgagtccctcaagcaagagaagctcgctctcacccagcggcgcgagctgattatgcttccgggaggcgaggacggcggcaagcaccgcggcgccaccgccgacgaggaggccgccgcgaccgcggcctcgctgaacgacctatgcgccaccgccggggatgcgggggggctccccgcgctggcgccgttcccgagggcggcggctcgtcctcgccgtcgtgcacagcgccgcactgctcgtggtggccgtgctcctctccg

SEQ ID NO: 12122 - DNA, 675 bp, Oryza sativa
  Clone ID: TFbOSC34011j.C1.o4.fg
atggcggagcaggaagtgatcaggcgtgatgatgtggttgcggcgacggcggcggaggatgagaggttcgcgtgctcacccggcagcccggtgtcgagcggcagcgggaagcgaggcagcggcagcggcagcggcgacgaggtcgacgacgccggctgcgacgtcggcggcggcggcgcgcgcaagaagctgcggttgtccaaggaccaggccgccgtcctcgaggagtgcttcaagacgcaccacaccctcactccgaagcagaaggtggcgctggcgaagagcttgaacctgcggccgcggcaggtggaggtgtggttccagaaccgccgcgcgaggacgaagctgaagcagacggaggtggactgcgagcacctcaagcggtggtgcgaccagctcgccgacgacaaccgccgcctccacaaggagctcgccgagctcagggcgctcaaggccacgcccacaccgcccgccgccgcgccgccattgaccaccctcacaatgtgcctctcctgcaagcgcgtcgccaatgccggcgtgccctcgccggcggcggcgatattccccggccacccccagttcttgtgcggattcagagatcacgccggagcagcgtcgtcgtcgtacggcggcgcatcatctggactcgcgaaggcggtcagggcggcgaggtag

SEQ ID NO: 12123 - DNA, 870 bp, Oryza sativa
  unsure (1)..(870): unsure at all n locations
  Clone ID: TFbOSC410031j.C1.o13.gm
atggccggcgggcacgcggcgcagtcgccgtcgccgtcgtgcgggctgggcgagaagaagcggcggctggcgctggagcangtgcgcgctctggagcggagcttcaacacggacaacaagctggacccggaccgcaaggcccgcatcgcgcgcgacctcggcctgcagccgcgccaggtcgccgtctggtttcaaaaccgccgcgcccggtggaagacgaagcatctcgagcgcgactttgccgcccttcgggcccgccacgacgcccttccgcgccgaatgcgaccccctgggccgcgacaaggacgccctttcccgccgaggtacgcgcccaccgctaagccggcaatgacgcggcggccggcgccgcggcccgccacggtgtgcaaggacggctcgtcggacgacagcgactccagcgtggtgttcaacgacgaggcgtcgccgtactccggcgcggccttcattggattcggcccgtcgttcttggtcgacgacgcgtcggcggcaaccgtgggctgctcgtcgtcgctccccgcgctcgagtccaaatggcacggtccgtactccgacgactcgtgcaaaggcggcgtctatggcttcacggaggaatggctcgctgcctgctccggcgagatggccggcaacgacgccgccggcttcttctccgacgagcacgcctccaacctcaacttcggttgggatcgcctcatctccttcagctttggctcaacgatgcccaggatccacctcggcatggatggataccgctacgccaagtctgagctctcccatgatcatggtggcataagagaggagggggatgtagtggtggcggcagccggcagtgcttggtttggcactgcctag

SEQ ID NO: 12124 - DNA, 533 bp, Oryza sativa
  Clone ID: TFbOSC6947j.C1.o1.fg
atggctcaggaggacgtcggtcacctgagcgacgccggcctggcgctgggcctgtccctcggcgggggaggaggagggacgaccgacgcggcggcggcgcaccgtggcggctgccggcggccgtcgccgtcgtcgcagtgcccgccgctggagccgtcgctgaccctgagcttgcccgacgacgcggcggccggcgcggccgcgaccgcaaccgcgaccgcgtccggcgggggcggccctgcgcacaacgtgtcgtcgctgtccgtcggcgcggcggcggcggcggccgtgaagagggagcgcgcggagaaggccgacggcgagagggtgtcgtcgacggcggccgggcgtgacgacgacgacgacgggagcacccgcaagaagctccggctgaccaaggagcagtccgcgctcctggaggaccgcttccgggagcacagcacgctcaacccgaagcataaagtcgctttagcgaagcaactgaacctcaggccaaggcaggtggaggtctggttccaaaacagaagagcaag

SEQ ID NO: 12125 - DNA, 903 bp, Oryza sativa
  Clone ID: TFbOSC401481j.C1.o34.np
atggaggatctgtacagcatccacccggggatctcgcgggtcggcggcgcggcgagcgaggcgtccggcgtgggcgtcgtcgtcggcggcggcggcgggtcgtcgtcgtcggatctgacggagctcatgaaggctcagatcgccggtcacccgcgctacccgaccctcctctccgcctacatcgagtgtcgcaaggtgggagcgcctccggaggtggcgtcgctgctgaaggagatcggccgggagaggcgcgccggcggcggcggcggcggcgccgggcagatcggcgtcgaccccgagctcgacgagttcatggaggcgtactgccgggtgctggtgcgctacaaggaggagctgtcccggccgttcgacgaggcggcgtctttcctcagcagcatccagacgcagctcagcaacctctgcagcggcgccacctcgccgccggccaccaccgccacgcactccgatgaaatggtggggtcctccgacgaagaccagtgctcgggggagactgatatgctagatatagggcaagagcaaagctcccgcttagctgaccacgaactcaaggaaatgcttctgaagaagtacagtggctgcctcagccggctccggtccgagttcctgaagaagcggaagaaagggaagctaccaaaggacgcacggtcggcactgcttgaatggtggaacacacactaccgctggccatatcccacggaagaagataagctgaggcttgcagcgaggacaggtcttgacccaaagcagatcaacaattggttcatcaaccagaggaagaggcactggaagccatcggacgggatgcggttcgcgctcatggagggcgtggcgggtggatcgtccgggacgacgctctacttcgacactggcacaattggacca

SEQ ID NO: 12126 - DNA, 2346 bp, Oryza sativa
  Clone ID: TFbOSC2844j.C1.o3.fg
atggagaggagggagattttccaagttgctgatcttgcacacatattgagagggaaacctgtagatcatcttcaacagccaaacttgctggataatcaccagttccagcaagcgttccagcatcagcagcagcagcatcatctccttgaccagatcccggcgacgacggcggagagcggcgacaacatgatccgcagccgtgcgtccgaccctctcggcggcgacgagttcgagagcaagtccggcagcgagaacgtcgacggcgtctccgtcgacgaccaggaccccaaccagcggccgcgcaagaagcgctaccaccgccacacccagcatcagatccaggagatggaagcattcttcaaggaatgtccacacccagatgataagcagcgcaaggagctgagccgggagctcggcctggagcctctccaagtgaagttctggttccagaacaagcgcacccaaatgaagaaccagcatgagaggcacgagaactcgcagctgcggtcggataacgagaagctccgggccgagaacatgcggtacaaggaggccctgagcagcgcctcctgccccaactgcggcggccccgccgccctcggcgagatgtccttcgacgagcaccacctccgcatcgagaacgcccgcctccgcgaagagatcgataggatatcggcgatcgcggcgaagtacgtggggaagccaatggtgccgttcccggtgctgtcgaacccgatggcggcggcggcgtcgcgggcgccgctggacctccccgtggcgccgtacggcgtgccgggcgacatgttcggcggcggtggcgccggggagctgctgcgcggggtgcagtcggaggtcgacaagccgatgatcgtggagctcgccgtggcggcgatggaggagctggtccgcatggcgcagctggacgagccgctctggagcgtcgcgccgccgctcgacgccacggcggcggcgatggagacgctcagcgaggaggagtacgcgcgcatgttcccccgagggctcggccccaagcagtacgggctcaggtcggaggcgtcccgcgacagcgccgtcgtcatcatgacgcacgccaacctcgtcgagatcctcatggacgcgaatcagtacgcggcagtgttctcgaacatcgtgtcgagggccatcacgctggaggtgctgtccaccggcgtcgcggggaactacaacggtgcattgcaagtgatgtcagtggagtttcaggtgccatcgccactggtgccaacgagagagagctacttcgtgagatactgcaagcagaacgcagacgggacatgggccgtcgtcgacgtctcgctggacagcctccgccctagccccgtcctcaaatgtcgccgccgtccgtcaggctgcctcatccaagaaatgcccaatggctactccaaggtgacgtgggtggagcatgtggaggtggacgacaggtcggtgcacaacatctacaagctgctggtgaactccgggctggcgttcggcgcgcggcggtgggtcggcacgctggaccgccagtgcgagcgcctcgccagcgtcatggccagcaacatccccaccagcgacatcggcgtgattacgagctcggaggggaggaagagcatgctgaagctggcggagaggatggtggtgagcttctgcggcggcgtgacggcgtcggtggcgcatcagtggacgacgctgtccggcagcggcgccgaggacgtccgcgtcatgacgaggaagagcgtcgacgaccccgggaggccccccggcatcgtcctcaacgccgccacctccttctggctccccgtccctcccaagcgcgtcttcgacttcctccgcgacgaatcctctcgcagtgagtgggacatcctctccaatggcggtatcgttcaagaaatggcccacatcgccaatggccgggatcagggcaactgcgtctcacttcttcgcgtcaacagctcgaactcgaaccagagcaacatgctgatcctgcaggagagctgcacggacgcgtcggggtcgtacgtcatctacgcgccggtggacgtggttgcgatgaacgtcgtgctaaacggcggcgacccggactacgtcgcgctgctgccatcgggcttcgccatcctgcccgatgggccggcgcacgacggtggcgacggcgacggcggcgtcggcgtcggctccggcgggtcgctgctgacggtggcgttccagatactggtggactccgtcccgacggcgaagctctcgctggggtcggtggcgacggtgaacagcctcatcgcctgcacggtggagcgcatcaaggcggccgtctccggcgagagcaatccgcagtag

SEQ ID NO: 12127 - DNA, 3681 bp, Oryza sativa
  Clone ID: TFbOSC400964j.C1.o114.fg
atggcggggaacgagtggatcaatggctacctggaggcgatactggacagcggcggcgcggcggggggaggtggaggcggcggaggaggtggtggtggaggtggaggtggcggtggaggtggagggggagggggagtcgacccgaggtcgccggcggcgggggcggcgagcccgcgtggcccgcacatgaacttcaatccgacgcactacttcgtggaggaggtggtgaagggcgtcgacgagagcgacctccaccggacgtggatcaagctggagcttgagggaatcctgaggatttctgcacggaggaaggagcaggagcaggtgcgccgcgagacttcggaggaccttgcagaggatctgtttgaaggcgagaaggcggacaccgtcggtgaattggcacagcaagacactcccatgaagaagaagttccagaggaacttctcagagctcaccgtcagctggtccgacgagaacaaggagaaaaagctgtacattgtgctcatcaggtcttataccgcttactttactcattggtgccattctgtatatgccactaaattgcaaaattttactgagttcctttattctttgttctactttagtcttcatggtctagttcgtggcgataacatggaacttggtcgggattcagatactggaggacaggtgaaatatgttgttgaactcgcaagagcacttgcaatgatgcctggcgtgtacagagtggatctgtttactcgtcaagtgtcatctcctgaagtggactggagctatggggagcctactgaaatgttaacctccggttccactgacggagagggaagcggtgagagtgctggtgcgtacattgtgcgcattccgtgcggtccaagggacaagtacctccgtaaagaggccctgtggccttacctccaagagtttgtcgacggagctctcgcgcatatcctgaacatgtccaaggctctgggggaacaggttagcaatgggaagctggtcttgccatatgtaatccatggccactatgccgatgctggagatgtcgctgctcttctttctggtgcgctgaatgtgccgatggttctcaccggtcattcacttgggaggaacaagctggagcagatcatgaagcaagggcgcatgtcgaaggaggagattgactcaacttacaagatcatgaggcgcattgagggtgaggagctggccttggatgcagcggagcttgtcataacgagtacaaggcaggagattgatgagcaatggggactgtatgatggctttgatgtcaagctagagaaagttttgagggctcgtgcgaggcgcggagttagctgccacggccgttttatgcctagaatggtggtaattcctcctgggatggatttcagcagtgttgtggttcctgaagataccagcgatggagatgatggcaaagactttgagattgcctcgccgaggtcactgcccccaatctgggctgaggtgatgcggtttttgaccaatccccacaagccaatgattctggctctgtcaagacctgatccaaagaagaacatcaccacccttgtcaaagcatttggagaatgtcgcccactgagggaacttgcaaacctaattctgatcatggggaacagggatgacatcgatgagatgtccgctggcaatgcaagcgtcctcaccactgtcctgaagctgatcgacaagtatgatctgtacggaagtgttgcattccccaagcatcacaagcagtcagacgtaccggagatttatcgcctcacagggaagatgaagggcgtcttcatcaatcctgctcttgttgagcctttcggtctcaccctgatcgaggctgcggctcacggtctcccgatcgtcgccaccaagaacggcggtccggttgacattaaaaatgctctgaacaatggactgctggtagacccgcatgaccagcacgccattgccgacgcgctgctgaagctggtggcggacaagaacctgtggcaggagtgccggaagaacggcctgcgcaacatccagctctactcgtggccggagcattgccggacatacctcaccaggatagccggatgccggatcaggaacccgcgctggctgatggacacgccggcggacgcggccgccgaggaggaggaagccctggaggactcgctcatggacgtccaggacctctcgctgcgcctgtccatcgacggcgagcgggggtcatccatgaacgacgcgccatcgtcggacccgcaggactcggtgcagaggatcatgaacaagatcaagcggtcgtctcccgcggacacggacggcgccaagattccggccgaagcggccgccaccgccacctccggtgccatgaacaagtacccgctcctccgccgacgccgcaggctgttcgtcatagccgtggactgctacggcgacgatggcagcgccagcaagaggatgctgcaggtgatccaggaggtgttcagggctgtccggtcggactcccagatgtccaggatctccgggttcgcgctgtcgacggcgatgccgctgccggagacgctcaagcttctgcagctgggcaagatcccaccgaccgacttcgacgcgctcatctgcggcagcggcagcgaggtgtactaccccagcacggcgcagtgtgtggacgccggggggaggctgcgccccgaccaggactacctgctgcacatcaaccaccggtggtctcacgacggcgccaagcagaccattgccaagctcgcgcacgacggatccggcaccaatgtcgaaccggacgtggagtcctgcaacccccactgtgtctccttcttcatcaaagaccccaataaggtgaggacgatcgatgagatgcgggagagggtgaggatgcgtggcctccgatgccatctcatgtactgcaggaatgcaacaaggcttcaagttgttcctcttctagcatcgaggtcacaagcactcaggtatcttttcgtacgctggggcctgtctgtgggaaacatgtatctgatcgtcggggagcacggcgacaccgatcacgaggagatgctgtcagggttacacaagacggtgatcatccgcggcgtcaccgagaagggctcggagcagctggtgaggagctcagggagttaccagagggaagatgttgtcccatccgagagccccttgattgctttcacaaagggtgatctgaaggccgatgagatcatgcgtgctctcaaggaggtcaccaaggctgccagtggcatggattggcagaggccattgtgcaagactgcttattggttccaatcaagagtgtatactaacatggaagaaaaggaggaaatgaccatgctttcccttggagttggagctgctagcaagcactcaatatccaacagaaaattcagactgaaagaagtgacagatcacaaattcaaccttggagatcaagatcataacagtggccatgtgaggaagaagctaaggcttagcgaagaacaattgactgtgctggaaaatatgtatgaagctggcagcaatctcgaccaagcactaaaacaagggcttgcggagaagctgaacataaaaccacgccaagttgaagtctggtttcagaacagaagagcccggaccaaacataagcagatcgaagaagaatgcaagaaccgaggtggttggagggcctaa

SEQ ID NO: 12128 - DNA, 3084 bp, Oryza sativa
  Clone ID: TFbOSC401539j.C1.o51.fg
atggaggtagcagaggccggcgtcgacggcgtggcggggaggcggcagcaggaggaggcgtccggcgcggcgccgttcggcaggtcctcgtcgctcatcggcgccgcgggattcgacggcgcgctgagagttgagcacttgtttggcttcttgccttcttccccgatcgtgtctcccgagctcaaggaccttcgctcccagctgcaccagacggcggactgctgcgagaaggcgttcctcgacaccgagaagaagaagctaattctggagagcacgaaaggttacatctgcgacgcgattgtagcggtgattgatcatttggggaccgtctcatccaagctcgagcaacagctgcaggagaagattgagatcacacaaacagagaaaaagctcaacttcttgaagcagaggctcctgacatgtgaacagtatgcaattactctcaaactattgaccgtacgtggggacaatgatgccattcagtatcatcgccgttacctctcgcaatctactggaggaaccaaagaggaaaatggtgctaactccaggaaagatgatgtaaaatttgtggagtacaacagcccaaccatacctggagcaattcttactttcaagccatatgatattcagtcaaccattgggagagaacgttcggtggcaactacagactctgaaagcccaacaacggatgcaaagagttcattctctttcagagcagaggacgttcccattgttctagctgaacacaggaagaaggcaaatcatggcagcaatatcttgtcatttatcaggaaagtattgattggcaacaatgtacaacctaatatcactgaatccccaatttctgtcaaaccagtgtccattgaccatcatgcaggcgtgttcggccggaaaaatggacctgcggcgtcgggtggagacggggtggaggaaggcgacgaggaggtgcaggctgcaggcgaggcggcggtggagatcagcagcgagaacgcggggccggggtgtagacagtcccagtccggcggtggctccggggaagacggcggccatgacgacgacgacggagagggtagtaataagaagaggaggaggaagaactaccacaggcacaccgccgaacaaatcaggatcatggaagcgctattcaaagagtccccacatccggatgagaggcagcggcagcaggcggttcaggagcgacacgagaactcgctgctcaagtccgagctggagaagctccaggacgagcaccgcgcgatgagagagctcgccaagaagccatctcgctgcctaaactgcggcgtcgtggcaacctccagcgacgccgccgccgccgccacggcggcggacacccgtgaacagcggctgcgactcgagaaagccaagctcaaagctgagatagagaggctgcgagggacgccaggaaagtccgccgccgatggaatcgcctcgccgccgtgctccgcgtccgcgggcgccatgcagacgaacagcaggagcccgccgttgcacgaccacgacggcggcttcttacgccacgacgacgacaagccgaggatcttggagctggccacccgtgcgctggacgagctggttgggatgtgctcctccggcgagcctgtgtgggtgcggggcgtcgagaccggcagggacattctgaactacgacgagtacgtgcgcttgttccgccgcgaccacggtggttccggcgatcagatggccggctggacggttgaggcttccagggaatgtggactagtttaccttgacacgatgcatcttgtgcacactttcatggacgtggacaagtggaaggacctattccctaccatgatctcaaaggcagcgacgctggaaatgatcagcaaccgcgaagacgatggccgagacggcgtcctgcaactgatgtatgcagagcttcagacactgacaccaatggtgcccacgagggagttatacttcgcccgctactgcaagaagctggccgcggagagatgggcgatcgtcgacgtgtccttcgacgagtctgagactggcgtccacgcgtcgtcggcggtcaggtgctggaagaacccatccggctgcctcatcgaagagcagaacaacggccggtgcaagatgacctgggtggagcacaccagatgccgccggtgcacggtcgcgccgttgtaccgggcggtcaccgcgagcggcgtggcgttcggcgcgagacgctgggtggccgcgctccagctccagtgcgagaggatggtcttcgccgtggcgaccaacgttccaacgagggactcgaccggggtctccacgctcgcgggcaggaggagcgttctgaaactggcgcaccggatgacgtcgagcctctgccgcaccaccggtggatcgtgtgacatggcgtggcgcagggcgccgaaaggaggcagcggcggcggtggcgacgacgacatctggctgacgtcccgggagaacgccggcgacgaccctggcgagccgcaggggctgatcgcgtgcgccgcggcgtcgacgtggctgccggtgaatccgacggctctcctcgacttactgagggatgaatcacggcgaccagagtgggacgtgatgctacccggaaaatctgttcagagccgcgtgaatcttgcaaaggggaaggaccgtaccaactgcgtcaccgcctacgccgctcgaccggaagaagaagaagagagaggcggcaagtgggtcctccaggacgtctgcaccaacccctgcgagtcgacgatcgcgtacgcggcgatcgacgccgccgcgctgcagccggtcatcgccgggcacgactcgagcggcgtgcacctcctgccgtgcggattcatctcggtgatgccggacgggctcgagtccaagccggcggtgatcacggcgtcgaggaggggaggcgaggcttcgggggccggatcgctggttaccgtggcgttccaggtcccggccagcccgtcggcggcggcggccacgctctcgccggactcggtggaggccgtgacggtcctggtctcctccactctgcgtaacatcaggaaagccttggggtgcgactcgtgcgaggaggaattctag

SEQ ID NO: 12129 - DNA, 762 bp, Oryza sativa
  Clone ID: TFbOSC410612j.C1.o5.np
aacagcttcgtcgtctgggacccgcacgtcttcgccgacctcctcctcccgcgcctcttcaagcacaacaacttctccagcttcgtccggcagctcaacacctacgtgagcacccctaatcctaatcctaatccctttccttgtggagatagtaccaagaagaagaggagcctccccggcaacccagacccggaggcggaggtgatcgcgctgtcgccgcgggcgctggtggcgacgaaccgcttcgtctgcgaggtctgcaacaaggggttccagcgcgaccagaacctgcagctccaccgccgcggccacaacctcccctggaagctccgccaccgcgccgccgctgtctccgccgtgacgacagcggcgccggcgccgaggaagagggtgtacgtgtgcccggagccgacgtgcgtgcaccacgacccggctcgggcgctgggcgacctgaccgggatcaagaagcacttctcgcggaagcacggggagaagcggtggcggtgcgagcggtgcgggaagaggtacgccgtgcactccgactggaaggcgcacgtcaagaactgcggcacccgcgagtaccgctgcgactgcggcatcctcttctccaggaaggacagcctgctgacacacagggccttctgcgatgccctagctgaagagagtgcaaggcttcttgctgctgcaaacaacagcagcagcatcactactaccacctgcaacaacagcaacatcagcagcaacaacaacaacaacaacatt

SEQ ID NO: 12130 - DNA, 795 bp, Oryza sativa
  Clone ID: TFbOSC3919j.C1.o1.fg
atgtgtgataacaaacacgttcttagtgtctttctgccaaaaacatgtccttattgtcttgtgttgattaggacagaaacatgttacgattgcccctcaatacgttcacacgatctgaccggggctaacgagagatggcgactattcatgcagggtttccggaaggtggtgcccgatcggtgggagttcgccaacggcaacttccggcgaggagagcaaggcctcctctccggcatccgccgccgcaaggcgacgacgcctcagtcctccaaatcctgcggcagcggcgtcaacgtcgcgttccctccgccgctgccccctctgcccccggagccgtcggcgaccacgtccagcggcaacgaccgcagctcctcctccgcgtcctcgccgccgcgggcggacatcaccagcgagaacgagcagctcaggaaggacaaccaaacgctgacgatggagctggcgcgggctcggcggcactgcgaggagcttctgggcttcctgtcgcgcttcctcgacgtccggcagctcgatctccggctgctcatgcaggaagacatgcgagcggcggccggcggcgtcggcggcgagcagcgcgtgcaagagcacgcccgggaggagaagtgcgtgaagctgttcggcgtgctcctcgacgacacccatggcgccgccacgaggaagagggcgcggtgcgaggaggcggctgccagcgagcggccgatcaagatgatcaggatcggcgagccgtgggtcagcgttccatcgtcggggccggcgcggtgtggcggcgacaactga

SEQ ID NO: 12131 - DNA, 318 bp, Oryza sativa
  Clone ID: TFbOSC415863j.C1.o1.fg
atggactactcgacggtgaagcaggaggaggtggaggtggtggtgctggatggagaggaggaggcggcggcggcggcggcgccagtgccgttgccgggcggcgatgggggtgggggcggcggtggcgccgttcctggtgaagacgttcgagatggtggaggacccggcgacggacgcggtggtgtcgtggggcggcgcggcgaggaacagcttcgtggtgtgggatccccactctttctccgccggcctcctcttctccactttaagcactccaacttatccagctttctcctccagcttaacacctatatacgttga

SEQ ID NO: 12132 - DNA, 1248 bp, Oryza sativa
  Clone ID: TFbOSC11874j.C1.o4.fg
atggcggagcagggggcgggcgaggcggatgcgggcggcggggagcccgccgccggcggcggtgatgacggcggcggcggaggcgttggcggggcagaggtcgctgccgacgccgttcctgacgaagacgtaccagctggtggaggacccggcggtggacgacgtgatctcgtggaacgaggacagctcaacacctatggatttaggaagatcgtgccggaccggtgggagttcgccaacgactgcttccggcgaggggagaagcgtttgttgtgtgatatacaccgccggaaggtggtggcggcggctgccgcggcgccgccgccgccgtcgccggggatggcgacggcagctgccgcggtggcttcgggagctgtgacggtggccgcggcgccgatacctatggcgctgccggtgacgcgggcgggctcgccggcgcactcctcggaggagcaggtgctgtcgtcaaactctgggtcgggggaggagcaccggcaagcgtctgggtccggctctgcgcccggcggcggcggcggcggctccgcgtccggcggcgacatgggcgaggagaacgagcggctccggcgggagaacgcgcggctgacgcgggagctcggccacatgaagaagctctgtaacaacatcctcctcctcatgtccaagtacgccgccacccagcacgtggagggctccgcggggatatcctccatagcgaactgctccggcgagtcgtcggaggccgttcccccgccgccgcctctccccccggcgatactcgatctaatgccctcgtgccccgccctggccaccgccgccgccgctgcggggctcgccatagacggcgagcccgacccgagcgcgcggctgttcggcgtctccatcggcctgaagcggacgcgagacgacgccgccgccgccgccgacgaagacggcggcggcgaggatcaggccgagcacggcggcgcggacgtgaagccggaggcggcggatccgcatcccgccggcggcggcggcggaagcagcacggaggcgtcgccggagtcgcacccgtggcccatataccggccaacccccatgtaccacgcggtcaggcccacttgcaacgggccggacagggccgggtccgaccaagacgggtccagctccagcgtaagatccatcaggatgccggtgcacagtttggtcagttttacaagtgttttaggtgttagtgccaaaaatggtggtgacatagggcggaagcactag

SEQ ID NO: 12133 - DNA, 280 bp, Oryza sativa
  Clone ID: TFbOSC413071j.C1.o13.gm
atggaccacaacaccgaccctcctccgaccaccatggtggacgccgcggcggcgctgctgctggagcccaagctggaggggtacgacgacgacggcggcggcgagccgctgcagccggccccgttcgtctctccgctggaccagctgatgcagccgccgcggccgctggaggcgctgctgcaggggccgcatctgccgccgttcctgtccaagacgtacgacctggtgtgcgagccggagctggacgggggtcatctcctgggggccactccggctacag

SEQ ID NO: 12134 - DNA, 1620 bp, Oryza sativa
  Clone ID: TFbOSC100925j.C1.o3.gm
atggcggcggatggcgtgctggccggaggcggtgggtgccgcgaccacgtcggcgcgacgacggcaagaggcgatgggcggcgcgacaatagccggcggcggcacgcgtgcgtcgacggctgggggcaggaccgcgcccgcacgaggggagacgacggccagcggcgctatgcgcagtgccgcggtggctggggagatatttggagatggggagggttgattaggaagcaaccagacaccacggtgtatccaggccagatctgcgcggccgccggcggcggcggtggcatggctgaccagaccgctgctgccgttgtcgtcggaggaggagcggcggcgacgatgggggagccatctccacctccgccggcgccggcagcggaggcggcgggggtgggggtggggcagcagcagaggacggtgccgacgccgttcctgaccaagacgtaccagctggtggatgacccggcggtcgacgacgtcatctcctggaacgacgacggctccaccttcgtcgtgtggcgccccgccgagttcgcccgcgacctcctccccaagtacttcaagcacaacaacttctccagcttcgtccgccagctcaacacctacggatttaggaagattgtcccggacaggtgggagttcgccaacgactgcttccgccgaggggaacggcggctgctctgcgagatacaccgccggaaggtgacgccgccggcgccagcggcgacgacggcggcggtcgcggccgcgatcccgatggcgctgccggtgacgacgacgcgggatggctccccggtgctgtccggcgaggagcaggtcatatcctccagctcgtcccccgagcccccgctcgtgctgccgcaggcgccgtccggctccggctccggcggcgtcgcgtccggcgacgtgggggacgagaacgagcggctgcggcgggagaacgcgcagctcgcgcgggagctcagccagatgaggaagctctgcaacaacatcctcctcctcatgtccaagtacgcctccacccagcagctcgacgccgccaacgcctcctccgccgccgggaacaacaacaacaacaactgctccggcgaatccgccgaggcggccacgccgctcccgctccccgccgtcctcgacctcatgccttcctgccccggcgccgcctccgccgccgcgcccgtatcagacaacgaggagggaatgatgagcgcgaagctcttcggcgtctccatcggccggaagcgaatgcggcacgacggcggcggcgacgacgaccacgcggcgacggtgaaggcggagccgatggacgggcggccgcacggcaaggacgaacaatcggcggagacgcaggcctggcccatttaccggcccaggcccgtttaccagcccatccgggcctgcaacggatacgagtacgaccgagccggcagtgaccaagacggtcacgttcagttgcgtacttgcgtcaacaacctcctggtcaccggcgccggcaccctcgacgctggacgagagtacgagaccaactccctacccaggccacgacgcgcaaagaacagcaacgacgtgccagggatgcccaactcgttgggccaagcacccagcccggtcgcctga

SEQ ID NO: 12135 - DNA, 1375 bp, Oryza sativa
  Clone ID: TFbOSC412573j.C1.o1.gm
atggcggcggatggcgtgctggccggaggcggtgggtgccgcgaccacgtcggcgcgacgacggcaagaggcgatgggcggcgcgacaatagccggcggcggcacgcgtgcgtcgacggctgggggcaggaccgcgcccgcacgaggggagacgacggccagcggcgctatgcgcagtgccgcggccagatctgcgcggccgccggcggcggcggtggcatggctgaccagaccgctgctgccgttgtcgtcggaggaggagcggcggcgacgatgggggagccatctccacctccgccggcgccggcagcggaggcggcgggggtgggggtggggcagcagcagaggacggtgccgacgccgttcctgaccaagacgtaccagctggtggatgacccggcggtcgacgacgtcatctcctggaacgacgacggctccaccttcgtcgtgtggcgccccgccgagttcgcccgcgacctcctccccaagtacttcaagcacaacaacttctccagcttcgtccgccagctcaacacctacggatttaggaagattgtcccggacaggtgggagttcgccaacgactgcttccgccgaggggaacggcggctgctctgcgagatacaccgccggaaggtgacgccgccggcgccagcggcgacgacggcggcggtcgcggccgcgatcccgatggcgctgccggtgacgacgacgcgggatggctccccggtgctgtccggcgaggagcaggtcatatcctccagctcgtcccccgagcccccgctcgtgctgccgcaggcgccgtccggctccggctccggcggcgtcgcgtccggcgacgtgggggacgagaacgagcggctgcggcgggagaacgcgcagctcgcgcgggagctcagccagatgaggaagctctgcaacaacatcctcctcctcatgtccaagtacgcctccacccagcagctcgacgccgccaacgcctcctccgccgccgggaacaacaacaacaacaactgctccggcgaatccgccgaggcggccacgccgctcccgctccccgccgtcctcgacctcatgccttcctgccccggcgccgcctccgccgccgcgcccgtatcagacaacgaggagggaatgatgagcgcgaagctcttcggcgtctccatcggccggaagcgaatgcggcacgacggcggcggcgacgacgaccacgcggcgacggtgaaggcggagccgatggacgggcggccgcacggcaaggacgaacaatcggcggagacgcaggcctggcccatttaccggcccaggcccgtttaccagcccatccgggcctgcaacggatacgagtacgaccgagccggcagtgaccaagacg

SEQ ID NO: 12136 - DNA, 1155 bp, Oryza sativa
  Clone ID: TFbOSC400591j.C1.o27.fg
atggcgtcctcctcctcctcctcctccctctgccgactactcatccccaggccgaccacccgccgcttctccggaggaggaggggaggggggaatggcggcggcggcgccggtgaagcgggaggtgaagcccgaggcgggggaggggtggggcgggggtgatctgggggtggtgccgccgccgccgcggccgatggaggggctcggggaggcggggccggcgccgttcgtggcgaagacgtacgagatggtggcggacgcggccaccgacgcggtggtgtcgtgggggcccggcggctcgggggcctccttcgtggtgtgggacccgcacgcgctcgccgccggcgtgctcccgcgcttcttcaagcacgccaacttctcctccttcgttcgccagctcaacacctacgggttccgaaaggtcactccagatcggtgggagtttgcaaatgaagccttcttagctggtcagaagcatttgctgaaaaacatcaagaggaggcgtgtttccaagcctctcgtggattcacaactaagaaataaagcaagtgttgtttttggacagcctgaggctcctggtgaggttgtgagcttgaagagagaccgtgcagccctcagagctgaggtcatcatgcttaagcagcagtacaacgcctgtaaatctcagctcattgccatggaggagatggtccgcaacatcgagagaaggcaacagcagaccatcggcttctttgccaaggtactcaccaacccggctttcgtgcagcaggttctactcaactatgtgaataagaatggcctaagaggcgccgcgaaaagacaacggctgatggaaaacgaagaacagcatgctgattcgccattgaacaaaggtatggaagctgcatctgtgatggaagctgatgtttctccagggagcactggctgtggcacagttgggaaagtggagaccactccaatgtgcaatttccagaatattgagaatatgtgtgatgatgtctgggaagagctggacgccttacctgaaactggaatggagcaggaagaaaaggctgggattggctccttcgatgtcgaggagttcgtcggaaggccttgtggttgggttgatgactgcccataccttgtggagccgatgcagttcgtggaacactag

SEQ ID NO: 12137 - DNA, 1119 bp, Oryza sativa
  Clone ID: TFbOSC401020j.C1.o22.fg
atggatgatccaatgctgaatgcggtgaaggaggaggagagccacggggacggaggagggttggaggtggtggcgggagaggatggggcggcggcggtggcggcgggggtggcgccgaggccgatggaggggctgcacgacgccgggccgccgccgttcctgaccaagacgtacgacatggtggacgacgccggcaccgacgccgccgtgtcgtggagcgcgacgagcaacagcttcgtggtgtgggatccccacgccttcgccaccgtcttgctccccaggttcttcaagcacaacaacttctccagcttcgtcaggcagctcaacacctatggtttcagaaaggtggatcctgatcggtgggaatttgcaaatgagaattttctgcggggacagagacatcttctcaagaacatcaagcgtagaaaaccaccttcccatactgcttcaaaccagcaatcccttgggccataccttgaggtgggccactttggatatgatgctgagatagaccggctgaagagagacaagcaattattgatggctgaggtggtgaagctaaggcaggagcagcagaatacaaaggcaaatctgaaagccatggaggataggctgcaaggaaccgagcagaggcaacagcagatgatggcattcttggcgcgtgtcatgaaaaatcctgagttcttaaaacaacttatgtcccagaatgagatgagaaaggagctccaagatgccatttcaaagaaaagaaggcgtcgcatagatcagggacctgaagttgacgacgtcggcactagcagtagcatagagcaagagtcaccggccttgtttgatccccaggagtcggtggaattcctcatcgatgggattccctccgatcttgaaaactcagctatggatgctggaggtctggtggagccacaggatttcgatgtcggcgcctccgaacagcagcagatcgggccccagggggagttgaacgacaatttctgggaggagctgctgaacgaagggcttgttggtgaggagaacgacaacccggtcgtcgaggacgacatgaatgtgttgtcggagaagatgggttacctcaactcaaatggcccaacggctggggaatag

SEQ ID NO: 12138 - DNA, 1047 bp, Oryza sativa
  Clone ID: TFbOSC401122j.C1.o44.fg
atggacgggctgcacacggagctcgcgctggggctgatcgggtgctgcggcggcgacgggcagcagcagacggcgccgttcgtggcgaagacgtaccagatggtgtgcgacccgcggacggacgcgctcgtccggtgggggagggacaacaacagcttcgtcgtcgtcgaccccgccgccttctcgcagctcctcctcccctgcttcttcaagcacggcaacttctccagcttcgttcgccaactcaacacctacgtcagtatcattcaatcgccggcgccgggattccggaaggttcaccctgaccggtgggagttcgcgcacgagtcgttcctgcgcggccagacgcacctgctgccgcgcatcgtgcgccgcaagaagcgtggcgagggcggcggtggcggtggcggcgcgtcctgctctttcggtggcggcgccggcgagcaccaggtggctgctgctgcggccagcgtgggaatgtcgggagaggaggaggatgcggcggaggacgtgctggccaaggaggccgcgctgttcgaggaggtgcagaggctgcggcacgagcagacggccatcggggaggagctggcgcggatgagccagcggctgcaggcgacggagcggcggcccgaccagctcatgtccttcctcgccaagctcgccgacgaccccaacgccgtcacgggccacctcctcgagcaggccgccgagaggaagcgccggcgccagcacctcccttcccacgagcccaccgtctgtcccctcccgccggcgccgccgccacaacctccgcagccgctcctggctctcgccggcgccgcggccatggacggcacctactggtggacgacggagcatcatcatcatcatcatcatcagatgaagcccatgacggtgttgccatccttggagccgcccaccgctagctgcggcgtgcaccaagtgccggagctcgggggtggcggcgtgatgggcttaacgacggacggtgaggccaaggtggagccgccattcccattctgtctacttggtcaagctttcttttaa

SEQ ID NO: 12139 - DNA, 1449 bp, Oryza sativa
  Clone ID: TFbOSC401064j.C1.o105.fg
atggaggggggcggcgggggcgggtcgctgccgccgttcctgagcaagacgtacgagatggtggacgacccgtcgacggacgcggtggtggggtggacgcccgccggcaccagcttcgtcgtcgccaaccagcccgagttctgccgggatctgctccccaagtacttcaagcacaacaacttctccagcttcgtgcgacagctcaacacctatgattttaagacagtacttgtgaataaccaaggtcaactcttgttctaccaagaaaattcaagtagcttattgcaatgttattgtcttctccatccggttgaagttgtacaaaaatgtttgataatgggctttaggaaagtagatccagaacaatgggaatttgcaaatgaggatttcataaaaggacagcggcaccggttgaaaaatatacatagacgcaaacctatattcagccattcatcacacagtcagggtgctggaccattaacagataatgaaaggaaagactatgaggaagaaatcgagaggctcaaatccgataatgcagcactgtcctcagagcttcaaaataatacgttgaagaaacttaatatggagaaacgaatgcaggctttggaagagaagctatttgttgtggaagatcagcagaggagtctgatatcatacgtcagagagattgtaaaggcaccaggatttctttctagctttgtacagcaacaagatcatcacaggaagaagaggagactgccaataccaatctccttccatgaggatgcaaatactcaggagaaccagatcatgccttgtgacttgaccaactcaccagctcagacattttacagagaatcatttgacaagatggaatcatccttgaactcattagaaaatttccttcgagaagcaagtgaagaatttggtaatgatatttcatatgatgatggtgtcccaggcccttcttcaactgttgttctcacagagctccattcacctggtgaaagtgatccccgtgtttcatcacctccaacaaggatgcgtacttcgtcagctggtgcaggagattcgcactcctctcgtgatgtagcagagtctaccagctgtgcagaaagtcctcctattcctcaaatgcattctcgtgtagatacacgagcgaaggtttctgaaatagatgttaattcagaacctgctgttacagaaactggtccatcaagagatcaacctgctgaagagcctcctgctgtcacacctggtgcaaacgatggcttctggcagcagtttcttaccgagcagcctggatcatcagatgcacatcaggaggctcaatcagaacggcgagatggaggaaacaaggtggatgagatgaaatcaggagatcgacaacatctttggtggggcaaaaggaacgttgagcagataacagaaaaacttggacttctcacctcaacggagaaaacctga

SEQ ID NO: 12140 - DNA, 1584 bp, Oryza sativa
  Clone ID: TFbOSC400288j.C1.o6.gm
atggaccacaacaccgaccctcctccgaccaccatggtggacgccgcggcggcgctgctgctggagcccaagctggaggggtacgacgacgacggcggcggcgagccgctgcagccggccccgttcgtctctccgctggaccagctgatgcagccgccgcggccgctggaggcgctgctgcaggggccgcagctgccgccgttcctgtccaagacgtacgacctggtgtgcgagccggagctggacggggtcatctcctggggccacgccggcaacagcttcgtcgtctgggacccctccgccttcgcgcgcgacgtgctcccccaccacttcaagcacaacaacttctccagcttcgtccggcagctcaacacctatggttttcgcaaggttcatgctgatagatgggagtttgctcatgaggatttcctacgacatagcaaacatttgttgaagaagattgtccggcgcaggtcctcaccaacacaacaaagtggtcttcagcctggctcttctggtgaatccggtttagaccctgaactcaacacactgagaagggagaagagtgcattgcttcaggaggtgaccaggctgaagcaagagcaccttcagacaattgaacaaatgagcacgctgaatcagaggctagaatcagcggaagatcggcagaaacagatggtctctttcttggccaagctcctccagaacccaactttcctgaggcaacttaagatgcacagacagcaaaaggaaatcgactccaccagagtgaaaaggaaattcctcaagcatgtaccacatggcaacattgactcaggtgagtccagctcacaacacactggagagagcaatttagatttctcccctacgtccctggaccttccagccacgcacagtgacatcttagaccttcagaattttcttttggaagatggggacctcaatcttgccatgctgccagagaacataggacttgatggaatcgaagcaccagacgacatcggggcgttggttcagggatttgacacacaggaggaacttgagcttggtagcggagttgagctactggaaatacctccagcttctggtcctcgtggccaagatcccacgattggcagatccaagggaaagaatgtattgtctccaggattggatgctacctcttctgaagctgattgcctcggatcattttctgacaatatggggatgctttctgactccatgttacaaacagcgggtaaattgatggatgcagatgatgacgagcgaatttggggcgtcgatgcttcgtcggctttacaaagttcttgcagtggcactagtcagcaagcatatggtagtcttgttagtgatccctatctgatggagatggctaataagcctgaaaaattctgggagctcgattttcaggcactggatgatggagatctgcagctggacaatcctgagaaggtgctggacacaggcgtggttgctcaggctcaggcgcttgaattgggtggcctgactcaggcaaccgaattaaagaaggcatgcttttttctcaggctcatcactcagggcaccaaccaaacaggcccttag

SEQ ID NO: 12141 - DNA, 1074 bp, Oryza sativa
  Clone ID: TFbOSC101218j.C1.o11.fg
atgaactaccgagtggtgaacccggtgaaggtggagagcgggccgtcgacgggcgtggcgaatggccagccgccgaggccgatggacgggctcgccgacggcggcccaccgccgttcctcaccaagacgtacgacatggtggatgacccgaccacggacgccgtcgtgtcgtggagcgccaccaacaacagcttcgtggtgtgggatcctcacctctttgggaacgtgctgctgccgaggtacttcaagcacaacaacttctccagcttcgtccggcagctcaatacctatggcttcaggaaggtggatcctgacaagtgggaatttgcaaatgagggttttctgagaggacagaagcatctccttaaaagcataaagcgtcggaaacctccgaattcatctccaagtcagcaatctcttggctcattccttgaggtagggcacttcggatatgagggagagattgatcagttgaagagggacaaacatctgttgatggctgaagtggtgaagctgaggcaggagcagcaaaacacaaagtcagacctgcaagctatggaacagaagctacaaggtactgagcaaaagcaacagcacatgatggcattcttgtcacgagttatgcataatcctgagttcatacgccagctgttctcccagagtgagatgaggaaggagcttgaagagttcgtctcaaagaaaagaaggcgccgcattgaccagggacctgaacttgatagcatgggtaccggttctagccccgagcaagtgtcacaggtaatgtttgaaccacatgatccagtggattcacttttcaatggtgttccatcagatcttgaaagttcatctgttgaggccaatggaggcaaggcgcaacaagatgttgcttccagtagctctgaacacgggaaaatcaagccatctaacggagagttaaatgaggatttctgggaggacctgctgcacgagggtgggctcgatgaggataccaggaaccccgctatagatgatatgaacttgctgtctcaaaagatgggctacctcaactcaagcagcaccaaatcgccacagtag

SEQ ID NO: 12142 - DNA, 933 bp, Oryza sativa
  Clone ID: TFbOSC13607j.C1.o1.fg
gggttcaggaaggtcgtgccggagaggtgggagttcgcgaacgagttcttcaggaagggggagaagcagctgctcaccgagatccaccgcaggaagacgtcgtccgcatcgacggcgtcgccgtctccgccgccgttcttcgcgccgccgcacttccctctgttccaccaccccggcgtcgcggcggctcagcaccaccacgcgttcgtcggcgacgacggggttgtggcggcgcatggcatcggcatgccgttcccgcagccgcattggcgggagccgaacttgccggtcgcgacgcgcctgctcgcgctaggcgggcccgcgccgtcgccgtcgtcggcggaggccggcggcgccgggcgcgccgccaccgccgcggtgctgatggaggagaacgagcgcctgcggcggagcaacacggcgctgctgcaggagcttgcgcacatgcgcaagctgtacaacgacatcatctacttcgtgcagaaccacgttcgtcccgtggcgccgagcccggcggcggccgcgttcctgcagggcctcggcatgcaggcgcgcaagaagcccgccgccgccaacgtgctcaacaactcaggcgggagcacaacgtcgagcagctcgctcaccatcgccgaggagccttcccctccgccgcagcagcagcatctagccggcgagaagagcggcggggaggcaggcaacagcagcgccgctcggtcatcggcgccgaccaagctcttcggcgtgcacctaagcgccgccccgtgcggcgccggcagcaagagagcgtcttcgccggaggagcacccgcccacgtcgccggccacgaagcctcgcctcgtgctggagtgcgacgacctaagcctgaccgtcgcgccgtcgtcgtcgtcgcagcagcagctgtcagccgcctcttctccaacaagcaccagctag

SEQ ID NO: 12143 - DNA, 1494 bp, Oryza sativa
  Clone ID: TFbOSC400132j.C1.o6.fg
atggaagttgccgccggcgcccgcggcggcggggccggcggaggagggggaggccccgcgccgttcctgctcaagacgtacgagatggtggacgacccgtcgacggacgcggtggtgtcgtggagcgacgcctccgacgcgagcttcgtcgtctggaaccacccggagttcgccgcccgcctgctgcccgcctacttcaagcacagcaacttctccagtttcatccgccagctcaacacctacatatctttattggaaaatgattcttcaacaatgttttgtctaactactaagaagttggtattgcaaggattccgtaaaatagatccagagcgatgggaatttgccaatgagtacttcatcaagggacaaaagcacctgctgaagaatatccacaggcgtaagcctatccacagccacagccatccaccaggtgctctgcccgataatgagcgtgcaatatttgaggatgagatcgaacggctttcacgagagaaatccaacctccaggctgacctctggaaatccaagcagcagcagtcgggaacgatgaaccagattgaagatcttgagcgacgagtgcttggcatggagcagcgacagaccaagatgattgccttcttgcagcaagctagtaagaaccctcagtttgtcaacaagcttgttaagatggcagaagcatcttcgattttcacggatgctttcaataagaagagaaggttacctggtttggattacagtatcgagaacacagaaaccacaagcttttatgatgaccatagcagcacttctaagcaagaaacaggcaatcttttaaatcagcacttctctgataagcttaggttgggactttgtcctgccatgacagagagcaatatcatcacgctaagcacgcaaagctcaaacgaagataacagaagccctcatggtaaacatccagagtgtgacatgatggggagggaatgtctcccgttggtgccgcagatgatggaactctccgataccggcacatctatctgcccctccaagagctcttgctttgcaccacctataagtgatgaaggcctcttaacatgccatctgagtctaactcttgcatcatgctcgatggatgttgacaaaagccaaggcctcaatgcaaatgggaccactatagacaacccaactgaggcagcaacagctaccatggaaaaggatgacaccattgacagaagcttcgatgacaaccaaaagaaatcagctgattctcgtacagcagatgccacaacaccacgagcggatgcacgagtagccagtgaggctcctgcagccccggctgcagtggtgaatgacaagttctgggagcagttcctaacagagcgacctggctgctctgaaactgaagaagcaagctctggcctaagaacagatacttccagggagcaaatggagaacaggcaggcatatgatcactcacggaatgacagagaagacgtggaacaactgaaactctga

SEQ ID NO: 12144 - DNA, 750 bp, Oryza sativa
  Clone ID: TFbOSC400222j.C1.o63.fg
atgggcggcgagtgcaaggtccaccagctccaggccgccggcgacgggggcccaggcgccgtcgcgccgttcgtggcgaagacgttccacatggtgagcgacccgtcgacgaacgccgtcgtgcgctggggaggcgccggcaacacgttcctcgtgctcgaccccgccgccttctccgacttcctcctcccctcctacttcaagcaccgcaacttcgccagcttcgtccggcagctcaacacctacggattccgcaaggtggatccggacaggtgggagttcgcgcacgagtcgttcctgcgggggcaggcgcagctgctgccgcggatcgtgcgcaagaagaagaagggcggggcggcgccggggtgcagggagctgtgcgaggaaggggaggaggtgcggggcaccatcgaggcggtgcagcggctgcgggaggagcagaggggcatggaggaggagctccaggccatggaccagaggctgcgcgccgccgagagccgcccgggccagatgatggcgttcctcgccaagctcgccgacgaaccgggcgtcgtgctgcgcgccatgctcgccaagaaggaggagctggccgcggccggcaacaacgggtccgatccctgcaagaggcggcggatcggggccgacacggggcgcggcggcgtggcgaccggcggcgacgcggccgagatggcgcagagcagaggcaccgtgccgttcccgttctctgttcttggccaagtgttctactag

SEQ ID NO: 12145 - DNA, 718 bp, Oryza sativa
  Clone ID: TFbOSC900200j.C1.o6.np
tcactgcttttatagaataagtgcaagtcaattctcctgtcattatcggcgcaaaaggcggtgccggcgccgttcttgaccaagacgtatcagctggtggatgacccggccactgaccacatcgtctcgtggggggacgaccgggtgtccaccttcgtcgtgtggcggccgccggagttcgcgcgcgacatcctccccaactacttcaagcacaacaacttctcgtcgttcgtccgccagctcaacacctacgggttcaggaaggtcgtgccggagaggtgggagttcgcgaacgagttcttcaggaagggggagaagcagctgctcaccgagatccaccgcaggaagacgtcgtccgcatcgacggcgtcgccgtctccgccgccgttcttcgcgccgccaccaccacgcgttcgtcggcgacgacggggttgtggcggcgcatggcatcggcatgccgttcccgcagccgcattggcgggagccgaacttgccggtcgcgacgcgcctgctcgcgctaggcgggcccgcgccgtcgccgtcgtcggcggaggccggcggcgccgggcgcgccgccaccgccgcggtgctgatggaggagaacgagcgcctgcggcggagcaacacggcgctgctgcaggagcttgcgcacatgcgcaagctgtacaacgacatcatctacttcgtgcagaaccacgttcgtcccgtggcgccgagc

SEQ ID NO: 12146 - DNA, 1221 bp, Oryza sativa
  Clone ID: TFbOSC6909j.C1.o1.fg
atgggctctaagaagcggtcgcctcagcatccggccgccgcggcgccccctcccgccgtcggcggcggcggcggcggcgaggtctccggcgatggtggcgcctcgacggcgaacgggccggtggtgccgaagccgtcggaggtggcgccgttcctgacgaaggtgtacgacatggtctcggaccccgcgaccgacaacgttatctcgtgggccgagggcggcggcagcttcgtgatctgggactcgcacgccttcgagcgcgacctccacaggcacttcaagcacagcaatttcaccagcttcatacgccagctcaacacctatggatttcgtaaagttcaccctgatagatgggagtgggccaatgaaggttttattatgggccaaaaacatcttctgaagaccattaagaggaggaagaagtcttctcaggaatcacctagcgagatacagaaggcgcctgtcaaaactgcacctggtactgaaaatattgagataggaaaatatggtggccttgaaaaggaggttgaaacccttaagagggataaagctcttctcatgcagcagcttgtagatctcaggcactaccagcaaacatctaaccttgaagtgcagaatttaattgaacggcttcaagtaatggaacagaaccagcagcagatgatggcacttctagcaatcgttgtccagaatcctagttttctcaaccagcttgtgcagcaacagcagcagcagcgcagatccaactggtggagtcctgatggaagcaagaaaaggagatttcatgctcttgagcagggccctgtaactgatcaggagacctctggccgtggggcacatattgttgaatatctcccacctgtcccagaaacatcaggtcaagtaaatccagtggaaggagccatttgttcggccaactcacaaccagttccaagtcctgcagttgccacacccatggacatgcaaacgtctaacgttgctgatactctcggttcatctgaggagcctttcgctgataactctactctacatgaatgggatgataacgacatgcagcttctgtttgatgataacctagacccaatacttccaccatttgagaatgatggtcaaatgggccctcctttgagtgttcaagattatgattttccgcagttagagcaggattgtctgatggaagcacaatataactccaacaatcctcaatatggtaatgactaa

SEQ ID NO: 12147 - DNA, 364 bp, Oryza sativa
  Clone ID: TFbOSC410068j.C1.o11.gp
caagaaaacagaacacacaatttcccaacaactgaagacaagcagggaacaacactagtggtggcaatggaaattggggggactcacgtaggtgttgagctggcggacgaagctggagaaattgttgtgcttgaagaagcgtgggaggaagacggcggcgaagacgtgggggtcccagacgacgaagctgctgcccgcgcggccccacgagacgacgccgtcggtggccgggtcggccaccaggtcgaacgtcttggtcaggaacggcggcggcccgacctcgtgcagcccctccatgggcctcggcgcctccccctcctccggcgagctcggcggccactcctccttcaccatccccggcatc

SEQ ID NO: 12148 - DNA, 652 bp, Oryza sativa
  Clone ID: TFbOSC401518j.C1.o1.np
ctccctggcatcctcgtcctcgaggtcatccctggctccgccgccgccggccggccgtggcggtggcggggtggcgccgttcgtggcgaagacgtaccggatggtggacgacccggccaccgacggcgtcatcgcctggggcagggacagcaacagcttcgtcgtcgccgaccccttcgccttctcccagaccctcctccccgcccacttcaagcactccaacttctccagcttcgtccgccagctcaacacctacgggtttcgcaaggttgatccggacaggtgggagttcgcgcacgtgtcgttcctgcgcggccagacgcacctgctgcgccggatcgtgcgacggagcagcggcggagggggagcgaagaggaaggaggaggccggcggttgcggcggcggaggggaggcggccgccggggacgtcgacgaggagagcgccgtggtggccttggaggtggcgcggctgaggcgggagcagcgggagatcgagggccgcgtcgccgcgatgtggcgccgcgtgcaggagacggagcgccgccccaagcagatgctcgccttcctcgtcaaggtcgtcggcgacccgcagttagtcactatatttcgtgtactagcatatatttcacctagcagtggttttctaagtatc

SEQ ID NO: 12149 - DNA, 1341 bp, Oryza sativa
  Clone ID: TFbOSC11879j.C1.o9.fg
atggcggagcagggggcgggcgaggcggatgcgggcggcggggagccgccgccggcggcggtgatgacggcggcggcggaggcgttggcggggcagaggtcgctgccgacgccgttcctgacgaagacgtaccagctggtggaggacccggcggtggacgacgtgatctcgtggaacgaggacgggtcgacgttcgtggtgtggcggccggcggagttcgcgcgggacctcctccccaagtacttcaagcacaacaacttctccagcttcgtgcgccagctcaacacctatggatttaggaagatcgtgccggaccggtgggagttcgccaacgactgcttccggcgaggggagaagcgtttgttgtgtgatatacaccgccggaaggtggtggcggcggctgccgcggcgccgccgccgccgtcgccggggatggcgacggcagctgccgcggtggcttcgggagctgtgacggtggccgcggcgccgatacctatggcgctgccggtgacgcgggcgggctcgccggcgcactcctcggaggagcaggtgctgtcgtcaaactctgggtcgggggaggagcaccggcaagcgtctgggtccggctctgcgcccggcggcggcggcggcggctccgcgtccggcggcgacatgggcgaggagaacgagcggctccggcgggagaacgcgcggctgacgcgggagctcggccacatgaagaagctctgtaacaacatcctcctcctcatgtccaagtacgccgccacccagcacgtggagggctccgcggggatatcctccatagcgaactgctccggcgagtcgtcggaggccgttcccccgccgccgcctctccccccggcgatactcgatctaatgccctcgtgccccgccctggccaccgccgccgccgctgcggggctcgccatagacggcgagcccgacccgagcgcgcggctgttcggcgtctccatcggcctgaagcggacgcgagacgacgccgccgccgccgccgacgaagacggcggcggcgaggatcaggccgagcacggcggcgcggacgtgaagccggaggcggcggatccgcatcccgccggcggcggcggcggaagcagcacggaggcgtcgccggagtcgcacccgtggcccatataccggccaacccccatgtaccacgcggtcaggcccacttgcaacgggccggacagggccgggtccgaccaagacgggtccagctccagcgtaagatccatcaggatgccggtgcacagtttggtcagttttacaagtgttttaggtgttagtgccaaaaatggtggtgacatagggcggaagcactag

SEQ ID NO: 12150 - DNA, 1380 bp, Oryza sativa
  Clone ID: TFbOSC401582j.C1.o3.fg
atggagagttccaacctgggcggcggcggcggcggaggcggcggcggtgggccgccgccgttcttgatcaagacgtacgagatggtggaggacgcggcgaccaaccacgtcgtgtcgtggggccccggcggcgccagcttcgtcgtgtggaacccgctcgacttctcccgtgacctgttgcccaagtacttcaagcacaacaacttctccagcttcatcaggcagctcaacacctacggtttccgaaaaatcgatcctgagagatgggagttcgcaaacgaggatttcataagagggcacacgcaccttctgaagaacatccatcgacgcaagcccgtgcacagccactccctccagaaccagataaacggaccactcgccgaatcggagaggcgcgagctcgaagaagagatcaaccggctcaagtacgagaagagcatcctcgtcgcggacctccagaggcagaaccagcagcagtacgtgatcaactggcagatgcaggcgatggaaggcaggctagtggcgatggagcaacggcagaagaacatcgtggcctccctgtgcgagatgctgcagagacgcggtggcgccgtgtcgagctcgctgctggagtccgaccatttcagcaagaagaggagggtcccgaagatggatctcttcgtcgacgattgcgcggcgggcgaagaacagaaggtgttccagttccagggaattgggacggatgcaccggccatgcctcccgtgcttcctgtgaccaatggtgaggcttttgacagggttgagctgagcctggtctccctggagaaactcttccagagagcaaatgatgcttgcacagctgctgaagaaatgtactcccatggtcatggtggtactgaacccagcactgctatatgtcctgaagagatgaacactgctccaatggagacaggcatcgatcttcagttaccagctagcctccatcccagctcacccaacacagggaatgcccatctccatttatccactgaactcacagagtctccaggttttgtgcagagtccagagctgccaatggcagagattcgtgaagatatccatgtgacaagatacccaacacaagctgatgtaaattctgagattgcctcctccactgatacttcacaagatggcacgtcagaaactgaagcttcgcatggaccgaccaacgatgtgttttgggagcggttcctcacagagactccacggtcatgtttggatgagtcagaaagacaagagtctcccaaggacgatgtaaaagcagaattaggctgcaatggcttccatcaccgggagaaggttgatcagatcaccgagcaaatggggcaccttgcttcagccgagcagactctgcatacctga

SEQ ID NO: 12151 - DNA, 1140 bp, Oryza sativa
  Clone ID: TFbOSC410068j.C1.o13.fg
atggagaagatgatgccggggatggtgaaggaggagtggccgccgagctcgccggaggagggggaggcgccgaggcccatggaggggctgcacgaggtcgggccgccgccgttcctgaccaagacgttcgacctggtggccgacccggccaccgacggcgtcgtctcgtggggccgcgcgggcagcagcttcgtcgtctgggacccccacgtcttcgccgccgtcttcctcccacgcttcttcaagcacaacaatttctccagcttcgtccgccagctcaacacctacttcttggtccggacgaattacctgaacaagcgatcacatttctacagtttgagatttcagggtttcagaaagattgatcctgacagatgggaattcgcgaatgatggtttcctgagaggccagaggcatcttctaaagatgattaagaggaggagaccattgtcttatctccctggatctcagcaggcacttggcacctgccttgaggttggtcagttcggattagatgaagagatcgacaggctaaagcgtgacaagaacatcttactcgcggaggttgtgaaactaaggcacaagcagcaaagcacgaaagccaatatgcgagccatggaagagaggctgcaacatgcggagcagaagcaggtccagatgatgggtttcttggcaagagcaatgcagaaccctgacttctttcaccagttgattcaccagcaggataaaatgaaggggctcgaggacacattctcgaagaagaggacgaggtcgatagacatagtgccatttctcaaccccggggaggtcagccagggcgatcaactcgagtcgacattgctgtttgatccaaggccatttgctgaactgaatgatgagcctgcaaagtctgaactggagaatttagcactgaacatccagggtcttgggaagggcaagcaggatgtcaacaggactcgaaatcagccacgaaatcaggctagcaacgaaaccgagttaaccgacgacttctgggaggagcttctgaatgaaggagcaagagatgatgctgggattccagggatggagcgaagaagacctagatatgtcgatgcattagcgcagaagctgggttatctaagcaatagtagccaaaagtag

SEQ ID NO: 12152 - DNA, 933 bp, Oryza sativa
  Clone ID: TFbOSC400606j.C1.o13.fg
atggctttcttggtggagaggtgcggggagatggtggtgtcgatggagatggggccgcacggcggcggcggcgcggcggcggggaagccggtgccggcgccgttcctgacgaagacgtaccagctggtggacgacccctgcaccgaccacatcgtgtcgtggggcgaggacgacaccaccttcgtcgtgtggcggccgccggagttcgcccgcgacctcctccccaactacttcaagcacaacaacttctccagcttcgtcaggcagctcaacacctatggtttcaggaagatagtagctgacaggtgggagttcgccaacgagttcttcaggaagggagccaagcacctcctcgccgagattcaccggcggaagtcgtcgcagccgccgccgccgccgatgccgcaccaaccctaccaccaccaccaccacctcaatcccttctcgctgccgccgccgccgccggcgtaccaccaccaccatctaatccaagaagagcccgccacgacggcgcactgtactgtcgccggagacggcggcgaaggcggggacttcctggcggcgctgtcggaggacaaccggcagctgcggcggcgcaactcgctgctgctgtcggagctggcgcacatgaagaagctctacaacgacatcatctacttcctccagaaccacgtcgcgccggtcaccaccaccaccaccaccccctcgtcgacggccatggcggcggcgcaacaccaccttccagccgccgcctcctgcaggctgatggagctcgactcccccgatcactcgccgccgccgccgccgcccaagactccagcaaccgacggcggcgacacggtgaagctgttcggcgtgtcgctgcacggcaggaagaagcgggcgcaccgggacgacgacgacggcgtccatgaccagggaagcgaggtgtga

SEQ ID NO: 12153 - DNA, 870 bp, Oryza sativa
  unsure (1)..(870): unsure at all n locations
  Clone ID: TFbOSC900153j.C1.o12.fg
atggcggagcagggggcgggcgaggcggatgcgggcggcggggagccgccgccggcggcggtgatgacggcggcggcggaggcgttggcggggcagaggtcgctgccgacgccgttcctgacgaagacgtaccagctggtggaggacccggcggtggacgacgtgatctcgtggaacgaggacgggtcgacgttcgtggtgtggcggccggcggagttcgcgcgggacctcctccccaagtacttcaagcacaacaacttctccagcttcgtgcgccagctcaacacctatggatttaggaagatcgtgccggaccggtgggagttcgccaacgactgcttccggcgaggggagaagcgtttgttgtgtgatatacaccgccggaaggtggtggcggcggctgccgcggcgccgccgccgccgtcgccggggatggcgacggcagctgccgcggtggcttcgggagctgtgacgacgagcgacaggctggttggcgtctccatcggcctgaagcgggcgcgagacgacnccgccgccgccgccgacgaagacggcggcggcgaggatcaggccgagcacggcggcgcggacgtgaagccggaggcggcggatccgcatcccgccggcggcggcggcggaagcagcacggaggcgtcgccggagtcgcacccgtggcccatataccggccaacccccatgtaccacgcggtcaggcccacttgcaacgggccggacagggccgggtccgaccaagacgggtccagctccagcgtaagatccatcaggatgccggtgcacagtttggtcagttttacaagtgttttaggtgttagtgccaaaaatggtggtgacatagggcggaagcactag

SEQ ID NO: 12154 - DNA, 267 bp, Oryza sativa
  Clone ID: TFbOSC3927j.C1.o1.fg
atggctgctgctgaggcggcggcggcggtggggaagcagcagcagaagggcggcgggggaaggggaggaggcggcggtgggccggcgccgttcctgacgaagacgaaccagatggtggaggagagcgcgacggacgaggtgatctcgtggggaaaggaggggcggtcgttcgtggtgtggaagccggtggagttcgcccgcgacctcctcccgctccacttcaagcactgcaacttctcctccttcgtccgccagctcaacacctac

SEQ ID NO: 12155 - DNA, 966 bp, Oryza sativa
  unsure (1)..(966): unsure at all n locations
  Clone ID: TFbOSC101002j.C1.o3.fg
atggcggcggcggcgggaggaggggcggcgccgttcgtgtggaagacgtacaggatggtggaggaccccgggacggacggggtgatcgggtgggggaaagggaacaacagcttcgtcgtcgccgaccccttcgtcttctcccagaccctgctccccgcccacttcaagcacaacaacttctccagcttcgtccgccagctcaacacctatgtcagtctcgtcactcccagttctatttcatcgtctcatcatactccccccctctctgcacttcacatcatgctgccatggattctcagtggtacccaactcaaaggtttccgcaaggtggatccggatcggtgggagttcgcccacgcgtcgttcctgcgtggccagacccacctcctgcgcaacatcgtccgccgcggcagcgcggccgccggcgggggaggcggcggcggcggcggcaagcgcagggacgcgtcggcggacggcggcggcggcggcggcgatgaggacatgacgatggtggcgacggaggtggtccggctgaagcaggatcaacgcaccatcgacgacagggtggccgcgatgtggcgccgcgtgcaggagacggagcggaggcccaagcagatgctcgccttcctcctcagggtcgtcggcgaccgcgacaagctgcaccgcctcgtcggcggcggcggctacngcaacggctccgctaccgccgccgccgccgacaacgggttcgcggacgccgcgcgggcggggtgcggcgagaagcgcgcgaggctgctgctcgacggcgacaacaccggcgcgttcggcccggaccgccgtcgacttcgccgggttctacaccggcgccgacatgttccccgacgttgccgtcgatgccgccgccgccgccgccggcgggtcagccggctgctcgttcgctttcggagtggacagcggctactgattctctcgctcctcaccgactga

SEQ ID NO: 12156 - DNA, 1143 bp, Oryza sativa
  Clone ID: TFbOSC414105j.C1.o3.fg
atggagtgggaggaggagagcgaggcggcgcgtcagaaggcggcggcggcgtcggcgtcggtggtgcccgcgccgttcctgaccaagacgtaccagctcgtcgacgaccccgcgaccgaccacgtcgtgtcgtgggaggacgacgacggcggcgagtccgcctccagcttcgtcgtgtggcggccaccggagttcgccagggacatcctccccaactacttcaagcacagcaacttctcctccttcgtccgccagctcaacacatatgggtttaggaaggtcgtgccggagaggtgggagttcgccaacgagttcttcaggaagggcgagaagcagctgctgtgcgagatccaccggcgtaagtccgcggcggcaacgtggccaccgttcccgccgccgccgccgcctttctttgccccgcgccatttcgcggccggtgccttcttccgccacggggatggcatgctccatggccgcttgggcgcgttggtgacgacgacggagcggcgccattggtttgagagcgcggcgttgccggtggcgccgtcgtcgcggctgctctcgcagctggggccggtgatcgcaccggcgcgccgcgcggcggcgacgccggaggaggaggcgctgatgcaggagaaccaccggctgctacgcggcaacgcggcgctggtgcaggagctggcgcacatgcgcaagctctacagcgacatcatctacttcgtgcagaaccacgtgcgtcccgtggcgcccagcccggccgcggcggccgcgctgcacggcctcggcgttctacggccgccgccggcgggcgggaaggcgcccgcgtccgaggtgcgcggcgcctccggccggagcgccacgtccagtagctcgctcacggtggccgaagaccagcccacgctgctggctctgcggctgccgcggacgacggagaagatcatcaacgaggtgtccggcggcaacggcggcggcagcaccaagctgttcggcgtgcacctgagcagcgccgacgagcagacgtcatcaggcgcgagccgcaagagatcaccgccgcaagagcagcctcctacgtcgccggcgccgaagcggacgctggtggtggagcacagcgagctgagattgagcatcgtgtcgccaccgtag

SEQ ID NO: 12157 - DNA, 867 bp, Oryza sativa
  Clone ID: TFbOSC401894j.C1.o38.fg
atggtggaggacccgagcaccgatgagaccatctcgtggaacgactccggcacggccttcgtggtgtggcgccccgccgagttcgcccgcgacctcctccccaagcacttcaagcacagcaacttctcctccttcgtgcgccagctcaacacctacggattcaagaaggtggtggcggataggtgggagttcgccaacgactgcttcaggagaggggagaagcacctgctcggtgggatacagaggcggaaggggtctgggaccggaggcgcgggggcggcgccggcggggggcataccgacggcgataccgatctcgtccccgccgacgagctccggcggggagcccgcggtgtcgtcgtcgccgccgcgcggggcggcggggatcgcggcgggggtgagcggcgcggtggccgagctggaggaggagaacgcccggctgcggcgagagaacgcgaggctggcgcgggagctggcacgcgcgcggcgggtctgcgacggcgtgcggcgcctcgtgtcgcggtacgaccacgaccacggcggcggggaggaggaagcgggggagggcgacgtgaagccgatgctgttcggcgtggcgatcggcggcaaaagatcgcgcgaggagaacggggaagacgaggaggaggaggaggaggaaggggctgacgaggacggcgaagacgatgaggtggaggaagacgacgaggagagagagaggcacgcggcgcggcgggtccccgtgagggaggggaaggtcaggaggacgacggagctgtcggatctggacgtgctcgcgctgtccgtgcgggcggcggccgcggcgaggccgggcggggcctcccgtgaccgcaagagctcggtctcgtaa

SEQ ID NO: 12158 - DNA, 773 bp, Oryza sativa
  Clone ID: TFbOSC2810j.C1.o3.np
gagttcgcccgcgacctcctcccccaagtacttcaagcgcaataacttctccagcttcgtccgccagctcaacacctacggatttgggaatattgtcccggacaggtgggagttcgccaacgacgcttccggcgaggggaacggcggctgctctgcgagatacaccgatggaaggtgacgccaccgacgccagcaacgacgacgacgggggcggtcacggtcgcggccacgatcccgatggcgttgccagtgacgacgcgggatggttcccaggttctgtccggtgaggagcagatcatatcgtccagctcgtcccccgagcccctgctcatgctgtcgcagacgccatccggctccggctccggctccggcggcgtcgcgtccagcgggggatgagaacgagcggctgcggcgagagaacgcgcagctcgcgcgggagcacagccagatgatggcaacaacatcctcctcctcatgtccaagtacacctccacgcagaagctcaacgccgccaactcctcctccaccgccgggaacaacaactgcttcggcgaatccgccgaggcggccacgccgctctcgctccctgccgtcctcgacctcatgccttcctgccccggcggtgccgcccgtatcaaacaacgaagaggaaatgatgagcgcgagaagctcttcggcgtctccatcggccggaagcgaacgcggcacgaaggcggcgccggcggcgaagacgaacaccagcaagccaaccataccgacgccaacacacatgc

SEQ ID NO: 12159 - DNA, 895 bp, Oryza sativa
  Clone ID: TFbOSC400542j.C1.o23.np
agatctccatcccggcgtccgagctgcccaacttcctgctccgggacgaccagctctccgtctcctgggaccggatcagggcgtcccagctcgccggcttcggcgtcgccgtcaacacgttcgtcgaccgtgatggacctgcctcgtccaatggagggcctcggcgaggccgggccgccgccgttcttgtgcaagacgtacgaggtcgtggacgaccccggcacggacaccgtcatctcgtgggggttcgccggcaacagcttcgtcgtctgggacgccaatgcgttcgccgccgtgctcctcccgcgctacttcaagcacagcaacttctccagcttcgtccgccagctcaacacctacgggttcaggaaggtcgatccggatagatgggagttcgcgaacgaggggttcttgcgggggaagaaggagctcctgaagacgatcaagcgacgccggccgccgccgtcgagccccccgtcgtcttcgtcgtcgtcgtcgtcgtcgcagcaccagcagcagccggcggcggcgtgcctggaggtggggcagttcgggcgcgacggcgtggtgaaccggctgcagcgcgacaagagcgtcctgatcgcggaggtggtgaagctgcggcaggagcagcagacgacgcgcgcgcagatgcaggcgatggaggagcgcatctcggcggcggagcagaagcagcagcagatgacggtgttcctggcgcgcgccatgaagaacccgggcttcctccagatgctcgtcgaccggcaggccggccagcacggcgcccggaacagggtgctcgaggacgccctctccaagaagcgccgccgccccatcgacgcccaccgacgccatcgccggctcgccgcccaccgaagccgtcgtggcaatcgag

SEQ ID NO: 12160 - DNA, 1521 bp, Oryza sativa
  Clone ID: TFbOSC418197j.C1.o7.fg
atggaggccgccgttgctgctgcggctgcggccgccggggcggtgacgacggcggtcgcgcctccgcccggcgcggcggtcagcaacggggtggcgaccgcgccgccgccgttcctgatgaagacgtacgagatggtggacgacccggccaccgatgccgtcgtctcatggggccccgggaacaacagcttcgttgtgtggaacacccccgagttcgcgcgcgacctcctccccaagtacttcaagcacagcaacttctcctccttcgtcaggcagctcaacacctacggatttaggaaagttgatccagataggtgggagtttgcaaacgaaggttttcttagaggacaaaagcatctactgaagaccatcaacagaaggaaaccaactcatggaaacaaccaagttcagcagcctcagttgccagctgctcctgtacctgcttgcgtagaagtggggaagtttgggatggaagaagagattgagatgctcaaaagggataaaaatgttttaatgcaggaacttgtcaggctgagacaacaacagcagacaacagatcatcagctgcagactttgggcaagcgtcttcaaggaatggagcaacggcaacaacaaatgatgtctttcctggctaaggcaatgcatagtcctggcttcctagcacaatttgtacagcaaaacgaaaacagcagaagaagaatagttgctagtaacaaaaagaggaggctaccaaagcaggatggttcgttggactctgaaagtgcttcattggatggacaaatagtaaaatatcaacctatgatcaatgaagcagccaaagcgatgctaaggaagatcctaaagctagattcttcacatagatttgaatccatgggcaattcagataatttccttcttgagaattatatgccaaatggtcaaggtcttgacagctcttcatcaactcggaattctggtgttacccttgcagaggtcccagctaactcaggtttgccatatgtagctacaagctctggactttcagctatttgttcaacttcgactcctcagattcagtgcccagttgttttggacaacggcatacccaaagaagttccaaacatgagtgcggtgccttctgttccgaaggctgtggctccaggcccaactgatatcaatattctggaattcccagatttgcaagatatagtagctgaagaaaatgttgatattcctggagggggctttgaaatgcctggtcctgagggtgtattctctttgcctgaagaaggtgatgatagtgttcccattgagactgatgagattttgtacaacgatgacacccagaaacttcctgctatcattgattctttctgggaacagttcctggtggctagccctctatctgttgataatgatgaagtcgattcaggtgtactagaccaaaaggaaacacaacaggggaatggatggaccaaagctgaaaacatggctaaccttacagaacagatgggcctcctgtcatcacaccatacaggatga

SEQ ID NO: 12161 - DNA, 552 bp, Oryza sativa
  Clone ID: TFbOSC900079j.C1.o18.fg
atgacggttagcatggatggtgcaccatatctgaggacggtggacctcaaaacttacaagaactacaaggacatgtctttgggtctcgagaaaatgttcattggcttcagcaccggtgaggatttaccctattgggaaatcttggatgtccgccatgcaatcgacgtgatgcacctcactaagaacctttgcgtaaacctactgggcttcctaggtgtatatgggaagtcaaaagatacactggaagcacataatctgaagcatatggaacaacgcggcgaccttcacccggaaccaaaggagaaaggaagccattacttgagtccagccaactacactcttagcaaggcagagaaggaaagtatgtttgaatgcttagagagcatcaagatcggtattttcaggcctgtgtacctacacaacatgtttcctttcgagaggtacatgggcgttctaaagaagtatgttcatatccgtgctcgtccggaggcaagcatcgccaagaggtttggaacagaggaggtcattgaattatgtgtagaatttatttaa

SEQ ID NO: 12162 - DNA, 220 bp, Oryza sativa
  Clone ID: TFbOSC25042j.C1.o4.np
cagtagccccctcacatgttctttcaacagcgaaatgagtaaagttcatcaccgatctctaaacttgtaccgctgtgttatcccggttcctaaactcgcaaatcgaccgttctgattctcaaacttattcaactgtgtcatcccgatccctaaacttgcagatcactcatttaggtcctccaacttattctgttatgccaccccggcccctaaacagaac

SEQ ID NO: 12163 - DNA, 356 bp, Oryza sativa
  Clone ID: TFbOSC25645j.C1.o2.hg
atgcggcaagtctgcagcaagtctgcggcagacctgccgcagactcttcatcatactgaaagagtatgcggcaagtctgcagcaagtctgcggcagacttgccgcagactcttcatcatactgaaagagtatgcggcaagtctgcggcagacctgccgcagactcttcatcatactgaaagagtatgcggcaggtctgcagcaagtctgcggcaggtctgcagcaagtctgcggcaggtctgccgcatactcttcatcatactgaaagagtatgcggcaagtctgcggcaaacctgccgcaaaccttatcttactctgaaaaagaacacggcatggcgcaggcctgcctgtggaat

SEQ ID NO: 12164 - DNA, 1044 bp, Oryza sativa
  unsure (1)..(1044): unsure at all n locations
  Clone ID: TFbOSC403977j.C1.o2.gm
atggatgctgcaccatatctgaggaaggtggatctcaaaacttacaagaactacaaggacatgtctttgggtctcgagaaaatgttcattggcttcagcaccggggaggtctttggaaccttcatcttcgacatccagcatcaggagaaggcgacaatatggcccacctgccagattctgtctcctctctatctctttcctcccccacctctctctatccctctcacgccaaaggccgacgaggaaccccacgtgccgacggaggccgaggacgagaggcgcgccggcggctgcgagctgagcctccttgcggcagagaccgagtatgacgcgcgcgtcgatggacgccggcccgtcaagctcacgagctgggcctcagcgccggacttgtgcaagaagatggcgaaggtcggggagcagcagccggcgctggacttgcgcgagaagatggcgagcgcggcgacgggcggcggtggtgcccgaggcggcaggtggcggcgggcgacgggttgcggcggcgccctcccctccgccggatccggcgggaggggaggcgagagncancggcgccctcccctcccccggatccggttggccgtcgtcaccacttgccgccgctgtccgccaccaccgcccgccaccctccagcgctaccgcccgttgtcaccgcccgccgccaccgtccattgctaccgtcttgttggagcgccgtcgccttcacctgcgtcatcgccccctcagccctcctccaccgccgccgctccctccagcgcccgcccgaccgccagccagcgccaacgccgttgggcccgctgccaagaggcgttggttcgcgctgtagagttgagcggcgcattcaagggacgcctcctagaggacttccctggctgcccaagggagatgcagagggggctcgccgccatgctcatcaacccaggagagtgcaacctcgagaccatccatggcggaccgtgctgcctcgagctcatcagagcacaccaactcattattcaaagaacggattttgtctggatgaagctatag

SEQ ID NO: 12165 - DNA, 298 bp, Oryza sativa
  Clone ID: TFbOSC25469j.C1.o1.np
ctgcaccccacatgagcctatgcttcaaactccatatcattgaatcagttgcaacctgtacaaactgattgcattcctgaggtatcagtaagcacagctggaacggcgactgagaatgagaaaagcggtcagcaagctcaacagagttcaaaagatgttcaaagcaagactcaggttgcttcgacgaggagttgtacaaaggtccataagcaaggcgttgcacttggcagatctgtggatctttcaaagttcagtaactatgatgaactcaaagctgagctagacaagatgtttgaat

SEQ ID NO: 12166 - DNA, 215 bp, Oryza sativa
  Clone ID: TFbOSC17697j.C1.o1.fg
tatatgaagacaatgatggagacagaatgttagctggggacataccatggaaggtatttgtttcgactgttaagaggttgagggttatgaggaggtcagaacttccccatgacatgacttgggtcaaatggattcacttcctcaagttaaggtctgccctcaatttgttttcctcttatgtccttccacagattggagctgaccctgtgaagtag

SEQ ID NO: 12167 - DNA, 111 bp, Oryza sativa
  Clone ID: TFbOSC900116j.C1.o14.gp
ccggtgctgaagccaatgaacattttctcgagacccaaagacatgtccttgtagttcttgtaagttttgagatccaccttcctcagatatggtgcagcatccatgctaacc

SEQ ID NO: 12168 - DNA, 711 bp, Oryza sativa
  Clone ID: TFbOSC400542j.C1.o13.fg
atggccggcgccgacgtggacgtcgggacggagctccggctggggctgcccggaggtggcggcggcgccgccgaggcggcggccaaggccgcgaagaggggcttcgaggagaccattgacctgaagctgaagctgcccaccgccggcatggaggaggccgccgccggcaaggcggaggcgccggccgccgagaaggccaagaggccggcggaggccgccgccgccgacgccgagaagccacctgctcccaaggcgcaggcagtgggttggccaccagttcggtcgttccgcaggaacatcatgaccgtccagtcagtgaagagcaagaaggaagaggaagctgacaagcagcagcagcagcccgctgccaatgccagcggcagcaacagctctgccttcgtgaaggtcagcatggacggggcaccctacctgcgcaaggtggacctgaagatgtacaacagctacaaggacctctcccttgctctgcagaagatgttcggcaccttcaccgcaactgggaacaatatgaatgaggtgaatggctctgatgctgttacaacttatgaagacaaggatggtgactggatgcttgttggagatgtcccgtggcagatgtttgtcgagtcatgcaaacgcttgaggatcatgaagggttccgaagccattggtcttgcaccaagagcaaaggacaagtacaagaacaagagctga

SEQ ID NO: 12169 - DNA, 435 bp, Oryza sativa
  Clone ID: TFbOSC420647j.C1.o6.fg
atggcgatgagccagcctgctctgaaaggcaaagacgacggcgaggcgaagcaggctccggcatccggttgcctctatgtcaaggtgagcatggatggtgctccttacctcaggaaggtggacctcaagatgtacaagaactacaaggagctctctttggctctggagaagatgttcagctgctttaccgtcggtcatggtgaatcaaatgggaagtcagggagagatggattatctgattgccgcctgatggatcttaaaaatggaacagaacttgtgctcacttatgaggacaaggatgaagattggatgcttgttggtgatgttccgtggcgaatgttcacagacagctgtaggaggctgaggattatgaaggggtcagatgcagtgggccttgctccaagagccactgacaagagcaaaaatcggaactga

SEQ ID NO: 12170 - DNA, 762 bp, Oryza sativa
  Clone ID: TFbOSC421766j.C1.o3.gm
atgaaggataggaatgcttctgctgggccagaggtgaagcctgcaggattgtcaccatcaaggtttgtgaaggtcttcatgcatggggaaccctttgagaggaagatcaatttggccatccataacaactatgactctttgtccttcactttaaaaagattgggcaacaactattccatgtcaccatttgaacttgaaggctttgtgaacaatgaagaagatggtgccatagataatgactttgatctcctgtacgatgacatgaatggtgttcgttacttacttggtgaagtcccatgggaggttttcaccattacagtcaaaaggatctacattgttcctgcagaacaacagaatgaaagtgaatatcaggaggaggaagaggacaacgcggctgctgctgctactgctgacgaagatccgccggcggccggcgcggagggctggcggtggcaagcgccggccggcgcggaggcaggcggaggaggcgcggagggccgctccgcggcggctggcagcggagtcgtggagggccgccccgcggcagttgcagagggccgccccggcggcggcaggcagcgcctcgggccgcccggcatggaattttttgcttttttttcttttttccttcttaatgtgatgtggatgactgtaatttgtgcgatcttgaatggagctgctgctgacgatggcgctgctgctgcagttgacaatggagatgaccatggctacacaagcaacgatgacccaagcttcgactaa

SEQ ID NO: 12171 - DNA, 717 bp, Oryza sativa
  Clone ID: TFbOSC400431j.C1.o11.fg
atggcgtggaggagagggttcggccgggaggaggaggacgcggcggcggcgggggagagcggcctcgagctctgccttggcctccccgcctacttctcctcctcctcctcctccaagccatcggagggatcaaccgctgctcctgcttttgctctccgatccaatggaaccaatgcctccaagccaagcggggcagcggcggcggcgccggttgtggggtggccgccggtgcggtcgttccggcggaacctcgcctcgtcgtcgtcatcgtcgtccaagcaggcgccgccgccgccgtcgtcgtcgccgcagaacggcgacaaggcgagcaaagacggcggcgcggagaagggcatgttcgtgaagatcaacatggacggcgtcccgatcgggaggaaggtcgacctcgcggcgtacggcggctacgcccagctctccgccgccgtcgacaagctcttccgcggcctcctagccgctcagagcgctgccgctgacggcgaggccgacgcggccgccgccggagagatggtcggcggcggcgagtacacgctcgtctacgaggacgacgagggcgaccggatgctcgtcggcgacgttccctggcagatgttcatcgccaccgcgaagaggctgcgcgtgctcaagagctccgacctgccgccgccgtcgctgatgagggcggcagggagcaggaagagggcagcagctgacagctga

SEQ ID NO: 12172 - DNA, 594 bp, Oryza sativa
  Clone ID: TFbOSC900383j.C1.o5.fg
atggagaatctgaaggcgacggagctgaggctcgggctgccggggacggaggaggaggcggcgccgccgccgtcgacgcccagggccggaagcaagcgcgccctcgccggcgagcctgatcaggccaagatcaagcccgccgccgccgccaaggcgcaggtggtgggatggccgccggtgaggtcgtacaggaagagctgcctccagccgacgacgacgacgacgaagagcaagccgccgccggctgccgcggcggcggagacgcagcagaaggaggatgtcgccggcgccggtgggctgttcgtgaaggtgagcatggacggagctccatacctgaggaagatagacctcaaggtgtacaagggctaccgggagcttcgcgaggcactggaggccatgttcctctgcttctccggcggcgccgccgcgaacgccgccgtcaacccgtccgacttcgccgtcacctacgaggacaaggacggcgacctcatgctcgtcggcgacgtcccattcgagatgttcattagtacgtgcaagaggttgaggatcatgaaggggtctgaagcaagaggcctaggagcaacaaggggttaa

SEQ ID NO: 12173 - DNA, 588 bp, Oryza sativa
  Clone ID: TFbOSC419674j.C1.o7.fg
atggcggcggagagcatcgacgcggagctgcgcctcgggctgcccggcagcggcggcggtgacggcgtggcggcgaagaagcggcggtcggcgtcgtcgacggtgaagagcgaggcctccggcacggcctgctgcggcggcgccggcgcccgggacgtcgaagacggcgcctcgccggcgtccaaagtgcaggtggtggggtggccgccggtggggtcgtacaggaggagcacgttccagtcttcgtcgtcgtcgacggcggcggcggcgaaggggaagggcggcggcgagacggatcaagggaggaagaataagggaggagggctgtacgtgaaggtgagcatggacggggcgccatacctccgcaaggtcgacctccggatgtacggcggctacagggagctcagggacgctctcgacgcgctcttcggctgcttctccgccgacgcctccgcctccgccgcccacttcgccgtcgcctatgaggacaaggacggcgacctcatgctcgccggcgacgtgccctgggacatgttcatctcttcttgcaagaagctgcggataatgcgaggatctgaggcgagatga

SEQ ID NO: 12174 - DNA, 801 bp, Oryza sativa
  Clone ID: TFbOSC101867j.C1.o40.fg
atgtcgccgcccctcgagctcgactacataggcctctcgcctccgccgccgccgccctcctcctcctccgccgccgccgcccgcgcggacgacgtcgacctgaagggcaccgagctccgcctcggcctccctggctccgagtcgccggaccgccgccctgcggctattgccgctgccgctgccactgccaccacccttgagctgctgcccgccaagggtgccaagcgcgtgttccccgacgaggccgcgctgacgccgcccactgccgccgccgggaagggcaaggcggcgagggagggggaggaggtgggggctgaggaggaggacaagaaggtcgccgcgccgccgcagccggctgcgaaggctcaggtggtgggatggccaccaatccgcagctaccgcaagaacacgatggcaaccaaccagataaagagcaacaaggaggatgttgatgctaagcagggtcagggtttcctgtacgtcaaggttagcatggatggtgcaccatatctgaggaaggtggacctcaaaacttacaagaactacaaggacatgtctttgggtctcgagaaaatgttcattggcttcagcaccggtaaggaaggtgctgagaaccagaaagatggtgaatatgtgttaacctacgaagacaaggatggtgactggatgctggttggtgatgttccatgggagatgttcaccgactcttgccggaggctcagaatcatgaaaggctcagatgcaattggacttggctgttctcaactaaggcttgttccattatttgtgccaaagctttag

SEQ ID NO: 12175 - DNA, 924 bp, Oryza sativa
  Clone ID: TFbOSC401037j.C1.o4.fg
atgggggaggcgtcggagagcatgaagaagatcagcagaggccgtctcggcggaagctggatgggggagccaagcgatcaccatcgccatggcgatgaacaggaggaggaggagaagacgctggagctcagccttgggctccccggaggaggatggcgagcggcgtgcagggacaaggggacgacgacgaagcactccattgcagcagctgctgctgctgatgatgatgatggtgacaagagctccatgctctccctgggctactccacactcgtctcccactcgcaaggcaaggcaaacaaaaacaaggggtccccagaggaagaagaggcacatccaccaccagctacagggaataatgcacttgcatccaacaataatggctgcttccagacaagatctcctagtactcctgttgttggttggcctccggttcgaacattcagaagaaatctggctacatccagcaaagcatctcttgaactgcagaatggaaagaaggctgcaaaagcagaagagatcaagagagctccattcataaagataaacatggatggtgtccctattggtagaaagatcgatctgaatgcttttgatagctatgagaagctttctttagcggttgacaagctattccgaggccttcttgcagcccaaagagaccccctcactgctggagcaaaggactgccagcaggaagatgtggcaatatctggcttgctagatggaactggggagtacactttggtttatgaggattatgaaggcgacaaggtgcttgttggagatgtgccatgggggatgtttgtttcttcagttaagagactgagagtactgaagacatctgacctctcttcatctgtcagtacctctttccaccttagttctattacatcaaactctgttatctccgcattattctga

SEQ ID NO: 12176 - DNA, 681 bp, Oryza sativa
  Clone ID: TFbOSC28825j.C1.o4.fg
atggaagccgccgtggggtacgccgccgacagcctcatcaaggccaccgagctcaggctgggcctgcctgggacagccgacgacctgccctccacgcccaggggcaagaagcgcgccgccgcggcggaggacaacaacgccaacgccgccgccgccgacgacgacgagcacgacgccgtcgaggccgcgccgccggtagccaaggctcaagtggtcgggtggccgccggtgaggtcgtacaggaagagctgcttccagcaacagtcagcggcggcgagcaagagcaaggccgccgtgagcagctgcaacaacaaagacgagcccatcaccaagaacgcggcgccggcgccggcagcctcctcggcggcggcggccaacggcgggtcgctggtgaaggtgagcatggacggggcgccgtacctgaggaagatcgacctgaggatgtacaagggctacagggagctccgcgaggccctggaggccatgttcgtctgcttctccggcgccgccgacggtgccaacccgtcggagttcgccatcacctaccaggacaaggacggcgacctcatgctcgtcggcgacgtccctttcgacatgttcaccagcacatgcaagaagttgaggatcatgaagagatctgaagccacagggctaggatcaccaaggcaaatgaagatctaa

SEQ ID NO: 12177 - DNA, 1032 bp, Oryza sativa
  Clone ID: TFbOSC421766j.C1.o4.gm
atgaccatggcaatcgaggccctctcctcggccttcgcttctgcacccaccttggttacctctgcctccacaacctcctccgctgctctcgtcctcatcatgggtctcgtcatcatcctcctcctcagacgatgcgtggtagtggaggacatgaccgaggtccgcatcactgctgctacaaccactaccaacaaggcaaaggaagcagcaagccatctagacctcagcctcggcatctccttgtcacccggcggcggcggcggcgacgctggcaccaaggccagcagctgctgctacggcggcggcggcgacggcggcggctgcatgggcagtggcatgctcactgcaggagttcttggcgttgggcatggggggagtagccatgacaatactacggcgagcagcggcggcggcggcagctggacggcggcgttcatgccgagcccgacgggattcatgcacccgtggagcctcgccgcccggcagcagaaggccgccgccgagcaggagcggagcggcgtcgcgaggctgccgccggcgacgacgacgtacatgccaagagctgccgcgaccgtgatttcactgccggcggcagttggctggccaccggtgcacacatcccggcgtaacctcgttgccaccataaataatgtcctgaaacccgacactactgccgccgtcaagccggacagaccgacacaagcaacggcgatgttcgccgccgacgaaaccacggcgcccccgccaaggagcgcggcggcggcgaccgaggccagcaggacattgaacatgtttgccaaggtgcacatggatgggtacaaggtgggcaggaagatcaacctcagggcacaccgcaactacgactccctccgtcgggtcctcaccaagatgactcataatttcttctgccccgcagattattcaagcacaaataagggagaagaagattgtgctaaaagtgacgagttcatatttctatatgaagattttgagggcgaccgaatgcttgttggcgatgtcccatgggagtaa

SEQ ID NO: 12178 - DNA, 591 bp, Oryza sativa
  Clone ID: TFbOSC401426j.C1.o14.fg
atgcctcggcgaactgccgacgacgacgacgacggcgccggcgcaatccacggcgtcttccggctgccgaccgccggcgacggcggcgaagcggcggagtctgatcagcacagatcttcgcctcgggctcaccctctcctccgtcgtccacatcgacggcaacaacccttctaccccaaggcaagatttcgatctctgatcattctgcacacctactgctttaatttcagagaaattttaagatacttgagaaggagttccctcacgacggcgacagtgacagctgatcgaggcggcggcggcggcggccatggacggcgacggtcactgttcgtgaaggtgtacatggagggcgtccccatcggcaggaagctggacctgctgccgctggacggctacaaaggtctcgtcgcacggctcgcctccatgttcagagcatccatcacctatcatcattgccatcgacagttcgccgtcgtcgggatgaagacgaacaaggttcatcatgttctgacatacgaagaccaggagggagactggatgatggctggagacgtgccatgggagtatggcaagctagctcagctctga

SEQ ID NO: 12179 - DNA, 624 bp, Oryza sativa
  Clone ID: TFbOSC400151j.C1.o56.fg
atgtcggtggagacggagcggagctccacggagtcgtccgccgcgtcggggctcgacttcgaggacaccgccctcaccctccgcctcccgggctccctcgccgccgccgccgcacctgaccccgaccgcaagcgctcctccccctcctcctccgacgccgccgacgccgcagacaactcctcccccctcgccgccgccgccgatgctccccctgctcccaaggcgagggtggtggggtggccgccggtgaggtcgttcaggaagaacgcgctggcggccaagttcgtgaaggtggccgtggacggcgcgccgtacctgcgcaaggtggacctcgaggcctactccggctacgaccagctcctccgcgcgctccaggacaagttcttctcccacttcaccatcccaattgacgggaggaaagttgcagggaagttcgccgacgacgagaggaagctggtggacgcggtgaacgggacggagtacgtgccgacgtacgaggacaaggacggcgactggatgctcgtcggcgacgtcccctggaagatgtttgtggaaacttgccagcgccttcgtctcatgaaaagctcagaggctgtcaacttagcaccaagagccgctcaatga

SEQ ID NO: 12180 - DNA, 816 bp, Oryza sativa
  Clone ID: TFbOSC401137j.C1.o27.fg
atgtcgcctcccctcgagccgcacgactacatcggcctctccgctgcggcggcgtccccgacgccgagctcgtcgtcctgctcgtcctcgccgaacccaggcggcgaggcccgcggcccacgcctcacgctccgcctcggcctcccggggtcggagtcccccgagcgggaggtcgtcgccgcggggctcaccctcgggcctctgcccccgaccaccaccaaggcggcctccaagcgcgccttccccgactcctccccgcggcacggcgccagctccggctccgtcgccgccgccgcagcttgccaggacaaggcggcccccgccgccgctccgccggctgcaaaggcgcaggtggtgggatggccgcccgtgcggaactaccgaaagaacacgctggcggcgagcgcctccaagggcaaaggggaggacaagggcacggctgaagggggccctctctatgtcaaggtgagcatggatggagccccctacctcaggaaggtcgacctcaagatgtattctagctatgaggacctctccatggctctcgagaagatgttcagctgcttcatcactggtcaaagcggtttgcgtaaatcatcaaacagagataggcttactaatggttcaaaggctgatgccctccaagaccaagagtatgtccttacatatgaagataaggatgctgactggatgcttgttggtgatcttccttgggatttgtttaccactatctgccggaaattgaaaatcatgagaggatctgatgctgctggaatagctccaagatcaatagagcagtcagggcagagcagataa

SEQ ID NO: 12181 - DNA, 294 bp, Oryza sativa
  Clone ID: TFbOSC400415j.C1.o18.gp
tagatggaactggggagtacactttggtttacgaggattatgaaggtgacagggtgcttgttggagatgtgccgttgggggatgtttgtttctttagttaagagactgagagtactgaagacatctgacctatcttcatctcttataacttctggacggaaaagaacagcagctgagtgttgaccttctttttttgatctgctttgacactttcagtgacgctgttcagaagaatatgatcttctgagcttgtatcatcgtctctttctctcaatgtcttgctgtgctgagctt

SEQ ID NO: 12182 - DNA, 846 bp, Oryza sativa
  Clone ID: TFbOSC400887j.C1.o27.fg
atgagaggaggagtagctgggcccaccgccggcgagccgccggggacggaggcggaggcggaggaggtggaggagagctcagctggggacgacgaggagctggagctcgggctcagccttggctccaagaaacagcagcagcagcagcatgcgccgtgccgaatcctgacggccagggacctgcagccggcggcggcgctgtcaccggactcctccgtgtcgtcgtcatcccccgcggcggcggcggcggcgggggggaagagggctgagggccccaccgccaccacctcgcctgggacggttgcttccggccatccacacagcagctttggagtggtgggatggccaccgatccgacagttcaggatgaacagcctgttcaatcaggctaaagaaaacacatctgaaaccgacaccaagaagaccgccaccaatgaatctgatgtgcagaaggacaaggaggagggcgaaaagaaaggacgggttgctggatgggtgaaggtgaacatggatggagaggtcattggaaggaaggtggatctcaatgcgcaccgctcatacaagacccttgcattagcccttgaactcatgttcacgaagccgtccattggcctttgcgcttctcataatacaaactcgctgaaactactagacaactctgccgaataccagctcacctacgaggacagggatggtgactggatgctcgttggagatgttccttgggagtcagcgataccagggaattcacagaaccattgcttcaacaagaggcagatcctgagagcgtgtgacaaggaaaagagctataccgctggtgaagcttggagcgtgcttgatggttaa

SEQ ID NO: 12183 - DNA, 597 bp, Oryza sativa
  Clone ID: TFbOSC11858j.C1.o1.fg
ggcgccaagcgcgggttctccgacgaggcgcgttcgctgccggggtccgccgccgccgccgccggcgccgggaagggcaagaaggcggcggccggcgaggaggatgaggatgccgaggaggaggacaagaaggtcgccgccgcgccgcaggcgcctgctggcaaggctcaggtggttggatggccaccaattcgcagctaccgcaagaacacgatggctactaaccagctgaagagcagcaaggaggatgctgaagcgaagcagggccaggggttcctgtacgtcaaggtcagcatggatggtgccccctacctcaggaaggtggacctcaagacctacaagaactacaaggacctgtcaactgcgcttgagaagatgttcattggcttcacaactggcaaggatggcttatctgagagccgcaaggatggtgaatatgtgctgacttatgaagacaaggatggagactggatgcttgttggcgatgttccatgggagatgtttgccaactcttgtcgcagactcaggatcatgaaaggttcagatgcaattggacttgctccaagggcagttgataagtccaaaaaccgcaactag

SEQ ID NO: 12184 - DNA, 660 bp, Oryza sativa
  Clone ID: TFbOSC14459j.C1.o1.fg
atggctggcctcgggttcgacgagaccgagctccggctcggccttcccggcgccggcgagctggcagcgaggagctccggcaagaggggcttcgccgagaccatcgacctcaagctcaagctgcagccggcggcgcctgctgccgtctctggggaagagggtgctcaggaggacaaggaagatgccgacgcggcggcggcggccgccgacgagaagatgtcgatgaagaggtcggcgagccagagcagcgtggtcaccgcggagcccgatcccgacaagccgcgcgcgcccaaggcgcaggtggtggggtggccgccggtccggtcgttcaggaagaacgtgctcgccgagaaatgcaaggcggcggcgctggtgaaggtgagcatggacggcgcgccgtacctgaggaagatcgacgtcgccatgtacaagagctacccggagttgtccatggcgttccagaacatgttcacctccttcaccatcggcaagtgtgggtcccatcagcagctgaaggagagcaataagctgagagatgacctggagtacgtgccgacgtacgaggacaaggacggcgactggatgctcgtcggcgacgtcccgtgggacaccaagggcagtggagaaatgcaagagctgaagctgatcaaggagaattaa

SEQ ID NO: 12185 - DNA, 516 bp, Oryza sativa
  Clone ID: TFbOSC421766j.C1.o4.fg
atgaaggataggaatgcttctgctgagcctgtggtgaagccaggattatcaccatcaagatttgtgaaggttttcatgcatggggaaccctttgggaggaagatcaatttggctctccataacaactatgactctttgtccttcactttaaaaaaattgggcaacaactattccatgtcaccatttgaacttgaaggcttggtgaacaaggaagaagatggtgcaatagacagcgactttgacctcttgtatgatgatatggatggtgttcgttacttccttggtgatgtcccatgggaggttttcaccactacagtgaaaaagatctacattgtccctgcagaacaacagaatgaaaatgattatcaggaggaggaagaggacaacgcggctgctgctgctactgctgacgaagatggagatggagctgctgctgacgatggcgttgctgctgcagctgacgacgttgacgatgttgctggatacacgagcaacgatgacccaagcttcgactga

SEQ ID NO: 12186 - DNA, 552 bp, Oryza sativa
  Clone ID: TFbOSC400903j.C1.o25.fg
atggagctcgagctcggcctcaggctcgcgctgccgtcgccgtcgccgtcgccggcgacggcgacggcggctgggagtgagcttgaccttctcaacagcgcgccggggtcctgccgcaagaggggcttcgaggaggcgctcggtgggttcaaaaccgacgacgacaacgacgacggcaatggccgcggcggtgacggcgattccgacggcgaaatgggcaacaagaggaggaagctggtggggtggccaccggtgaagtgcttgcaccggcggcgcgacggtggctgcggtggcggatatgtgaaggtgaagatggaggggttggccatcgggaggaagctggacttgtccatcctcggctcatacgctgagctgctcgacacgctccaccttatgttcccctccactaaccaagaggatgggcacgatcgtcgtcgacgtcacccatacgctgtcacctacgaggatggggaaggagactggatgcaggtcggagacgtgccatgggaggcctttgccaagtcggtgaaacggctcaagatactggtgtaa

SEQ ID NO: 12187 - DNA, 732 bp, Oryza sativa
  Clone ID: TFbOSC422284j.C1.o12.fg
atggcttggaatggcaggtttggagaggatggagaggaagagaggagccttgagctcagccttgccctccctggatacttctccagctcaggtttgcaggggaacacgagcactgctgctgatggagccaagggaaacgatgggttcaaggcaagcaaaaagatgctaaaatttgcccctaaattctctgcgattcgcagcaggccggcggctccggtggtcgggtggccgccggtgcggtcgttccggcggaacctcgcctcgtcgtcgtcgtcgtcgaagccgccgcgtggaggccgagacgccgccgccgccgccacgggaggcaaggtggcccggttcgtcaaggtgaacatggacggcgtcccgatcggccggaaggtcgacctggcggcgcacggcggctacggcgagctctccgccgccgtcgaccgtctcttccgcggcctcctcgccgctcaaagggacccaaccatggccaccgccgccgccgccgccgctgccggcgagagctgcacaggagaggaggaggcgatcgccgggctcctcgacggcggcagcggcgagtacacgctcgtctacgaggacgacgagggcgaccagatgctcgtcggcgacgtgccatggaacatgttcatcgccgcggcgaggaggctgcgcgtgctcaggagctccgacctgaacgcctccacgatacgagcagggagcaggaagagggcagctgccgagtga

SEQ ID NO: 12188 - DNA, 834 bp, Oryza sativa
  Clone ID: TFbOSC900383j.C1.o4.fg
atggcggcggacctggccttcgaggcgaccgagctccggctcggcctgcccggcggcggcggtgatggagacgccgcggcggcggcggcgaggagctcctccgggaagaggggcttcgccgagaccatcgacctcaagctgaagctggagccggcggccgcggcggtggacgacgacgacgacaaggaggaggcggcggctgacgaccgggagaagaaggtcgacatcgtcggagctgacaacgacgacgcctcgccgccggccgccgccgccgccggcgggatgaagcggtcgccgagccagagcagcgtcgtcaccgccgccgccgaccccgagaagccaagggctcccaaggcacaggtggttgggtggccgccggtccggtcataccggaagaacatcctggccgtgcaggccgacaagggcaaggacgccgccgacggcggcggcgacaagtccggcgccggcgccgccgccgccgccttcgtgaaggtgagcatggacggcgcgccatacctgcgcaaggtggacctcaagatgtacaagagctaccttgagctctccaaggcactcgagaagatgttcagctccttcaccattggaaactgtgggtctcatggggtgaacggcatgaacgagagcaagattgctgatctgctcaacggctctgaatatgtgccaacctacgaggacaaggacggcgactggatgctcgtcggcgacgtcccatgggagatgtttgttgaatcatgcaagcgccttaggataatgaaaggatcagaagctattggccttgcaccgagggcaatggagaaatgcaagaacagaagctga

SEQ ID NO: 12189 - DNA, 1525 bp, Oryza sativa
  Clone ID: TFbOSC5281j.C1.o1.np
ccgcgcgcccgccctcctctcagctgggccggcccaagccggggggctgcccgttgcctgctggggacgggtattatctgatttttgtcaccaagcgccgccaaattggttgcatttgtgggcatcctatttactgtatagatgagagccagatgataaccattccacactcatctgtgcagacagatgttgcaacctctaagaatgagctaaggtacaagaaacttctggctagtgttgatctcaccaaggatttcttctatagctacacataccccattatgcagagcctgcagcagaatgttacttctgcagggatgaaggaaatgccttatgaaaatttatttgtctggaatactttcctgacacaaccgattcggtcaaggtgccgcaatactccctggacagtagcactggtccatgggcatttcaagcaggtcaagctgtcaatatttggcagggagctaaatgttgttctcatttctagaagatcacggcattttgcagggacacggtatttgaaaagaggcgtgaatgaccatggaaaagttgctaacgatgttgaaactgagcaaatagtctttgaggaggaagctggttcctggaagggaagaatgagtgcagtagtacagatgcggggatcgatccctctcttttggtggcaggaggctggccgacttagtcctaagcctgatattattgtgcagagatatgatcctacatatgaagcaactaagttacattttgatgatgtcgctcagcgctatgggcatcctatcataatacttaatttaacaaagatttttgagaaaaggccccgagagatgatgctcaggcgtgaatattttaacgcagttggatatcttaatcaaaatgtcccagaggagaagaaattgagattcatccactgggatttccataaatttgcaaaaagtaagtctgcaaatgttctgggtgttttaggaggaggtgctagtgaagcactggatctcactggattttactacaatggaaagccaaaagttcaaaagaaaaggtcaacacagcttacccatatttcttttcacagggatggttccattgatacaagagctagttctggagaccttccaaggctttcgagtaatgcagattcacttggtcccactgcttctcaagatataagaaaagatgacagcaaacaagaacttcttggtgatggtccttgttatcaaactggagttcttcgtacgaattgcatggattgcctggatcgtacaaacgttgctcagtatgcttacggccttgctgctttgggaaggcagcttcatgcaatgggagcgactaatgtttcaaaaatccacccagatagcagcattgcttcagctttaatggatttgtaccagagcatgggtgatgcacttgtaggatcccctggcggcgcggccttccatcatggcgtggcgcccgggcggagaggcggccttcgaccgcggcgtggtggccggctgttcattgcttcagtgaagaggctctacattgctca

SEQ ID NO: 12190 - DNA, 1566 bp, Oryza sativa
  Clone ID: TFbOSC401064j.C1.o59.gm
atggcgcggcatggcatgcatgctgcgttcgcgcgtgagacggcgtgcgcgatcagatcagggggagcgccagagcccgcgcacagtgcaggcgggtcgtcgcagccgcgcagcgcgaggaggccgatgcgcgcgggggccggatcgagggcgacgggggccggcgccatgaatccctacgacatgccaggacggcaggtccattttgaggaagcagcgaagcacagtgtatatggcactactgggcactgcaagggtgatatggtgatctcgtcgagaagctcttacaataggtcgccggccatacctctttctctagcgattggcggagccgcggaggtggagctccactccaatccaatccaagggttcagcgaagatcaggagttcagacggggtaatgtcctcatcaacagtggtcccctgtggtcggggcgtggaaggaggtggaaccattccttacgccacaaccaacagcagcgccaatggccacacggatggaaacctgatcttaactccgtgtttttccgcgttctctttcgttctcgcttagacctcagcttacgcttcgggctgactcttgaagactttgagctagttaaccttatggaagaagggtccaacaaaagagaaggacttcctcctcaactcctagatctcatcccagatgagaaggaatggaagctgagagaagcattaggtctagggagatcaagaaacgcaggcttcgacggtgaagaagacaagaagctagacctaaagcttggtcttcctggttttatagaagatgatgaggcagaaaccttaagagattacaggctacagcaagagagcccatctctctcccttagtttctttccaaagcactccaagaccaccagcagcactactacgacaactggagcaaagaggggattcatagacacagttgaggacaaaacagaaggttataacgaccagaagcagcaggcaagggcaggatgtgggaaggaacttgcagtggaggaaatgatagcagccgtgagtgagaggaagaaaggatgctgccccccaccaccaccaccacatggtgctcctgctacacctgcgcgcaacagaccacagacccagggaaggagaaaccttgctagtagtagttcatccaaacattcccctgaaccacaaaatgataatgccaatgcaaaggtgacgctcacctgcaagaaaaaccctcttgtaaaaatcaacatggatgggatccctattggaaggaaaatagaccttgcagcctataacagctatgatgggctatcgtcagctgtcaaacaactcttccatgggtttcttcaagctcaaaaggaccaaactaatgcgcaaattgcacagcaaggtgcagatgacaaaatattttatcaattgttggatgggtctggtgaatatactctagtttatgaagacagtgaaggagacaggatgctggttggggacgtgccatggaaagtatttgtctcaactgctaaaaggctgagggttctaaggagttcagagctttcccataccctgattggagctactgctagggtctag

SEQ ID NO: 12191 - DNA, 612 bp, Oryza sativa
  Clone ID: TFbOSC11845j.C1.o2.fg
atggaggagtgcaagggcggtggcatgtcgccgtcctcctccatggatagcagcacccacccggcgctgtccacgacgtcgtcggcggcgacggcgaggcgggacctcagcaccgatctccggctagggcttagcctctcgacgtcgtcgtcgtcctccctcctgcaggccgccgccgccgccgccgctgctgatgatagcatcccttctactccaaggaacagccaagtgcacgccgattggccgccgatcaagccgttcctcaggagcgccttgcagaaggcgtcggccgctggcggcggcggcgctcgccgacggcgaacgctgttcgtgaaggtgtacatggagggcgtcccgatcggccggaagctcgacctgctcttgctggatgggtatgacagcctcctcatcaagctctgccacatgttcaagacgcccatcacctatgctgatgttatggagtgccatcaacaagttcctggccagaaggctgcccatgtcctcacctatgaagaccaggacggggactggatgatggttggggacgtcccatgggaactcttcctgagcagcgtaaagaagctcaggattgcaaggatggataaatgctaa

SEQ ID NO: 12192 - DNA, 618 bp, Oryza sativa
  Clone ID: TFbOSC900153j.C1.o5.gm
atggcgaggccgcgggccgggcgggcgacggggcgcaccgcaccggagcgtgcgatgtgtgacgagactggcaggggtgggagggcgcagcggagcatcacggcgaagtcggcgagcgagcggaacaagcacgtggccacttgcgggaaccctgtcccctacccccctcgccagaatccggatctactgtgcccgttcgctctccattgcccacagctcgccaccatcagcgtcttcttcgtcgaggtcagcggcggcgacacggtgttgggtcatggcgagctacggcgacgacggcgtggagctcaccgagctgacgctggggcctcccggagccagcgctcgcagggccaggcgcggcaggaagaacggccatccgccgccgtcgtcctcgatgcagcgtacttcgtgaaggtgagcatggacgggacgccgtacctgaggaaggtggacgtcgcggcgtacggcgactacctcgagctcgtcgaggcgctcaacgacatgttctactgctccaccattggactgatggacgggtacggcgagtgggagcacgccgtcgtgtacgaggacggcgacggcgactggatgctcgtcggcgacgtgccctgggagtaa

SEQ ID NO: 12193 - DNA, 801 bp, Oryza sativa
  Clone ID: TFbOSC416231j.C1.o5.gm
atgggggttgtcagcgacggcgtgatgattgctccggccgccggcgactcgccggtcgccgtcgccggcagcatccgcgcggccaccaccacccaccaccacacccctcgtctccgcaaactcgacgcgccactcgacagcgaccccgcagccgatccatcccgccgccgaagcagcagcaaccgccacggtgcgccgccgccgccggtaccgatgtcgacgagctccggcgccgactcgtccccgcccgtctcgggcctcgactacgacgacaccgccctcaccctcgccctccccggctcctcctcctcctcctcctccaccgccgaccccgaacgcaagcgcgccgcccacgccgaccacgccgacgccaagccgccttccccaaaggcgcgggcggtggggtggccgccggtgagggcgtacaggcggaacgcgctgcgggaggactccgcgagggcgaagctggtcaaggtggccgtggacggcgcgccgtacctgcgcaaggtggacctcgcggcgcacgccggctacgcgcccctcctccgcgcgctccacggcatgttcgcctcctgcctcgccgtccgcggcggcggcggcggcgacggcgagggtacaaagctcgtcgacttggtcaccggcgccgagtacgtgcccacctacgaggacaaggacggcgactggatgctcgtcggcgacgtcccctggaagatgttcgtcgagtcctgcaagcggatccgtctcatgaagagctccgaggccgtcaacttatgtaagaacttgcgatccaatccactataa

SEQ ID NO: 12194 - DNA, 828 bp, Oryza sativa
  Clone ID: TFbOSC400878j.C1.o5.fg
atggcgtcttcttcttctctcaggagcaccagctgcctcgcctccgccgcggagaccgacgccgacaacctctgcctccgcctcggcccgccgggaagcagcatcaccaccaccaccaccaccggcggcgccgacccggcggcgaagaggtccctcggggcgaagcggtcgctggagagcacggacagcatggcctccggcaccggaacttccgccgccggcgacgagcacgacgacgacaccgccgcaccggccaaggcacaggtggtaggatggccaccagtgagggcataccggaggaacaccttccatcaggccgccgccgccgccgccgcaaccaagaagggtggtgatgagaaacagaagcagcagcagcagggaggagggctgtatgtgaaggtgagcatggatggggcaccatacctgaggaaggttgatctcaagatgtgcaagggctacagggagctgagggaggcactggatctcctcttcaccaagtgcttctctgcaaccgcctctgacggatgcagcgatggccagttcgccattgcctacgaggacaaggacggtgacctcatgcttgttggagatgtgccctgggaaatgttcatctcttcctgcaagaagttgaggatcatgaagggctctgaagccagcaagatttatgccttgaagaccaatcaagtgcttaacctgcaggccattggttcaaactctgaagaagataaggcccttgcctggctgcctgcccacactgccaaccaagcagatgcagatgcacggatgaatcagcacaaactccgtggaagaattacctcgaaaaaataa

SEQ ID NO: 12195 - DNA, 1551 bp, Oryza sativa
  Clone ID: TFbOSC408625j.C1.o8.fg
atggcggctggtggctcatcctcaaaccctatgtcgagagaagcctcgtcctcggcggccgccgcggcggcgggggtggctgtgagggatgttggggatgacaagcccttgccgtcggcggaggttgacatcacctactgggcggcgcaggaagaggcggctgcgctgcttgagtcgatggccgcgagggctcgtggggaggacgacctaccggaggagcagctgcaagccaataaccaactacaggaagacgaggtaatagcactgcaagctatttttggtgatgatatggtgatcttggagaataaggacaatcttcgatttattcagatttttgtgcattatacacttcctgatagtatccgtgtgttcttgaatcttcgtcgaagtggagctatggttggaactgatgatagtgaaaaccacaatggcggagaactctatcatcttgcagctaaatggttggatgaaccaaaggtctcatacctgtgtgctgcgcttgatgaggtttggacagagcttccagggcaagaagtcatatacagatgggtggattggctgaatagctcttcgtggtcttccattgctttgaatgatgaaatagtgttagatccagataaaacattaaaaattggagatgaacgagctatcgcgagaagaattttagttgagtctactattcctcttatgcagagttacagtgagaagagatctcataagatatttttggaaagccttctctgtatggagtctcactgcaaaatccatgtgaaagaagggaatttaatgcagctggcatgtcctgatacaaattgccgcaatccacttccgccatccgtattgaaaagccttctacgagatgatggatatgcacaatgggaatcatttgctctacagaaactgttagatgcaatgcctgatctagtttactgccccaggtgttctgctgcttgcttggaagttgacaatgatgctcaatgcccgggttgtttttttaccttctgcactttgtgcaaacgccgccgccatgtgggggatacatgtattactcctgaagaaaaaatacgcattttgaagggcctgacaaggatgtcatctatgcgagtaggccccagaccccaagttgtttccccggaacgacagaaattgtattccataccagaggaacaattgttgaaagaaaagagggaaatagacgagttgataaatatccaggaagcacttcgtgattctaagcaatgccctcgttgtaagatggctatctcaaaaattgaaggttgcaacaagatgacatgtgggaactgtgggagattcttctgctatcgttgtaacaaagcaattggaggatatgatcatttctggaatggaaactgtgatatgtttgagagggaacaagatgaaaacccacagcagcaggatgatgaaaattttggtggcgaccctgacgaagatgctgaactcttagaacctgaatgggtgctgttaacttatccctgtccaaactgtggccgtcggaatgaaaagtcatacatgtacagactgttgctgtag

SEQ ID NO: 12196 - DNA, 484 bp, Oryza sativa
  Clone ID: TFbOSC401616j.C1.o20.gp
agtggtaatggatcagctgcctatattatacacataattatttgtaccaatttatacaaatttacatgatatgttaataggataggtgcacagacctgagatggctataacaatcatcactgctcctgaagttctccaagcatgcccaacaaatgtgactgccacatttacactcgacatggttgcaaccatcagctttctcgattgtaaagtggcaagaagggcataccttcacattctccttccccttgcgccattcaagcagagttgcatcagggtcttccttgtattctttgtatgcctcacaggatatgaaaggatgatattcaagatgacacttgttgcagatctccacaaagcaagccccacagacaaaaggtttgctttcagcatctgcagcagccacttggtaaatggatgggcaatcaggagtaggacagaaacgatattttcctgcattagaagcaacaaatgctctcaagga

SEQ ID NO: 12197 - DNA, 1752 bp, Oryza sativa
  Clone ID: TFbOSC400944j.C1.o30.fg
atggcagcagcatccgccgtcgcctcgtcgtcgtcgtcaccggcgctggagccccaccccgacctctccccggtattctcgtcgccgtccgcggcttcctcctcctcgtcctcgtcgcgcgacgagggagcgcgcggggtctcgtgcgaggggggcggcggtgatgacgtgttcgacctggacgccccgtgggtggcggcggccgaggcggagtcgaggctggaggaggccgtgacggcggcggccgcggcgcgggttggtctctgctgcaccgaggagaaggggaaggggaagggggagaaggaggaagatgagatacgaaacaaccggcagcggcaggaggacgagatttacatacattacgatttgaatgatggcgctgaagtgtgtgctaagctttcttcagctaatgagaaaaatccaaaagatggaagatgttgcgttggaatagaagggcatggtgacgaaccagaagatttttcttacacttgtaattttgagtacttgcctcctttggtcttgacatgcttgcttccactgtcctatcctagcaaagaacccccatattttacagtcactgttaagtggatggatgggcctaatgtttcgcagctctgtaagatgcttgacaccatttgggcagagttaccagggcaggaagtggtataccggtgggttgagtcgctaagaaattcttctcggtcatatctctggtttgatggaaaaataacgttaggtccagatactccaatgcagaaaggagataatcgtgcaatctcaagaagtctctccttggagtctgtaattccatccatgctcagttacagtagtaagaagcgctatcaagcatttcttgaggatctccacatgtgcatgatatgcctcagccagagcaaaggttcaaacttcatcaggcttccatgccaacacctcttttgtgtgaagtgcttggggacgttatgcaggatgcatgtcaaggaaggtagtgtgtttcagttggtatgccctgataccaagtgcaatgcttcaattccaccctatgtgttgaagagacttcttacagaagatgaatttgaacgttgggataggcttactcttgagaaagcactggactccatgtcagatgtggtttactgtccaagatgcgtgatcggttgcttggaagatgaggataataatgcacaatgtccaaaatgctcctttttcttctgctcgttttgtaaggagccatgccatcctaggaggcagtgcttgactccagaggaaaagctccagcgccggcaggcgtcagggaggatgtctgagagagaggtggcacaggaaatactgaacatcaaagcattatataatgatgtccgattatgtccaaagtgccgaatggccatcagcaaaactgcagggtgcaacaaaatggtgtgcggcaactgcggtcagttcttctgcttccgctgtggcaaggccataaagggttatgatcatttcagcgaatgtaagctctttgcgcctagagacatatcagcgtgggagagacaaatggaagagcagtatggaaatcatgtacggctttcactgcgccctgtaggcggtacaatcaggtgtccaaaatgccgtgaaagaaatttcaaggatgatgagaaatatatcttctgctgggcatgccgagccaactactgcacaatgtgcagacgtgaagtccaggacaagagggggcactttgggtcaccggaatgcgtggggcttgaagatttctag

SEQ ID NO: 12198 - DNA, 909 bp, Oryza sativa
  Clone ID: TFbOSC401875j.C1.o15.fg
atggagacctccgccgccgcgggtggcgcacacttgatctacgtatcctccgacgacgaggaggacgaaacacgcgtcctccttgccgaatcctacagcgccgaggagatccagatccagcaggccatcctcctctcgctcgacccctccagcgacgcggacgccgcccattcctccgcctcctcctcccgcccctccggcgccgcctccacctccgacgaaccctcctcccttcccgaccgcaagggcaagcgcaagctatcatcggaagaagatggccctatcgaatccacgaggaagaagcggcggaagcgcggccgattcaagtgcagcgtctgcatggagaagctacaggtctcggagcagttcaccgtgagcttctgtgcccacgcgttctgcaacagctgcattggccgctacgtcgccgccaagatctccgagaacgtagccgtgatcgggtgccctgaccccgggtgcgaggagggtttcgtcgagatggacacttgcagggatatcatcccgccggagttgtttgatcggtggagcgtctcgctgtgcgagttggcactgggtgagaagaagtactactgtccgttcaaggattgctcggcgttgctgatcaatgacaacgacggcgcggagaagaagatcagggagacggagtgcccccactgccaccggatgttttgtgcaaggtgtcgtgtgccttggcatgatgggatcaaatgtaaggagttcaggaagctaggcgatgatgagaagggggaggaggatctgatgttcaagaagctggctgggaagaagaaatggcagaggtgcccaaattataaaatgcagttttctgaatggaagattccagaatcaccaaattttggtagagttaggcaatgtaaggttgtgatggtgtaa

SEQ ID NO: 12199 - DNA, 1539 bp, Oryza sativa
  Clone ID: TFbOSC418099j.C1.o8.fg
atggaggagaggttagccgacgtggagggcagtttcgcctgcaattcgagaggggaggatgacttcaggagctgctgtggggatgaggatgagtgggaggacaccgaggagtcattcacggccggcgtcgccaagggagagcttgatgagagctcggtgaggctgttcttcaagggcgtgtcgagccccgaggcggaggggaagaagctgtccgggattggggtggtgatggagaggtcacctggggtgcctatgcttcaggtgcagaagaaactggacttctatgtggatgagctagtggccgatcacttggcgctgatggatggcctgttggtggcgttgcagaatgggatacggaagatctttgctttcaccaattcggagaagctgtactttcaggcaagaatcgcagaagctgaaattctagaagaccagctcttggtagctttaggacacagaattcttgaactggtggaaaagctggaagactttgatataatattgcttcctagctttgagcttgagaggccactgcagttggccaaagaagccataggcatcatgtatctatctccatacgaggttggcacctgttcaatttgctgtgaggaaaaacgaggcgctcagatgatcaaagtgggttgtgctcatacattttgctatagctgcttgacttcatatactcaagagaagctgcaaaccaacaaggttcctataagatgcccacagttaaggtgtaaatatcatatttctgctagtgagtgtaagtcattccttccagttagctgctacgattctctggagagagcttttgcagaagctggcacctcagacatggaaagattttattgtccctttccaaactgttcagttctactagatcttagtcagcacttctctagagcaagtacatcaagtcagtcagatctcaattgtgttgagtgcccagaatgccatagagatatctgtatcaactgtggagtgccatggcatgtcatgatgggctgtgatgagtaccagagcttgcctgttgatgaaagagatgcaggagacctgtctttgcatcggctagcacaaaacaataggtggaggcgttgtcagagatgccgacgaatgattgaactcacacaaggctgcttccatatgaattgctggtgcgggcacgagttctgctactcctgtggcgccgagtacaccaatggtatacagacatgccaatgtgttttctgggacgaagagagcatcgaggctgcctcggcagcgcattccacccaagcatccgagatatgggcatgggacacgttcgactgcatgccaaccgccatcgaagggtactcggagcaggagagagctcagctggctctcattcagaggttcctctcagggggtttcaacctgggtgagcctccaagccagtcgccgccccgctgcgccgattcatatatcattgacaccatgaaggaccttcaccagctgccatggctcgagcggttcgtttcggtgatcagtgacagctacaatgaagattacatccagtga

SEQ ID NO: 12200 - DNA, 1896 bp, Oryza sativa
  Clone ID: TFbOSC401875j.C1.o9.fg
atgaacattgacgacgcgttggcggaggaattgcaattgcaggaagccatcctcttctctgccttccaagaaatgatcatccaggacaccgacgacgacgactccatcggcaatctgattctgatcggccaagatcaggggcaagaatccaagaaacccttttccgttgccgatcatggcgagtcctcttcgccgtcgccgttgacgatgacgacgactaccggcggcggcggcgccggcgagttctactgttccatctgcatggagacggtgcccggcgctctcaagttcagcgtcagcccatgcctccacgccttctgcgtgtgctgcatcggccagtacgtcgcggccaagatcggcgagaacaccgccgacgtcaggtgccctgaccccggctgcggcggcggcgtcgagccggagagctgccgcggcgtcgtcccctcggaggtgctcgacaggtggggcctcctgctgtgcgaggcggcgatcgtcgcgaggaggctgcactgcccgttccgggactgctcagagccgctcctcgccgacgccgacggcgagggcggcggcgtggcggaggccgagtgcccgagctgccaccggctgttctgcgcgcggtgtatggtgccgtggcacgacggcgtcgggtgcgaggagttccaggagctcggggaggacgagcgcggccgggaggacgtgatggtgcggcggctcgccggcagggagcggtggcagcggtgcccccagtgcaggatgtacgtggagaaatccgagggatgcatgttcatgaagtgcagggccgcaggggagggaccaccggacatgagcgccaacgtcgacttggatgccaagaggttggtaccgctgaaggcttggggaagatgccgaggttgttggagctcgagctcaagctacccgcggagtaagatgttgatgtctgagatcggatcacaagacgagtttgtgaagacgaatacagactatatcgagaagggcgagtattctggtggcgacagaccagttaggtcgcgggttggaaagatggcgccgacaggtatgaaatttgatttggtgaagtttgacggctccggaaattttggcttgtggcaaaccaaggtcaaagatttgttagctcaacaaggagtttcaaaggctttgaagggtgaaaaaccggccaagatggaggatgacgattggaaggagatgcagttgcaggcggctgcgacaataaggctatgtctttcagatcaggaaggggcagatctgacagcacatgtgaacgttttcaatcaactagtcacagattttatgaagatggatgtggaagttgacgatgaagacaaggccatagttcttttgtgttcgttacctgaatcgtatgagcatgtggtgactactttgacgtacggcaagaagaccatcaaaactaaagatatcacttctgcgttgctggctcgtgatcagatgagaaagaacaaagagggtgaaacatctcaagcggagggtttgctagtaaaagaagatcatgttgggcataagttaggcgatgacacaagttatccggccgtgggagtacgtgaagtcaatatcaagctagaagatggaggtgaacatgttcttcagggagtcaggcatgtaccagggctaaagaggaatctgatttcgcttgaaaccttgcatgaagaagggttaatattccgcggtaatcggaataggaagaccatggagatcatgaaggacaagacgactgtgatgacgggagagaaggtggagtcgcatctttacaagctacgagggtgcactgttgcaggtggagtccaagagggagcggttgctaggatagcaattgttttcggtggcggcgggtctggcgcatactcgtcgggcggcttgcggtga

SEQ ID NO: 12201 - DNA, 779 bp, Oryza sativa
  Clone ID: TFbOSC401857j.C1.o21.np
cgtggcacgccggcgtcgactggagccatggcgatggcggaagcggccgagggacagcggccgcggcagcggcagcgtcggcagccgcagccgcagcggcagcagcatccaagctgcggcatctgcatggagcccatgccgccctccgaggcgcaccgcggcggcggcggcggctgcgcgcacgccttctgccgcgcgtgcctcgcgggccacgtccgcgccaaggtcgagtccggcggcggcgcgggcgccgtgcgttgccccgacccgtcgtgcggcggcgcgctcgacccggagctgtgccgcggcgcgctcccgggggacgtgttcgagcggtggtgcgcggcgctctgcgaggccatgttcgccggcgcgcggcggacgtactgcccgtaccctggctgctccgagatgatggtcgccgacgccgacgacgaggggtgcgcgggcgtgacgcagtcggagtgccaggcgtgcaggcggctgttctgcgcgcggtgcggcgtgccgtggcacgccggcgtgagctgcgccgagttcgggcggctcggcgagggggagcgcgggcgggaggacctgctgctggtgcaggccgcgcggaacggcgggtggaagcgctgcccgcgctgcaggttctacgtcgagaagtcccacggctgcctccacatcacatgcaggtgcggctttgaattctgctatggatgtgggagacagtggcagctgatacatgacggctgctgctccctaatgacacaacaagctggagaagtgccaaatca

SEQ ID NO: 12202 - DNA, 2664 bp, Oryza sativa
  Clone ID: TFbOSC900349j.C1.o3.fg
atggaaggaggaaaaccccaccctgctgcgactggaggaggagcatcgagcagccaccacgccgccgccgccgccgccgccgatgtcgccgtcgacgaggcgttcgcgcgtgacctgtacgtgtcgcagctgatggagctgggcgacgacgactggagcagcttcgcgccgccgatggatcgcgtaggatcgacgtcttccctcgccgccggcgccgccgggagcagggcccaacccatcgtcatcgatgatgatgatgacgcgccggcggcggcggcggcggcgcggaccgtccaactgtacgtgccgcctccgttacgatccggtgggcgccgcaccgtggcgacgagacagcagccggcaccggcaagatcagcgacggccttcctcccgcggccgccgggcggcgccgccaccgccgacatcggcacgagctctaccgccaccttaccacagggcctacctgctgccatggcgccgtctactgaactctcactccgccccggcggcctcatcgctggcggcgccgccgctccccgccacggcgggagacgtcctgccgcccgtatggcggctcgtgccgctcccggcaccggccatgcccgtggcgccggcaatggccgttgggctagggcagaaaacctcatggcagcattgcaagcaaaccctcgcccaaacgtcgcgcagttcggccggatatggactcgcattgccgccgccgaccgccagctcaccgccgccgccgccgccgccgacaccccggcggccgtcaccgccaccacgggagaagggagccacgccgcccctgccgtctctgccggcaagtgtgggcaacacagaaccccggccatctccgccggcaaaggaggcgccgccggcggcatggaagaagaagaagaggttcaccgcaacgtcgcgaacgagaacgactcggtttcctcgaagaggcaggccctactcgccgacagggacacgccggccgtcttcgccggcatggaagacggccacgacaacgactggtacgactccgtcatccgcgacgccgtgatcgccgagctgcaagaggacccagagctccatgggcctctcccggtgcaatacctcacaaaatcgcccgtcgtggcgcaaccaccaccccgcgccaccgccgccgccatcgccggagaagaagaagaagaagaaggtgaattctccatgccaaacttctacaagaagtggggcctccgcccatccgacctcgaccccgacgaggccggcccgtcgacgaggcggccgagggtgctccccctcgccgacggcgacctcccgacgttcgactgcggcatctgcttcgacaccttgccgatgctcgacctcttccgcggcctcccctgcgaccacaagtactgcctcgagtgcatgaccacctacatcgacggcaaggtgagggagggggccgtgccggtggcgtgcccggacccggagtgcgccgacggcggcgacggcggcgccggcgtgctccacccggaggggtgcaagaaggccatcgacttcgccgcgttcaccgactgggggctccggctcgccgagggcgccgtgccgcacgaccggcgggcgtactgccccaaccgccggtgcgggatcctgctggagaccagcggcgaggcggagccggccatggcggcgtgcccggcgtgccagcacctgctgtgcgcgacgtgcggcggggagtggagcacggcggacgacgccgaccaccgggactgctccaaggggcccgaggccgccatggtgaagaagctcgccgacgagcggcggtggaaggcgtgccccaaatgcaggatgctggttgagaggacagccggctgcagggtcatgagttgcaggtgccgcatggtcttctgctacctttgtgggctccagataggagcggtgctggaggggaaggagaaatgccagtgcctcgacaatctcggcgtcgttctgattaaagcactgtgcagattttctaaaaggagaactgcatcttatcctccaataaaagccattcaaataaaaggggtggtggtctctcatctgcgcagtagccaacgacacagacgccatcccgtcgccgactaccaagcacgagaagaggagagttgtcgccaacacctctacacaaaggtggtcaacccccaccttcctcctatcgccgtgtctgctaccaataccgcatcctgtcggcacgagggggttgccacagcaactgctcacacccatccccgtacctccacgcaggcggtctcaccattgcccagtgtcgccattgctatgccttgcgagcattcctctaccacgcgttggtcacgtagatctagcctcgaagctactggatctagcatcaccagcgctagatccactactggaactgtcttcaacaccattggtcatagttgtcgtcgcttcaaccgcgttgccgccatcacagtcactatcatggccagatccatcctccaaatctatcaccttgtgctcgcaacctctgggagctcatgggagaaaaggccccacaccactaacatccttgtcaccgcaagatttccgacggatggctctgatggtggcgaggaggtgggagggaggaaagtggagtggcaccgtggcatgggtcactgcccgagtcattcctcagtaattgagtaa

SEQ ID NO: 12203 - DNA, 2577 bp, Oryza sativa
  Clone ID: TFbOSC900362j.C1.o1.fg
atggaaggaggaaaaccccaccctgctgcgactggaggaggagcatcgagcagccaccacgccgccgccgccgccgccgccgatgtcgccgtcgacgaggcgttcgcgcgtgacctgtacgtgtcgcagctgatggagctgggcgacgacgactggagcagcttcgcgccgccgatggatcgcgtaggatcgacgtcttccctcgccgccggcgccgccgggagcagggcccaacccatcgtcatcgatgatgatgatgacgcgccggcggcggcggcggcggcgcggaccgtccaactgtacgtgccgcctccgttacgatccggtgggcgccgcaccgtggcgacgagacagcagccggcaccggcaagatcagcgacggccttcctcccgcggccgccgggcggcgccgccaccgccgacatcggcacgagctctaccgccaccttaccacagggcctacctgctgccatggcgccgtctactgaactctcactccgccccggcggcctcatcgctggcggcgccgccgctccccgccacggcgggagacgtcctgccgcccgtatggcggctcgtgccgctcccggcaccggccatgcccgtggcgccggcaatggccgttgggctagggcagaaaacctcatggcagcattgcaagcaaaccctcgcccaaacgtcgcgcagttcggccggatatggactcgcattgccgccgccgaccgccagctcaccgccgccgccgccgccgccgacaccccggcggccgtcaccgccaccacgggagaagggagccacgccgcccctgccgtctctgccggcaagtgtgggcaacacagaaccccggccatctccgccggcaaaggaggcgccgccggcggcatggaagaagaagaagaggttcaccgcaacgtcgcgaacgagaacgactcggtttcctcgaagaggcaggccctactcgccgacagggacacgccggccgtcttcgccggcatggaagacggccacgacaacgactggtacgactccgtcatccgcgacgccgtgatcgccgagctgcaagaggacccagagctccatgggcctctcccggtgcaatacctcacaaaatcgcccgtcgtggcgcaaccaccaccccgcgccaccgccgccgccatcgccggagaagaagaagaagaagaaggtgaattctccatgccaaacttctacaagaagtggggcctccgcccatccgacctcgaccccgacgaggccggcccgtcgacgaggcggccgagggtgctccccctcgccgacggcgacctcccgacgttcgactgcggcatctgcttcgacaccttgccgatgctcgacctcttccgcggcctcccctgcgaccacaagtactgcctcgagtgcatgaccacctacatcgacggcaaggggtgcaagaaggccatcgacttcgccgcgttcaccgactgggggctccggctcgccgagggcgccgtgccgcacgaccggcgggcgtactgccccaaccgccggtgcgggatcctgctggagaccagcggcgaggcggagccggccatggcggcgtgcccggcgtgccagcacctgctgtgcgcgacgtgcggcggggagtggagcacggcggacgacgccgaccaccgggactgctccaaggggcccgaggccgccatggtgaagaagctcgccgacgagcggcggtggaaggcgtgccccaaatgcaggatgctggttgagaggacagccggctgcagggtcatgagttgcaggtgccgcatggtcttctgctacctttgtgggctccagataggagcggtgctggaggggaaggagaaatgccagtgcctcgacaatctcggcgtcgttctgattaaagcactgtgcagattttctaaaaggagaactgcatcttatcctccaataaaagccattcaaataaaaggggtggtggtctctcatctgcgcagtagccaacgacacagacgccatcccgtcgccgactaccaagcacgagaagaggagagttgtcgccaacacctctacacaaaggtggtcaacccccaccttcctcctatcgccgtgtctgctaccaataccgcatcctgtcggcacgagggggttgccacagcaactgctcacacccatccccgtacctccacgcaggcggtctcaccattgcccagtgtcgccattgctatgccttgcgagcattcctctaccacgcgttggtcacgtagatctagcctcgaagctactggatctagcatcaccagcgctagatccactactggaactgtcttcaacaccattggtcatagttgtcgtcgcttcaaccgcgttgccgccatcacagtcactatcatggccagatccatcctccaaatctatcaccttgtgctcgcaacctctgggagctcatgggagaaaaggccccacaccactaacatccttgtcaccgcaagatttccgacggatggctctgatggtggcgaggaggtgggagggaggaaagtggagtggcaccgtggcatgggtcactgcccgagtcattcctcagtaattgagtaa

SEQ ID NO: 12204 - DNA, 987 bp, Oryza sativa
  Clone ID: TFbOSC401875j.C1.o11.fg
atggagaactccgccgccgacgccgccgccgctgcgggtggtgccgacgtgatctacatctcctccgacgatgaggacgaagaaatccgcatcctctccgccgatccttacagtcccgaggagatccaaatacaggaggtcatcctcctctcgctcgactactcccgtgccgccgccgccgacgccgacaccgcccagtcctccgcctcctcctctcgcccctccgccgccgcctccaccttcggtgaaccctcctccctccccgaccgtaagggcaagagcaagctattatcggaagatggcccgagcgaatcgacgacgacgaggcggtggcggaagcgcggcttcacgtgcatcatctgcatggacaaggtccaggcctcggaggagttcctcgtcaacgtctgctcccacgccttctgcaagagctgcatcgggggctacgtcgccgccaaggtctccgacaacgtggccgcgatcgggtgccccgaccccgggtgcgaggaggggtccgtcgagatcggccagtgcagggacatcgtcccgccggagctgttcggccggtggagcgtctcgctgtgggagtcctcgatgggggagacgacgaagtgctactgcccgttcaaggattgctcggcgatgctgatcaacgacaacggcgacggcggcgacgcggaggagatcgcggagacggagtgcccccactgccaccggatgttctgcgcgagctgccgcgtgccttggcatgatgggatcgactgcaaggagttcaggaagctgggcaacgacgagaagggtaaggaggatctgatgttgaagaagctggctgggaagaagaaatggcagaggtgtcctcagtgtaggatgtacgtggagaaatcagcgggatgcacgttcatgaggtgcaggtgtggatttttcttctgctacaactgcgcagctcccatgaccaaattagtgcattactgcaagaaatgcaaccgttga

SEQ ID NO: 12205 - DNA, 1713 bp, Oryza sativa
  Clone ID: TFbOSC400083j.C1.o24.fg
atggactccgaggacgacatgctcgacgcgaacgactccgccgacgacgacttctacagcggcggggaggccgggctcggcgggagcgacgacggggacgccgactacgacttcgccgaccacgactccgacgattccgcggagctcctctcgcaccggcagcagaaaaacaatgggaattctatgggtgtattgtttgggagggtggggagcggggatataaattcatgggataaagatagtctacaggaaataggctatggcataactgtaaatgaattgtggatatatccatatccttaccatactgaaacaaccgccattattcgcaaagggtcgcgatctcatgaggatgagcaaaattacagtatattaagtgaagccgatatacaacagcgccaagaggatgatataaatagggtttcaactgttctttcaatttcaaagtcagaagcatgtgttcttcttcgtaattataactggagtgtcagtaaggtgcatgatgaatggtttgctgatgaagaacatgttcgtaaggttgttggttttccggaaaagctcatcgaaatgccaaatgacagagaatgcatgttggagaggtttgacaatctaaccttgagatatttctctttatcaaccccggattctgttttgtgtgggatcaccacttacatagtgcacattgacagatgtcctgatccgtcctgcacagctgctgttggtcaagatatgatcaattcactggctgatgacgaggatagggaaaagtatgggcgatatcttcgcagatcttacattgaagataataggaagacaaaatggtgtcctgctcctggatgtgaatatgctgtagaatttgtcatgggcagtggtagctatgatgtgaactgcaactgttcatacggcttttgttggaactgcactgaggaagctcatcgtccggtagactgtgccactgtttcaaagtggatcctcaagaacagtgcggagtctgaaaatatgaactggctgtgtcttggtccatggtcggagcatggagaacggactggtggattttatgcctgtaaccgttatgaggcagcaaggcaggaaggagcgtatgatgaatctgaaaggagaagagaaatggcaaagaactcgcttgagagatatacacactattatgaacggtgggcagccaatcagtcgtcgaggcaaaaggcattaggagatctgctgagtttgcaaaacgacaagcttgaaaagttaagtgatatacaaagccaaccagagtcacagctcaagttcatcatagaggcttggttacagattgtcgaatgtaggagggtattgaagtggacttatgcttatggtttttacctcccagagcatgaacatgccaaaagacagttctttgaatatctgcaaggtgaggcggaatcaggtttggagcggctgcatcaatgtgcagagaaagaacttcaagtataccttgaagcagaatctccctcaaaagatttcaatgacttccgtacaaagttggctggattaactagtgtgactcgcaattatttcgagaaccttgtccgggctttggagactggattaaatgatgtaggtccttccactagccatggtacatgcagcaagagcgcaacttcgaagagtcttggcagtaaaaatctgccagaaactgccaggcttgtaacaaccagcatcgatagcattacatag

SEQ ID NO: 12206 - DNA, 1821 bp, Oryza sativa
  Clone ID: TFbOSC401841j.C1.o3.fg
atggactccgaggacgacatgctcgacgcgaacgactccgccgacgacgacttctacagcggcggggaggccgggctcggcgggagcgacgacggggacgccgactacgacttcgccgaccacgactccgacgattccgcggagctcctctcgcaccggcagcagaaaaacaatgggaattctatgggtgtattgtttgggagggtggggagcggggatataaattcatgggataaagatagtctacaggaaataggctatggcataactgtaaatgaattgtggatatatccatatccttaccatactgaaacaaccgccattattcgcaaagggtcgcgatctcatgaggatgagcaaaattacagtatattaagtgaagccgatatacaacagcgccaagaggatgatataaatagggtttcaactgttctttcaatttcaaagtcagaagcatgtgttcttcttcgtaattataactggagtgtcagtaaggtgcatgatgaatggtttgctgatgaagaacatgttcgtaaggttgttggttttccggaaaagctcatcgaaatgccaaatgacagagaatgcatgttggagaggtttgacaatctaaccttgagatatttctctttatcaaccccggattctgttttgtgtgggatcaccacttacatagtgcacattgacagatgtcctgatccgtcctgcacagctgctgttggtcaagatatgatcaattcactggctgatgacgaggatagggaaaagtatgggcgatatcttcgcagatcttacattgaagataataggaagacaaaatggtgtcctgctcctggatgtgaatatgctgtagaatttgtcatgggcagtggtagctatgatgtgaactgcaactgttcatacggcttttgttggaactgcactgaggaagctcatcgtccggtagactgtgccactgtttcaaagtggatcctcaagaacagtgcggagtctgaaaatatgaactggattctagctaattcaaagccttgtcctaagtgcaagcggcccattgaaaaaaaccagggatgcatgcacattacatgcacacctccatgcaaatttgagttttgctggctgtgtcttggtccatggtcggagcatggagaacggactggtggattttatgcctgtaaccgttatgaggcagcaaggcaggaaggagcgtatgatgaatctgaaaggagaagagaaatggcaaagaactcgcttgagagatatacacactattatgaacggtgggcagccaatcagtcgtcgaggcaaaaggcattaggagatctgctgagtttgcaaaacgacaagcttgaaaagttaagtgatatacaaagccaaccagagtcacagctcaagttcatcatagaggcttggttacagattgtcgaatgtaggagggtattgaagtggacttatgcttatggtttttacctcccagagcatgaacatgccaaaagacagttctttgaatatctgcaaggtgaggcggaatcaggtttggagcggctgcatcaatgtgcagagaaagaacttcaagtataccttgaagcagaatctccctcaaaagatttcaatgacttccgtacaaagttggctggattaactagtgtgactcgcaattatttcgagaaccttgtccgggctttggagactggattaaatgatgtaggtccttccactagccatggtacatgcagcaagagcgcaacttcgaagagtcttggcagtaaaaatctgccagaaactgccaggcttgtaacaaccagcatcgatagcattacatag

SEQ ID NO: 12207 - DNA, 5061 bp, Oryza sativa
  Clone ID: TFbOSC401616j.C1.o16.fg
atgcgccgatccaacgatggccgccccttccgcccgccggactggggcccgccgccgcaccgctaccaccaccaccaccagaaccagtaccagtaccagcagcggtatcgccccgcgcagccggggccgcggcagttcgccgtgatcctcctccgcggggggagcaacctctcggcgccgccggccacggaggtcgaggcactcgtcgccggcctgccctcccctcccccggacagcctgagcgtctcctcgtcgggccgccaggccgcgcgcctcgcgttccgctccccgcaggccgccgccgccgccgcgcgcgagctctggtcgctccgcctcgagggcctccacctcctcaccccggacgtctccgatcccgccctcgccgcgcacgccgcccccctcatcgcctccctcttcgccgcccacgccgcccgcctcgtcgactccgacctcgtctccctcacggccgcccgctcctccgagctcgcggcctccatccaggcggtgaagcgccgcctggcggggcacaatcgcatccgcgacttcgagcagctccaggcccagaagagaactctcaaggctgagaaggagttggtagatgctaaaatcgatgagtacaaagccgcgatgagatcgatacggcgtgcattgttgcgtgggacggaggatgacgaggaggcagaggaggaagggttggaggtgtttgggattgggggaggtggtgagatgaatttcgctaggctgcacatgataatgctgcgggaatgtagaaggcttaaggaggggctacccatctatgcttaccgcaggaacattctagatcacattttcgctaaccaggtgatgattttgattggggaaactggttctgggaagagcacacaattggttcagtatcttgctgactcaggtcttgctgctaatggttcaattgtctgtactcaaccccgaaaaattgctgctatatcattggcacatagagtagttgaagaaagcaatggttgctacggggacaactttgtgttgaattcaacctttttagatcatcaagatttcagttcaaagattatatataccacagacaactgccttttgcatcactgtatgaatgatatgggactagatggcatttcatatattattgttgatgaagcgcatgaacgaagcttgaacaccgatcttctcttagctttgattaagaagaaactgcttgataggctggatttgagacttatcataatgtctgctactgccgatgctaatagactcgctgaatatttttatggatgccaaacattttatgttaaagggcgaagttttcctgttgaaattaaatatgtccctgatatatcagaagaggcttccttcaataccgtgccaaaccatctgcgcggttcttgtgctactgcttcatatgtttacgatgttgtgaaaatggtaagcatcattcacaagaatgaagaagagggtgctatccttgctttcttgacttctcaactcgaagttgaatgggcatgtgaaaacttcagcgatgcagatgctgtggtacttccgatgcatggaaagctttcccatgtagagcaaagtctagttttcaagagctatcctgggaagagaaaaataatcttctgcacaaatattgctgaaacatcattgaccataaaagaagtgaagtatgttgttgattctggactggctaaggagagcagatttgtgcctagcagtggtctcaatgtactgaaagttaattggatctcccaaagttctgctaatcagcgtgctggccgagcaggtcgaactggagcggggaggtgttacaggctttactctgaatctgacttcagtatgatggaagtgcatcaagaacctgaaatccgcaaagttcatcttggcactgctgttctgagaatacttgcgctgggtattagggatgcacagaattttgaatttgttgatgccccaaacccagaagctattaatatggctgtaaagaatcttgaacaactgggtgctgtaaaatataaatgtgatggttttgagctgactgatactggtcgctacctagttaaattgggaatcgagccgaggcttgggaaaatcatgcttgattgctttggttttggtttgaggaaggaaggtgtagttctagctgctgttatggcaaattctagcagcatattttgtagagtgggcacagatgaggagaaatacaaagctgaccgtctaaaggtcccattctgtcatcaggatggagatctgttcactttactagctgtatataaagagtgggaggatgagcatgaaaacaggaatacgtggtgctggcagaatagcatcaatgccaagaccatgaggaggtgccaggaaacaatatcagaccttgagaattgtttaagacacgagctgaacatcattgtcccaagttactggtgttggaaccctgaggagtccaccgtgcatgataagttgctaaaaagaattattctcacatctctttctggtaatattgctatgttttctggacatgaaaggtttggttaccaggtgatttcaacggatcaggctgtgaaactacatccctcttgctcattgctcatttatgatagcaagcctgagtgggtggtgttcacagaaatcttgtcagtaccaaatcaatatttggtatgtgtaactgctattgatcctgatgctttgtgttcgattcaccccatgcctttgattcagcaactggagaagcttaaattgcaggtgaaggtaataagtggacttggatataacttgctgagaaaattttgtggaaaatctggccaaaatcagcagaagataatctcacttctccaagaagaattcagggatgaccgtgtgactgttgaagttgacttcagaaataaagaggttgtgctatttgccaaagaacaagacatagaaaaggtgtttggcatcgttaatgatgcattggagtgtgaagctcggatgttgaggaatgaatgccttgagaaaagtttgttttctggaaaacctggtgattgttctcttgccctatttggttctggtgctgaaataaagcatttggaacttgagaagaggtatctgaccgtagaggttttgcatcaaaatgctcatgagttgaatgacaaggagcttatttgcttggtggatactcttatctctggtgttgctaatttttataaactttatggaaatcttcaggtggcctcagatgaaacgaagtgggggaagtttacattcctcaatcctgaatatgctgaagatgctgtttcaaaattgaatgggatggaatttcatggttctccattgaaagtggttccagtatgctcttccagtaatcgaggattaccatttccagcagtgagagctaaagtatcttggccacttaagcaaagtcggggactcgcgctggtaacatgtgccagtggggaagctgaatttgttgtaaaggactgctttgctctgggagttggtggaaggtatatcaactgtgaggttagtacaagacatgagaattgcatttttgtcagaggaattccaatgcatgtaacagagccagaattgtatgatgcctttcgtagcacgacaacaaggaaaatcgttgatgtgcatttgctcaggggaacacccatagctgccccttctgcttccttgtgtgcagaagcactaaatagagaaatttcttccttcatgccaaagaaaatttttcctgcccaaaatttccgtgttgaggtgttaactccagaggagaatgattcggtgatgagagccactattacttttgatggaagtcttcatcgagaggctgcaagagcattggaacatcttcaaggaagtgttcttccatgctgtcttccttggcagacaatacaatgccagcatgtgtttcatagtactgtgtcctgtcaagtacgcgtgtataatgttatcagccaagcagttgcttctcttcttgagagcttccgaagccaaaaaggcgtgtcttacaatttggaaaagaatgaatatggtatattccgtgtcaagcttactgcaaacgccacaaaaacaatagcagacttgagaaggcctcttgagattttaatgaaaggcaaaacaataaaccatcctgatctgacactaagtacagttcagttgctcatgtcccgtgatggtgtagcagatttgaaatctgttgagcaagagactggcacttacattctgtatgacagacaaagtctaaatattaaagtctttggactccaagatcaggttgctgcagcagaggagaaattgatccatgcccttctacaactccgtgataagaaacctttggatattcgtcttcgtggccgtaacctacctccaaacttgatgaaggaaatgttaaaaaagttcggggctgatctggaaggattgaagagagaggtgcctgcagtagagcttcgattaaatttacgacaacatacactttacgttcgaggcagtaaagaagacaagcaaagggtggaagaaatgatctctgagctggtaaattctacaaagtacaatggcctgcttcaacttccattagagaatgcatgccctatttgcctgtgtgaggtagaagatccctttaagcttgaatcttgtgggcatgtgttttgtctgacttgcttggtggatcagtgtgaatctgctttgaaatcacatgatggtttccctctgtgttgcctcaaaaatgggtgcaagaagcagctccttgttgttgatttgagatctctcctatcgagcgagaaactggaagagctatttagagcctccttgagagcatttgttgcttctaatgcaggaaaatatcgtttctgtcctactcctgattgcccatccatttaccaagtggctgctgcagatgctgaaagcaaaccttttgtctgtggggcttgctttgtggagatctgcaacaagtgtcatcttgaatatcatcctttcatatcctgtgaggcatacaaagaatacaaggaagaccctgatgcaactctgcttgaatggcgcaaggggaaggagaatgtgaagcccccatttgtgttctga

SEQ ID NO: 12208 - DNA, 1875 bp, Oryza sativa
  Clone ID: TFbOSC401665j.C1.o10.fg
atggtgaccgacgccgaggaggtctccccgacggcgtcctcgtcggaattggagcaggaggacgatgacgatgactgctacctgagcgatcaggaggacgacgccttggaggagtccgtcctccaggtgctggaggacgaacgcgacgaggattgccattggtcctccacctccgtatgcccccccactatccatcgttttatcctcgtcgtatttgttgtccgagtcccaatcgcttcggttgttgatgggttccttcgattgcaggtgatcaccaaggaatccctcttggcggcgcagagggaggatcttaggaaggtgatggagttgctagggttgagagagcaccacgcgcggacgctgctcatccactacaggtgggatgtcgaaaggattttcgagctgcttgatcagaaggggagggacaggctcttctcggaggctggtatccctctccaacctgctaataatcccggctcgccctcctcaacggaggtaacctgcaatgtttgctatgacgatgtgcccctctcggacgcctccaagatggactgcggccacaactactgcaatgaatgctggacaggatatttcattgtgaagataaatgagggacaaagccgccgtatcaagtgcatggctctgaagtgcaatactatctgtgacgaagcaatagttcgtaagctagtaaatgcaaagcggccagatattgcagagcgctttgaaaggttcttgttggaatcttatattgaggacaatgatacagtcaagtggtgcccaagcacaccgcattgtggaaatgctatacgcgtcaaaggtgatattcactgtgaggtggaatgtacatgtggacgccagttttgttttaattgctcctcagaagcacattcaccatgttcctgtgtgatgtgggagctctggatcaagaaatgccgtgacgagtcagagaccgtgaattggataacagtaaatactaagccctgtcccaagtgccacaaacctgttgagaagaacggtggctgcaatctggttgcatgtatatgtgggcaagcattctgctggttatgcggtggtgctactggcagagatcacacatggtcaagtattagtggccacagttgtggtcgattcactgaagatcagtcaaagaagacagagcaagctaggagaaacctttatcggtacatgcactaccacaacagatacaaagctcacactgattctcttaagcaggaagcaaagcttaagggcgacatccaggggaagatttccatttctgaaaacaaggattccaagataaaagattactcttgggtgataaatggattaaacagacttttcaggtcaaggcgggttctttcatattcttatccttttgcattctacatgtttggtgatgagattttcaaggatgagatgacttctgatgaaagagaactaaagcaaaacctatttgaggaccaacaacaacaattagaattcaacgttgaaagactatctggtttccttgagagggattttcaaaattttagtgatgatgaggttatggatacaatgaagcatgtcatcaatctttccaatgtggttgatagactctgcaagcaaatgtatcagtgcattgagaatgatttgttgtatccactgcgtacgcctcataatattgctccatacaaatccaagggccttgacagggcctcagagctcaatgtttgttgggattcttctgaacaaggttcatctatttttggaaagcggcaacttggctcaagttctaataacaatgggcggcctcacaagcgagaaagaaatgatgcccatggtggggctgccctttttgacctcaatgtgccagctgaagtggcagacaagatatga

SEQ ID NO: 12209 - DNA, 1578 bp, Oryza sativa
  Clone ID: TFbOSC400502j.C1.o16.fg
atggagtccggctacagcgacgtcgacgacgactacttcggcgactccgacgaggattatggcgacgacggcgattacatggatgacgatggcgacgactatggtgggcaggtggtcgaggaaacggaggcgccggcgatggagaagacgtacgttgttctaaccgaggacgacgtacgcgcgcggcaggaggaggacattgccaaggtgtgcgaggtgctctcgctctcgccgggcgccgccgccgtcctcctccggctgtacaggtggagggccgtcctgctccaggaggagtggttcctggacgagcgccgcatacgcgacgccgccggcctcctgccggcggacggcggcggcggcgaggtgcccgcgcgggtcaaccggcggcggctcacctgcgccatctgcttcgacgtgttcgacaccggcgggatgaggtcggcggggtgctcccacttctactgcgtctcctgctggcgcgggtacgtccgcgcggcggtgggcgacggcgcgcggtgcctgtcgctccggtgcccggatccgtcgtgcccggcggccgtcgtgcgcgagctggtcgacgcggtggccgacggcgaggacagggagcggttcggctggttcgcgctccggtcgtacgtggaggagagcgccgggatgaggtggtgcccggggcccgggtgcagccgcgccgtggagttcgtgggcggcggcgacggcgaggagagcagcgaggtgttctgctcgtgcgggcacgggctgtgctggcggtgcggcgaggaggcgcaccggccggtgtcgtgcaagacggtggcgaagtgggtggagaagaacagctcggagtcggagacggcgacgtggctgctcgcccacacaaagcactgccccaagtgccggctgccgatcgagaagaacctcgggtgcatgcacatgacatgccggccgccgtgcctccacgagttctgctggatctgcctcaagccatggcacggccacgcggcgtgctcccggtaccagcccaacggcacggtggtggcgctggccggcgccaacgccgacgacgagcggcggcggcaggccaaggcgtccctggacaggtacctctaccactacgagcggtgggacgccaacctcaagtcgctgcgcgtggcgctccgcgacatggagagcctggagcggtcggagctggaggcgatggcctcggcggcgggcgtgccggcgacggagatgggcttcgtgacggaggcgtacgagcaggtcggcgaggggcggcgggtgctcggctgggcgcacgcctacggctactacctcgacccggaccgcgacttcaccaagcggcagctgttcgagtacctgcaggaggacgccaacgcgtcgctggagcggctgcacggctgcgccgagagggagaggagggagctcttcgccgccggcgccgacgacaaggccgccgtcgacttcgacaagtacagggcgtacagggagaagctcgccgggctcaccagggtgacgcggcaatactttgggaacctcgtcaaagcgttcgagaccgacctggccgaggtctcctcctctagttaa

SEQ ID NO: 12210 - DNA, 1199 bp, Oryza sativa
  Clone ID: TFbOSC100716j.C1.o1.fg
gttggacggagtacttcgctgcggcggtgagcgacggcagcaagcagatgaggtgcatggaggtgaagtgcacggcgatctgcgacgaggcggtggtgcggctgctgctgcacgggaagcaccccggcgcggcggcgcggctggaccgccgcctcctggaggcgtgcgtggaggccagcgacgcggtgcggtggtgccccagcgcgccgcactgcgggcgcgccatccgggtggacggcgggggcggcggcgaggagcggtacgccgaggtgtcgtgcccctgcggcgccgtcttctgcttccgctgcggcggcggcgcgcactcgccgtgcccgtgccccatgtgggacaagtggggcgccatgcgcggcggcggcgaggtcgacaacctcaagtggatcgtcgccaacaccaagagctgccccaagtgctccaagcccatcgagaagaacggcggctgcaaccatgtcacttgcacctgcggccagcatctctgctacgcgtgcggcgcggcgacggggacgttgtacatgcacatctgcaaccgctacaaggaggagggcggcggcggcggcgtgaaggtggagatgaccgccggtgggcggcagcggctgcggttcatgcactactacgagcggttcgagatccacaccgagtcgtacaaggaggagcaggggaagctgggtccggccatcgacgctctggcgcggcggctggaggcggacgccacgctgccgtggtcgggcaccagggacgcccggtggccgtcggcggcgcaccggcggctgctgcggtgccggcaggtgctcccgcggtcgtacgtgctcgcctactacatgttcggcggcggcgcggcgacgcggcgcgagcgggaggaggcggcggcgcagaaccggttcgaggatttgcaggggcagctggagcaccacgtggaggtgctgtccaggacgctggcggcggcggcgcggccggccgacgcggcggaggtcgtgaaggcgaagcgcgacgccgacaacctcgcccgcgtcgtcgaggggctgtgcgccgggatgtaccggtgcgtccaggacgagctgctgccgctgctcgtcgagcccatgaacatcgccgcgtaccatccggacggcccggccatggccaaggagttcccgccggcgaccagcgtgaccggcggagcaccgccggcgacacgccactaa

SEQ ID NO: 12211 - DNA, 1722 bp, Oryza sativa
  Clone ID: TFbOSC401963j.C1.o4.fg
atggactccgacgccgagatgcccatgtccagcgacgaagagatgttggatgacgaggactattacgactacagtgatgacatgggtgaggacgatgatgggagcggcggcgggggcgggggagatagcgatggggaggaggaggaggagggggatgaggagctggtgggcggcgactacgagggccgcgaggcggaggggagcgacgaggtggtgtcccgccgcgagcagagatacattgtattaactgaaaaggatataaatgagcgtcaagaggaagatataggcaaggtatctgctgtactatcgattcgaagggaggaggcgtgtgttcttcttcatcactacaaatggaacatcagcaagttaagcgatgaatggtttgcggatgaagaaaaagttcgtgatattgttggattacttttaaatggaattgatcttcctaactctagaaagctaacttgtggaatatgttttgaagggtattcttctgatgtgatgagttctgctgattgtgatcatttttattgccatgaatgctgggaaggttatattagtgctgcaataagtgatggtccaggatgtttgtcattgcgatgccctgatccatcttgtggtgctatggttcttcagaacatgattaataagttagctaaagatgatgataaagtgagatatgcacgatttatcttacgtgcatatgttgaagatagcaagaagtgcacggaggaagctcatcgaccagtgaactgtgagactgtttctaggtggatattaaagaatagcgcagaatctgaaaatatgaactggatactggctaattctaagccgtgcccaaaatgcaaacgaccaatagagaaaaaccagggatgcatgcatatgacttgcactccaccttgcaaatttgagttctgctggttatgtctgggttcatgggctgaacatggggagagaactggtggattttacgcttgtaatcgctatgaatcagcaaagaaggagggagtttatgatgagactgaagcaaggagggaaagagccaaaaattcacttgagagatacatgcattactatgagcgctgggcatctaatcagacgtcgaggcagaaggcacaagcagatctgcaaaaggcagaaaaggaacaacttgcaaaattaacagatgtttttggaataccggagacccaactgaagttcataattgaagcttggtcacagattattgaatgcaggcgggtactcaaatggacatatgcttatggctattatctggacgacaaggtcaagagcgaatttttcgagtacctgcaaggtgaagctgagtctggtctggagcgtcttcaccaatgtgctgagaaagacctgcaatcatttttgactgtgagatctgataatactgaacctgcaccatcaattgctgaattcggtgacttccgggtgaagcttgcggggctgacaagtgtgactcggaattattttgagaaccttgttcaagcactggaggctggcttggaggatgtacactctactgcccagggtaccacatcaagcaatgccaccaacatcccctccaagaaagcagtcactaaaggcaaaacaaagaagcagcttcctagaacatcttcggacaactcagatgaaggctggccttgtgagcgctgcacgtttattaacccttcatcggtggatgcatgcagcgtctgcgataagcatagatactag

SEQ ID NO: 12212 - DNA, 1872 bp, Oryza sativa
  Clone ID: TFbOSC401022j.C1.o16.fg
atgtcgagcgacgacgaggagtgcttctacgactacgaggaggaggaggaggaggaggaggagccgggctgggacgacggcggcggcggcgacaccatgctggtcgaggaggaagcggcgttgccggagcgccccgtcgattgctgggtgagtaaagccatcccgaccatactcacaagcctaaaaaatcccatccacgctgatgttatgcataaaaacattcacaggccattacagaagagtctcttccggctgcacagcttgcagcttgtgctacagcaattagtactagtaacaaattacattgtgtttcttgacatgctcgatctacctgcgctgtatgtatgtacacagcaacaagacctgtccatggtgatgaacctgctctacataaagcagcaccaagctcgcgccctcctcatccaccaccgctggaagatggaatccatcctggaccacttcgacaggaagggccgagaccgcatgctcagggagaccggcgtcgtgatccagcagcaggcggaggagaagaacggtggcggcatggccatggcggcgtcgccgtcgccgccgccgcgccccagaagcagcgtgacctgctacgtgtgcttcgaggatgtctcatcggacgctgtctccaccatggattgcggacactgcttctgcaatgactgttggacggagcacttcttcgcgtgcgtgaacggcgggcagaagcagatccggtgcatggcggtcgggtgcgcggccgtctgcgacgaggacgtggcgcagcgcctcctcggcggcaggtaccccggcgcggcgcggcggctgcgcggcgccctcctcgcgtcgtacgtggaggacaacgcggcggcgcggtggtgccccagcgcgccgcactgcgggcgcgccgtccgcgtggacggcggcggcgggcggtggtgctgcgaggtgtcgtgcccgtgcggcgccagcttctgcttcggctgcgccgcgccggcgcactcgccgtgcccgtgcgccatgtgggagcgctgggaggccaagtgccgcggcgaatccatgaacgtggactggatcctcgccaacaccaagagctgccccaagtgctccaagcccatcgagaagaacggcggctgcaaccatgtccgctgcaagtgcggccagtgtctctgctggctgtgcggcgcggccaccgggctggcgcacaactggaccagcatcgacgggcacagctgcaaccgctacgacgacgcggcggagaagaggaaggtggacggcgcgaggcgcaaggtgctccggtacgcgcactactacgagcggtacaaggcccacggcgactcgcgcagggcggaggcggagaagctgggcccggccatcgaggcgcgggctcggcggctgcgcgaggaccccgacccggccacggcgccggccagcggcgacgccgccgaggcgctcgccgccgcgcaccgcgcgctgctcgcctcccgcgacgtcctctcgcggtcctacgccttcgcctaccacatgttcggcggcgaggagcggacgttgaaagcggcggcgccggagtcggaggtggcgacggcgcaggcgctgttcgaggaccaccaggagatggcggagaggcacgtggagaagctgtcggggctgctggcggcggacgcgcctccggcgccggccacggcgggggacgcggccctgcggcgggcgaagcaggacgccgtggcgctcaccgccgtggtggagaagcactgcggcgagatgcacaagtgcatccaggacgagctgctgcccatgctcgtggagcccatgtccatcgccgcctaccgccgcgacggccctatcaaggccaaggactttccaacctgtggtggcgcgtcgtga

SEQ ID NO: 12213 - DNA, 1623 bp, Oryza sativa
  Clone ID: TFbOSC401022j.C1.o14.fg
atggccagcgaccgccgctactactacttcgaagaagacgatggcgatggcgaggaggaggtggagtggctggcgatggaggccgacgaggacgacgtcggcctgctcgaggaggacgaccttcacctgcggcttcccgacgaccgccccgcggattgctgggccatcacacaagagtcacttcctgctgcccagcaacaagacctgtctatggtaatgaacttgctcaacataaagcagcaccttgcacgcacactccttatccaccaccggtggaagatgcattgcatttatgatcaccttgacagaaaggggcgggaccgcatgctcagtgaggcatgcattattttgccgaagaatagcatgtcagcagctagctcaacaagtgttacctgcaatgtgtgttttgaggacttctcaatgactgatgtctcgaccatggactgtgggcattgcttctgcaatgactgttggacagagcacttctttgcatccattaatactggcaacaagcagattcggtgcatggaggttaagtgcaaggccatttgtgatgaggacattgtgcgccgcctcctcagtctgaagtaccctgctgcatctaagcgcttcgatctcctcctacttgagtcttaccttgaggacaatgactcagtgaagtggtgccccagtgccccacactgtggccgcgcaatccaggtaggcaccggcgagaggtactgcgaggtcgcttgcccctgtggtgtcagcttctgcttcaactgtgcagggcaggtgcactcgccttgcccatgtgccatatgggagaagtggaaagctaagggccatggagactcggatagcgtcaagtggattcttgccaacaccaagagctgccccaagtgctccaagcccatcgagaagaacggtggctgcaaccttgtccattgcaagtgcggccagtgtctatgctggctctgtggtgggcctaccgggagggagcacacttgggatagcatctccggccacagctgcaaccgctacaaggaggaaaacggcgacaaggtggacaccagcagacagcagatgcagcggtacacgcactactgggaccgttacaacatccacgccggctcgtacaaggtggagcagaaggatcttgggcctgccgtcgaggagcaggtgaagaagctggagtcgaacctaacaggtccgaagatgaactgggacggtagctggctcgccatggcgtaccaatccctgctcgcatcgcggcaggtgctgtcgcggtcgtacgccttcgcctactacatgtttggcggcggcgaggtgaagacgcacccgtcggagcgggcgagcctcgccgtggcgcagaacctcttcgaggaccggcaggagcagctggagcgccacgttgagcatctctccaaggagctcgccacggacttgctggggctgccggaggaggagatcgtcctgaagaaggtggagattgccaacctcgccaagatcgtccaggcaatctgcgggcagttgtacaggtgcatccaggacgaactcctgccactgctcgtccagcccatgaacattgccgcgtaccagccggacggccctgacaaggccaaggagttcatcggggcttga

SEQ ID NO: 12214 - DNA, 1588 bp, Oryza sativa
  Clone ID: TFbOSC400944j.C1.o13.np
cggcgacggcgctgctgcacgagatgctgctccgggctcgccgggatggggaggagccggagctgtcggacgagcagctgcgctccaacgaccagctccaggaagacgagatgctggcactagaggcaatttatggagacaatataagcattttaagtgcaaaggatggactacgttgtttccaggtccatgtgcactgggaaattcctgatggtaccagcatatccacagagctatcccagggtgataaccatgaccaaaatagttgattctttgacacattcagtgtccagcacttggctccaatttcattgacatgccttatgcctccatcatacccaagccatcgcgctccatactttactctcagttcacagtggttggatgccgtgaaagtttcctccctttgtctcatgctggacacaatctggacacagcaacttggacaggaagttgtttatgcgtgggtgcaatggctgcagagctctgcgctttctcatcttggttttgatgatgggatactcatacaacagcctggtagtatgatgggtcctgtggatgttcgtgctgttgcagagattgcgtctgtagagtctgttgcacaatggttaatcagctacaatgaggagcaatgccatgaatcttttctaagtggccttcatgactgcatgatttgtttcaccgagtacgggggtattgattttattacacttccatgccagcattacttttgtcggaggtgtatggaaacgtactcaaggatgcatgtcacagaaggaacagtgctgaaattgttgtgtcctaacgacaagtgcgggggcatcattcctccaagtctattaaaaaggttgctaggagatacagattttgaacgctgggaaagattgatacttcagaagactctagactcaatgtcagacttggcttactgtccaagatgtggagcagcttgcctggaagacgaggagaacaatgcccagtgccccaagtgcttcttcagcttctgcgcccgctgcagagatcgccgtcacataggggagaagtgcatgactatagaagaaaagctaaattccttacaggatcgcaccgtggtgccttttttaagcaaagacagctttgccagtaaaatgaacttgtcaaatgaaatatccagcatcaaggaagtgctccgttcttctgttcgatgtccacattgtggtactgccatctcccgagtatcaggctgcaaccatatgttatgcagtaactgtaggcaatcgttctgctatggctgtggcaaggcagagaatcatggccattcaaggtacattcttcttagatctcaaatgagccctgcagataccaggagaatctggcaacgaagaagaatccaaccgtcctcattgaggaggtgaagaaagaactggagggggaactgtcaagacagcatccgtgcccaaattgtcgccaaccaaatcctaagatgggaaacaacagccatatgttctgctgggcatgccaggttcattactgtgcgcagtgccacaggatggttcggaagagctccgagcattatggtccccgtggatgcaagcagcacagtgtcgac

SEQ ID NO: 12215 - DNA, 627 bp, Oryza sativa
  Clone ID: TFbOSC417464j.C1.o9.fg
atggcgcgaggcaaggtgcagctccgtcgcatcgagaacccggttcaccgtcaggtcaccttctgcaagcgccgtgccggcctgctgaagaaggccagggagctctccatcctctgcgaggccgacatcggcatcatcatcttctccgcccacggcaagctctacgacctcgccaccaccggaaccatggaggagctgatcgagaggtacaagagtgctagtggcgaacaggccaacgcctgcggcgaccagagaatggacccaaaacaggaggcaatggtgctcaaacaagaaatcaatctactgcagaagggcctgaggtacatctatgggaacagggcaaatgaacacatgactgttgaagagctgaatgccctagagaggtacttagagatatggatgtacaacattcgctccgcaaaggaaggcatgttgaaagctgctaacgaaattctccaagaaaagatagtagaacagaatggtctgatcgacgtaggcatgatggtagcagatcaacagaatgggcattttagtacagtcccactgttagaagagatcactaacccactgactatactgagtggctattctacttgtaggggctcggagatgggctattccttctaa

SEQ ID NO: 12216 - DNA, 483 bp, Oryza sativa
  Clone ID: TFbOSC401315j.C1.o2.fg
atggagcggatcctcgcaacggcggcggcgacggcgtgctcctgcacaaggtttgggcttggtaacagattagtggtcactagtgaggaccagtcacctttgacggaggaccgtcactgccatctcatgggagaggatcttgaatctctgaatctcaaagagctgcagcaactggagaagcagctgaaaaatacatcgaaacatatcagatccagaaaggatgaggagaagcacatgctcgccgtacagccgataggccttgacggcggacggcagcgcacacagccgattggaggagagaggagacgccatccactcaccatgagcctggatctggcgctgttggcgccgaaggccactggatctggagtacccaaactcgggacagctagatccacagccccccgagctcgggttgtccaaacttggagccctagccggcttgtggtcaccggcgttgcacctccacaccgttcgccatga

SEQ ID NO: 12217 - DNA, 483 bp, Oryza sativa
  Clone ID: TFbOSC900305j.C1.o2.fg
atggagcggatcctcgcaacggcggcggcgacggcgtgctcctgcacaaggtttgggcttggtaacagattagtggtcactagtgaggaccagtcacctttgacggaggaccgtcactgccatctcatgggagaggatcttgaatctctgaatctcaaagagctgcagcaactggagaagcagctgaaaaatacatcgaaacatatcagatccagaaaggatgaggagaagcacatgctcgccgtacagccgataggccttgacggcggacggcagcgcacacagccgattggaggagagaggagacgccatccactcaccatgagcctggatctggcgctgttggcgccggaggccactggatctggagtacccaaactcgggacagctagatccacagccccccgagctcgggttgtccaaacttggagccctagccggcttgtggtcaccggcgttgcacctccacaccgttcgccatga

SEQ ID NO: 12218 - DNA, 333 bp, Oryza sativa
  Clone ID: TFbOSC1354j.C1.o1.fg
atggagctgtttcaccgttatgagatcaccaccagaaacactcggcttcaggagacaaaccgtgatgatgagcaaatggtcatggagatcacaaggctaaggaatgagatcgaccagctcgaagccagtttaaggaggcaaactggagaagacctgtcatctgtgtccacagtggatgagctcagccagctgcagctgcagcttgaatcatctctcagcaaagttcatgcgaggaaggatgagctcatgagccagcagctggaggatatgcgtcgcatggtacactactcccttattgtagtcgcagttgtggtttttgctgatgagtggtga

SEQ ID NO: 12219 - DNA, 648 bp, Oryza sativa
  Clone ID: TFbOSC409438j.C1.o1.fg
atgcgcaaaacaaccaaaagggcaatattcaatccaccgaacacccttcaggataattcgtatacaaaacttgcagttctggcaaagggaggcagcaagcttgagacaacaactgcacagcttgcaagaaaatcatcgaaaaacagaactgagcacccatcaaaggcggacagaccaaatttacaaaggagagtgaatatcacattttcttcacctgtgctttctgcctggcagttgatggggcaagatctttctggattgggtgtcaaggaactgcaaactctagaaaatcagctagaaatgagcatacgctgcatccggacaaaaaaggaccagctcatgattgatgaaatccacgaactgaatcgaaagggaagtctcatccaccaagaaaacatggaactgtacagaaagatagatgatttcacaggatatacgcttcattatatgatgacagctaatctctctcctcagctctatgagacaggggcagaaaatgaagcgaatcgagattcaacaactccatacaactttgcggttatcgaggaagccaacactcctgctcgtcttgaactcaatcccccaagccaacaaaatgatgctgagcaaaccacacctcctaaactagggctccaattgcatccatga

SEQ ID NO: 12220 - DNA, 483 bp, Oryza sativa
  Clone ID: TFbOSC20932j.C1.o1.fg
atgcacaaatgcagcgtgaaggaaactattgagaggtacaagaaagccaacagtgacacctccaacgccagtacagttgcagagatcaatgcccagcactaccagcaggaagctgctaagctgaagcaacagatcaccaacctgcagaactccaacaggaccctagtaggtgataatatcaccaccatgaaccacagagaacttaagcagctggaaggcagactggacaaaggcctaggaaagattagagcacggaaggaaacggagctgcagaatgacaacatgtacttaaagagcaaagttgctgagagtgaaagaggactgcaaacagtgaacatgatgggttcagcatctacgagcgagtacgtgcaaaatatgatccattatgatccaagaaacttcctgcaattcaacatcatgcatcagcctcagtattatcctgaacaggaggaccgaaaggcctttatgtcagatgaaagataa

SEQ ID NO: 12221 - DNA, 501 bp, Oryza sativa
  Clone ID: TFbOSC20980j.C1.o1.fg
atgtcctcggtaaagcgcaacaactgtagcagcgtgaaggaaactattgagaggtacaagaaagccaacagtgacacctccaacgccagtacagttgcagagatcaatgcccagcactaccagcaggaagctgctaagctgaagcaacagatcaccaacctgcagaactccaacaggaccctagtaggtgataatatcaccaccatgaaccacagagaacttaagcagctggaaggcagactggacaaaggcctaggaaagattagagcacggaaggaaacggagctgcagaatgacaacatgtacttaaagagcaaagttgctgagagtgaaagaggactgcaaacagtgaacatgatgggttcagcatctacgagcgagtacgtgcaaaatatgatccattatgatccaagaaacttcctgcaattcaacatcatgcatcagcctcagtattatcctgaacaggaggaccgaaaggcctttatgtcagatgaaagataa

SEQ ID NO: 12222 - DNA, 636 bp, Oryza sativa
  Clone ID: TFbOSC900209j.C1.o7.fg
atgagggggaagggatgctggagcaaaggagaggagggtcaagaggagaagataaaaattaaggagaggatggaggagagaaaaaggtgcagcgtatctagagaaagtagtttctgcacatctgatacccacgccataggtatatttctagctcatttcaggactacccaattttatgaggtggatggtttcaatctttgtttggagttctggcaagcagaggcggaacgtttaaaacagcaactgcataacttagaaggaagtcaaaggcagttgttggcacatgatctctctggccttgaatggaatgacctgaagagtctagaaaatcaactggagacgagcttgcataacgttcgtctaaagaaggacaaaatcatggtcgaacaaattcaagaattgagaaagaaggagaacatcatgcaccgagaaaacatggaactccaccgtgagttcaacatgatccgtcaagatagtgtgaatttccagcgaaaggtttatggaaaacaagatgtaaatggaggacagggaagttctgttactcagaacaccaatactcaggatgatgcagacgaaattcgtcttgagctaagccaaccacaggttccggatgagaaaccagaagcagcagcataa

SEQ ID NO: 12223 - DNA, 858 bp, Oryza sativa
  Clone ID: TFbOSC417635j.C1.o14.fg
atggggaggggcaggattgagatcaagaggatcgagaacacgacaagccgccaggtgaccttctgcaagcgccgcaacggacttctcaagaaggcgtatgagctctccgtcctctgcgatgccgaggtggctctcatcgtcttctccagccgtggccgcctctacgagtactccaacaacaacaattacttgaaaaaggactattctgttctaattttcttagtcttatgtgtgaaggctacaattgacaggtacaagaaggcgcatgcttgtggctcaacttctggtgcacctctcatagaggtcaatgctcagcaatactaccagcaggagtctgccaaactgcgccaccagattcagatgctgcaaaacaccaacaagcacctggttggcgataatgtgagcaacctgtcactgaaggagctgaagcaacttgaaagccgcctggagaaaggcatttcaaagatcagagccaggaagaatgaactgctggcttcagagatcaattacatggccaaaagggagattgagcttcagaacgacaacatggacctcagaaccaagattgctgaggaggagcagcagctgcagcaggtgacggtggcccggtcggccgccatggagctgcaggctgcggcggcggcgcagcagcagcagcagaatccgttcgcggtggcggcggcgcagctggacatgaagtgcttcttcccgttgaacctgttcgaggcggcggcgcaggtgcaggccgtggcggcgcagcgccagcagatcatccccaccgagctcaacctcggctaccaccaccaccttgccattcccggcgccgccgccgccgacgcgccgcctcctcacttctga

SEQ ID NO: 12224 - DNA, 364 bp, Oryza sativa
  Clone ID: TFbOSC21206j.C1.o1.fg
gcagatgagaggagaggagttgcacaggctgaatgtggaacagctgcaggagctagagaagagcctcgagtccggtctaggctctgttctcaagaccaagagcaagaaaattctggatgagatcgatggactggaacgaaagaggatgcaattgatagaggagaatttaaggctgaaggagcaagtgtccaggatgtcaagaatggaggagatgcagcctgggcctgattcagaaatcgtgtacgaggaagggcagtcgtctgaatctgtcaccaatgcttcttacccgcgacctccacccgacaacgactacagctctgatacatctctcaggctcgggttgtcactcttcagctccaagtga

SEQ ID NO: 12225 - DNA, 768 bp, Oryza sativa
  Clone ID: TFbOSC401003j.C1.o2.fg
atggggagagggaagattgccatcaagaggatcgacaacacgatgaaccggcaggtgaccttctcgaagcggcgcggcgggctgatgaagaaggcccgggagctggccatcctctgcgacgccgacgtcggcctcattgtcttctcctgcaccggccgcctctacgacttctccagctcaagcatgaaatcaataatagagcggtaccaggaggcaggagaggagcattgtcggttgctgaacccaatgtcagaggctaagttttggcagcgggaggttacaactttgaggcagcaagtgcaaaacttacaccacaacaacagtttttacttgtctgcaaactatttaaacgaaaacagtgcatactactttattaggatcaaccaatatgaaggtgaaaatgaaatcttttttaaggcccatgtggaaattcatgtttcaaataaaaggcaacttttgggagaggaaatctccaacttcacagttagagatctgcagcttctccagaaccaagttgagatgagcctacattccataagaaataaaaaggggtctcttgttcaaaaggagaacagtgaacttcgcaagaagttcaacattgctcatcaacgcaacatagaattacacaagaagcttaactctggagaaagcacgtcaagtgagcaagttaccagaagctcaaaggatcccggagaatcgagtacaccccgtgattcacgtgtgtgtattgaccttgaattgagtcaaaaagaagttgaagatgaataa

SEQ ID NO: 12226 - DNA, 678 bp, Oryza sativa
  Clone ID: TFbOSC401545j.C1.o6.fg
atggggcgagggaaagtagagctgaagcggatcgagaacaagataagccggcaggtgacgttcgcgaagaggaggaacgggctgctgaagaaggcgtacgagctgtccgtgctctgcgacgccgaggtcgccctcatcatcttctccacccgcggccgcctcttcgagttctccacctcctcctgtatgtacaagacactggagcgataccgcagttgcaactacaaccttaactcatgtgaagcatctgctgcactggaaactgaactaagcaattaccaagagtacttaaagttaaagacaagagttgagttcctacaaacaactcagagaaatcttcttggcgaggacttggttccacttagcttgaaggagctcgagcaacttgagaaccagatcgagatatccctcatgaatatcaggtcatcaaagaatcaacagttgcttgatcaagtatttgagctcaaacgtaaggaacaacaacttcaagatgctaataaagacttaaaaaggaagatacaagaaactagtggagaaaatatgcttcatatatcttgccaagatgtagggcccagtggccatgctagtgaagctaaccaagagtttctccatcatgcaatttgtgacccttccctgcatatagggtatcaagcttacatggatcacctcaaccaatga

SEQ ID NO: 12227 - DNA, 720 bp, Oryza sativa
  Clone ID: TFbOSC410931j.C1.o4.np
atggggagggggaagattgtgatccgccggatcgacaactcgacgagccggcaggtgacgttctcgaagcggaggaacgggatcttcaagaaggccaaggagctggccatcctctgcgacgccgaggtcggcctcatgatcttctccagcaccggccgcctctacgagtactccagcaccagcatgaagtcagttatagatcggtatggcaagtccaaggatgagcagcaagccgtcgcaaatcccaactcggagcttaagttttggcaaagggaggcagcaagcttgagacaacaactgcacaacttgcaagaaaatcatcggcagttgatgggcgaagatctatctgggctgaatgttaaggaattgcaatctctagagaatcagctggaaataagtctacgtagtgtccgtacaaagaaggaccacgtcttgattgatgaaattcatgaactgaatcggaagggaagtctagttcaccaagaaaacatggaattatacaagaagatcagtttaattcgtcaagaaaatgctgagttatataagaagatctacgagactgaaggaccaagtgaagtcaatcgggattcaccaactccttacaattttgcagtaattgaaaaaacaaatgttcctgtgcaacttggactcagcacactaccacaacatagtgacgccgaacaatcaactgctcctaagctagggtaacacttagctcta

SEQ ID NO: 12228 - DNA, 561 bp, Oryza sativa
  Clone ID: TFbOSC400415j.C1.o2.fg
atggggaggggcaagatcgagatcaagcggatcgagaacgcgaccaacaggcaggtgacctactcgaagcgccgcacggggatcatgaagaaggccagggagctcaccgtgctctgcgacgcccaggtcgccatcatcatgttctcctccaccggcaacatcaaggggatctttgaccgctaccagcaagccatcggcaccagcctttggatcgagcagcaaaggatgggagaagatctggacgggctggagttcgacgagctgcgcggtcttgagcaaaatgtcgatgccgccctcaaggagtatcatgtgatcaccacacagactgaaacctacaagaaaaaggtgaagcactcctacgaggcgtacgagactctgcagcaggagctggggttgcgcgaggagccggcgttcgggttcgtggacaacaccggcggcgggtgggacggcggcgccggcgccggcgcggcggcggacatgttcgccttccgcgtggtgcccagccagcccaacctgcacggcatggcctacggcggcaaccacgacctgcgcctcggttga

SEQ ID NO: 12229 - DNA, 858 bp, Oryza sativa
  Clone ID: TFbOSC404997j.C1.o2.fg
atggcagagaaaaagaagaagaagaagaagaagaagccgcaatcactcctagtccttacaagctggagatcgatcgggatggggaggggtcgggtggagctgaagaggatcgagaacaagatcaaccggcaggtgacgttcgccaagcgcaggaatggcctgctcaagaaggcgtacgagctctccgtcctctgcgacgccgaggtcgccctcatcatcttctccaaccgcggcaagctctacgagttctgcagcacccagagcatgactaaaacgcttgagaagtatcagaaatgcagttacgcaggacccgaaacagctgtccaaaatagagaaagtgagtactacaaatctaaacataggctgtgtttagttcggtccaaagtttggaatttggttaaaattagagacgatgtgactgaaaagttgtgtatgtatgaaagaaatttgctgggtgaagatcttgattcattaggcataaaagagctcgagagcctagagaagcagcttgattcatccctgaagcacgtcagaactacaaggacaaaacatctggttgaccaactgacggagcttcagagaaaggaacaaatggtttctgaagcaaatagatgccttaggagaaaactggaggaaagcaaccatgttcgcgggcagcaagtgtgggagcagggctgcaacttaattggctatgaacgtcagcctgaagtgcagcagcctcttcacggcggcaatgggttcttccatccacttgatgctgctggtgaacccacccttcagattgggtaccctgcagagcatcatgaggcgatgaacagtgcgtgcatgaacacctacatgcccccatggctaccatga

SEQ ID NO: 12230 - DNA, 750 bp, Oryza sativa
  Clone ID: TFbOSC416737j.C1.o14.fg
atggggaggggaagggttgagctgaagcgcatcgagaacaagatcaaccggcaggtcaccttctccaagcgccgcaacggcctcctcaagaaggcgtacgagctctccgtgctctgcgacgcggaggtggcgctcatcatcttctccagccgtggcaagctgtacgaattcggtagcgccggaataaacaagacattggaaaagtacaatagttgctgttacaacgctcaaggttcaaatagtgctcttgctggtggtgaacatcagagctggtaccaagagatgtcaaggctcaagactaagcttgaatgtctccaacgctctcagaggcacatgcttggtgaagatcttggaccattgagcataaaggaactgcagcagctggagaagcaacttgagtactcactgtcacaggctcgacaacgaaagacacaaatcatgatggagcaggtcgacgatcttcgccggaaggaacgccagcttggagagctcaataagcaactgaaaaacaagctagaagctgaagccgatagcagcaactgcagatcagccatccaggattcctgggtccatggcaccgtcgtcagtggcggcagagtgctgaatgctcaaccaccaccagatattgactgtgagcctactctgcaaattgggtactatcaatttgtccgtcctgaggcggccaatccaagaagcaatggaggaggaggggatcagaacaacaactttgtgatgggatggcccctctga

SEQ ID NO: 12231 - DNA, 765 bp, Oryza sativa
  Clone ID: TFbOSC100382j.C1.o4.fg
atggggaggggaagagttgagctgaagcgcatcgagaacaagatcaacaggcaggtcaccttctccaagcgccgcaacggcctcctcaagaaggcctacgagctgtccgttctctgcgacgccgaggtcgcgctcatcatcttctccagccgcggcaagctctacgagttcggcagcgccggttgtttcgtactagctcaacttggagatcttttcattatttgcctagttggtggcataacaaagactttagaaaggtaccaacattgttgctacaatgctcaagattccaacaatgcactttctgaaacccagagttggtaccatgaaatgtcaaagttgaaagcaaaatttgaagctttgcagcgcactcaaaggcacttgcttggggaggatcttggaccactcagcgtcaaagaattgcagcagctggagaaacagcttgaatgtgcactatcacaggcgagacagagaaagacgcaactgatgatggaacaagtggaggaacttcgcagaaagctcgaggttgaaggttccaccagcaactacagagccatgcagcaagcctcctgggctcagggcgccgtggtggagaatggcgccgcatacgtgcagccgccgccacactccgcggccatggactctgaacccaccttgcaaattgggtatcctcatcaatttgtgcctgctgaagcaaacactattcagaggagcactgcccctgcaggtgcagagaacaacttcatgctgggatgggttctttga

SEQ ID NO: 12232 - DNA, 783 bp, Oryza sativa
  Clone ID: TFbOSC401807j.C1.o25.fg
atggggcgcggcaagatcgagatcaagaggatcgagaacgcgacgaacaggcaggtgacattctcgaagaggcggggagggctactgaagaaggcgaacgagctcgccgtgctctgcgacgcccgcgtcggcgtcgtcatcttctccagcaccggcaagatgttcgagtactgcagccctacctgcagtttgagggaactcatcgagcattaccagaccgtcaccaacactcatttcgaggagatcaaccacgatcagcaaatatttgtggagatgactcggatgaggaacgagatggagaagctggacggtggcatcaggaggttcaccggcgacgacctctccaacctcacgctcgccgacatcaacgatctcgagcagcagctcgaattctccgtcaccaaagtccgtgcgagaaagcatcagctcctgaaccagcagctggacaaccttcgtcgcaaggagcacatcctggaagaccagaacagcttcctgtgccgcatgatcaacgagaaccatcatcaggcggcggtgggcggcggcgacgtgaaggcgatggtggagatggcgccggtgctgtcgatgctgacggcggcgccggcgtactacggcgaggagtcgtcgagcaccgcgctgcagctcaccccgccgctgcacgccgtcgacgccgccgccgccgccgggttccggctgcagccgacgcagcccaacctgcaggaccccggctgcagcagcagcagcttccatgccgccgccgccggccacggcctgcagctgtggtaa

SEQ ID NO: 12233 - DNA, 807 bp, Oryza sativa
  Clone ID: TFbOSC403824j.C1.o6.fg
atggggagagggccggtgcagctgcggcggatcgagaacaagataaacaggcaggtgaccttctccaagcggaggaacgggctgctgaagaaggcgcacgagatctccgtgctctgtgacgccgacgtcgcgctcatcgtcttctccaccaagggcaagctctacgagttctccagccactccagtatggaagggatccttgaacgctaccagcgttactcgtttgatgaaagagccgtactggagccaaatactgaggaccaggaaaactggggtgatgaatatggaattttgaagtccaaactggatgcacttcagaagagccaaaggcaactcttaggtgaacaattggacacactaacaataaaagaactccagcaattggaacatcaactggaatattctctgaagcatataagatcaaaaaagaatcagcttctgtttgaatcaatttctgagcttcagaagaaggaaaagtcacttaaaaaccagaataatgttctgcaaaagatcactacaaaagctgtattggaggtcaaacccttttgtctacattcttcggagcagctcatggagacagaaaaggagaaaaacaatgctataataaacactaaccgggaggagcaaaatggagcaacaccaagcacatcatcaccaacaccagtgacggctccagatcccatcccgacaacaaataacagtcaaagccaaccaagaggatcaggggagtcagaagctcaaccgtctccggcacaagcaggcaacagcaagcttccgccatggatgctccggacaagtcacacatga

SEQ ID NO: 12234 - DNA, 963 bp, Oryza sativa
  Clone ID: TFbOSC400495j.C1.o47.fg
atggggcgggggaaggtgcagctgaagcggatagagaacaagatcaacaggcaggtgacgttctccaagaggaggaatggattgctgaagaaggcgcacgagatctccgtcctctgcgacgccgaggtcgccgccatcgtcttctcccccaagggcaagctctacgagtacgccactgactccagtctcacaatcttactgatcatcaaggagtctgtaaacacctatacgtacggctataggattatggggaggatggacaaaatccttgaacgttatgagcgctattcatatgctgaaaaggctcttatttcagctgaatccgagagtgagataactcttccccagttgacaacatgcactgcatccagaagtactcatggtatttgttttcagtactgtttgatgagtaaaactttgggaaattggtgccatgaatacaggaaacttaaggcaaagattgagaccatacaaaaatgtcacaaacacctcatgggagaggatctagaatccctgaatctcaaagaactccaacagctagagcagcagctggagagttcattgaagcacataatatcaagaaagagccaccttatgcttgagtccatttccgagctgcagaaaaaggagaggtcactgcaggaggagaacaaggctctgcagaaggaactggtggagaggcagaagaatgtgaggggccagcagcaagtagggcagtgggaccaaacccaggtccaggcccaggcccaagcccaaccccaagcccagacaagctcctcctcctcctccatgctgagggatcagcaggcacttcttccaccacaaaatatctgtagctacccgccggtgatgatgggcgagagaaatgatgcggcggcggcggcggcggtggcggcgcagggccaggtgcaactccgcatcggaggtcttccgccatggatgctgagccacctcaatgcttaa

SEQ ID NO: 12235 - DNA, 1056 bp, Oryza sativa
  Clone ID: TFbOSC400256j.C1.o4.gm
atggggtggccggtcagaccggcctcggctcggtcagaccgccatcagttcggtctgaccgaatacggcttcgtcggctctgtatcggccatcccgagcagcaccatctcggcctccagggggccgtcccacgcaaaccaggtcagctcaagctcaagcaccgagccctacccctacgtcgatcgatctgcacggactgcacccgccctgccccaccgcgaaagcccccctcacctccattccttccatggcggcctccctcctcctcctccactgcaccctcctttactactccactccaaccatggcgtccagtcgtccacaccccccaccatccccaccttaaagaccggaagaacggcaactccccaaccctcttgtttcttcgagagcgaggtgaagatttgtttcttggtttgtgttcttggagtggaggaggaggaggagttggatatggggcgcggcaagatcgagatcaagaggatcgagaactcgacgaaccggcaggtgacgttctcgaagcgccgcgccgggatactcaagaaggcccgcgagatcggcgtgctctgcgacgccgaggtcggcgtcgtcatcttctccagcgccggcaagctctccgactactgcacgcccaagaccacgctgtcaaggatcttggagaagtaccagaccaactccgggaagatactctgggatgagaagcacaagagcctcagcgcagagatcgatcgtgtcaagaaggagaacgacaacatgcagatcgagctcaggctacccaaggagctgatcgcgatcgaggaggcgctcaacaacggccaggccaatctgcgggacaagatgatggaccactggaggatgcataaaaggaatgagaagatgctggaggacgagcacaagatgttggcttttagggtgcaccagcaggaggtcgagctgagcggcggcataagggagctggagctcggctaccaccacgacgacagggacttcgcggcctcgatgccgttcaccttcagggtgcagcccagccaccccaacctccagcaggagaagtag

SEQ ID NO: 12236 - DNA, 522 bp, Oryza sativa
  Clone ID: TFbOSC422442j.C1.o2.fg
atggagcgaatccttgagaagtatgacagacatgagttattatctgaaggaaataatgtgattgaagagttccctgagctggagggaagcatgagctatgaccacatcaagctgaggggcaggattgaagctctaaaaaagagccaaaggaatcttatggggcaggaacttgactcgctgacactgcaagatatccagcagcttgagaaccagatagacacttctctgaataacataagatcaagaaaggtgacgtatccatcgacagcgagacgacatggtaacttcttcaatcttaaaatatgtcggctcagtctttcggaggaaaagttgctgatggagaaaaacactattctggagaagctgcggcgattccggcgagccggaaaccgtgacggcgccacttggctggaccagcagcaacaatggcttgccatggtggatgctccagtcatcatcgaacggcaagagctagaagatgttcagatgaaatggtccctgcagccattgcatggttgctga

SEQ ID NO: 12237 - DNA, 606 bp, Oryza sativa
  Clone ID: TFbOSC417635j.C1.o12.fg
atggtcagaggaaaggtgcaaatgcgacgaatagagaaccctgtccacagacaggtaaccttctgtaagcgccgtggggggctcctcaagaaggccagggaactatcagtgctttgtgatgctgatgtaggtgttatcatattctcctctcagggaaaactccatgaattagctactaatggaaatatgcataacttggttgaaaggtaccagagcaatgtagcaggtggtcaaatggaaccaggagctctacaaagacaggtagcagaacaagggattttcttgttaagggaagaaatagatctactacagaggggtcttaggtctacatatggagggggagcaggggaaatgacactagataaattgcatgcactagagaaaggtcttgaactatggatttaccaaatacgcacaacaaagatgcagatgatgcaacaagagattcaatttcttagaaacaaggaaggcatactaaaagaagcaaatgaaatgcttcaagagaaggtgaaagaacagcaaaagctatacatgtctttgttggatctccatagtcaacaaccaacacaaccaatgacctacggaaatcgcttcttctcaatctag

SEQ ID NO: 12238 - DNA, 690 bp, Oryza sativa
  Clone ID: TFbOSC33084j.C1.o12.fg
atggggagagggagggtggagctgaagaggatcgagaacaagatcaacaggcaggtgacgttcgcgaagcggaggaatgggctgctcaagaaggcgtacgagctctccgtgctctgcgacgccgaggtcgccctcatcatcttctccaaccgcggcaagctctacgagttctgcagcggccaaagcatgaccagaactttggaaagataccaaaaattcagttatggtgggccagatactgcaatacagaacaaggaaaatgagttagtgcaaagcagccgcaatgagtacctcaaactgaaggcacgggtggaaaatttacagaggacccaaaggaatcttcttggtgaagatcttgggacacttggcataaaagagctagagcagcttgagaaacaacttgattcatccttgaggcacattagatccacaaggacacagcatatgcttgatcagctcactgatctccagaggagggaacaaatgttgtgtgaagcaaataagtgcctcagaagaaaagaaaagctggaggagagcaaccagttgcatggacaagtgtgggagcacggcgccaccctactcggctacgagcggcagtcgcctcatgccgtccagcaggtttactccagagcagatgaacaactcatgcgtgactgccttcatgccgacatggctaccctgaactcctga

SEQ ID NO: 12239 - DNA, 798 bp, Oryza sativa
  Clone ID: TFbOSC401826j.C1.o16.fg
atggggagggggaagattgagataaagagaatcgagaacaagacgagccgtcaggtgaccttctgcaagcgcaggaatgggctgctgaagaaggcctacgagctcgccatactctgcgacgctgagatcgcactcatcgtcttctccagccgaggacgcctctatgagttctccaatgtaaacagcacaaggtcaacaatcgagaggtacaagaaagcctctgccagcacttcaggatccgctccagtgatagacgtcaattctcatcaatactttcagcaagaagcagcaaaaatgcgccaccagatacagaccttgcagaatgcaaacaggcacctcatcggtgagtccattggcaatatgaccgcaaaggagctcaagagccttgaaaatcggcttgaaaagggcatcagccgaattcgatcaaagaagcatgagctgctgttctcggagatcgaatacatgcagaaaagggaagcagatcttcagaacgagaacatgttcctgagagccaaggtggcagaggccgagcgagctgaacatgatgatcagcaggcggcggaggacgacgagatggcgccggcgccggcggtcggcggcgggtcatcgtcggggacagagctggaggcgctgccggcgacgttcgacacaagggaatactaccagccggcgccgccggtgagcatgctggccgccgcggcggcggcggcggcggcgcagtactcgtcggaccaccaccagactgctctccacctcggctacttcaaggtcgactccggcaaaggcggcctcctctag

SEQ ID NO: 12240 - DNA, 513 bp, Oryza sativa
  Clone ID: TFbOSC900218j.C1.o17.np
agcgtggaggaaactattgagaggtacaagaaagccaacagtgacacctccaataccagtacagttgcagagatcaatgcccagcactaccagcaggaggctgctaagctgaagcaacatatcacctacctgcagaactccaacaggttcattatttcactcagctgcttagatttttttttttcaacttgacaaagtagttcatctggttataggcctagaaaagattagagcacggaagaacgaatatctgtgtgctgaaattgagtacatgcagagaagggaaacggagctgcagaatgacaacatgtactcaaagagcgaagttgccgagagtgaaagaggactgcaaacagtgaacatgatgggttcagcatctacgagcgagtacgtgcaaaatatgatccattacgatccaagaaacttcctgcaattcaacatcatgcagcagctagctagcctcagtattatcctgaacaggaggaccgaaaggcctcacagttcatagttcaa

SEQ ID NO: 12241 - DNA, 771 bp, Oryza sativa
  Clone ID: TFbOSC400152j.C1.o9.np
atggggagggggaaggtggagctgaagcggatcgagaacaagatcagccggcaggtgacgttcgccaagcgcaggaacggcctgctcaagaaggcctacgagctctccctcctctgcgacgccgaggtcgccctcatcatcttctccggccgcggccgcctcttcgagttctccagctcatcatgcatgtacaaaaccttggagaggtaccgcagctgcaactacaactcacaggatgcagcagctccagaaaacgaaattaattaccaagaatacctgaagctgaaaacaagagttgaatttcttcaaaccacacagagaaatattcttggtgaggatttgggcccactaagcatgaaggagctggagcagcttgagaaccagatagaagtatccctcaaacaaatcaggtcaagaaagaaccaagcactgcttgatcagctgtttgatctgaagagcaaggagcaacagctgcaagatctcaacaaagacttgaggaaaaagttacaggaaaccagtgcagagaatgtgctccatatgtcctggcaagatggtggtgggcacagcggttctagcactgttcttgctgatcagcctcatcaccatcagggtcttctccaccctcacccagatcagggtgaccattccctgcagattgggtatcatcaccctcatgctcaccatcaccaggcctacatggaccatctgagcaatgaagcagcagacatggttgctcatcaccccaatgaacacatcccatccggctggata

SEQ ID NO: 12242 - DNA, 735 bp, Oryza sativa
  Clone ID: TFbOSC403905j.C1.o14.fg
atggggcgaggcaaggtggtgcttcagcggatcgagaacaagatcagccggcaggtgacgttcgccaagcggcggaacggcctgctcaagaaggcctacgagctctccatcctctgcgacgccgaggtcgccctcgtcctcttctcccacgccggccgcctctaccagttctcctcctcatccaacatgcttaagacgcttgagagataccagaggtacatttatgcttcgcaagatgctgccgcaccaactagcgatgagatgcagaaaattaaccatcagaacaactatcaggaatatgtgaacttgaaggcacatgttgagattctgcaacaatcacaaaggaaccttctaggtgaggatttagctccactggctacaaatgaacttgagcagcttgagagtcaagtagtcagaaccttgaagcaaatcagatcaagaaagactcaggtactacttgatgaactctgcgacctaaagagaaaggaacaaatgctacaagatgcaaacagggtcctgaaaaggaagcttgacgagatcgacgtagaggcagctcccccacagcctccatggaacggaaactgcagcaatggccatggcggcggcggcggcgtgttttccagtgagcctccccaaccagagcacttcttccaggccctcgggcttcatgccgtggacgtgaaccagccgccggcgccgccaccgggcggttatcctcctgagtggatggcctag

SEQ ID NO: 12243 - DNA, 684 bp, Oryza sativa
  Clone ID: TFbOSC419955j.C1.o3.np
atggcgagggagaggagggagatacggaggatagagagcgcggcggcgcggcaggtgacgttctcgaagcggcggcgggggctgttcaagaaggcggaggagctggcggtgctgtgcgacgccgacgtcgcgctcgtcgtcttctcctccaccggcaagctctcccagttcgccagctccaatatgaacgagatcattgacaagtatactacacattcaaagaacctggggaaaacagataagcagccttctattgatctgaatttagagcacagcaagtgtagcagtttgaatgaacaactggcagaagcaagtcttcaacttagacagatgagaggtgaggagcttgagggattgagtgtggaagagctgcagcagatggaaaagaacctcgaggcaggactgcagcgggtgctctgtacaaaggaccagcaattcatgcaagaaatcagtgagctccaacgaaagggcattcagctggcagaagagaatatgcgcctcagagaccaaatgcctcaggtgcctactgctggcttggcggttcctgatactgaaaatgttcttactgaagatggacaatcatctgaatctgtgatgactgcattaaattcgggaagctcgcaggataatgatgatggttctgatatatccctgaaactagggtgagtttccgctggaaccctt

SEQ ID NO: 12244 - DNA, 825 bp, Oryza sativa
  Clone ID: TFbOSC401751j.C1.o5.fg
atggggagggggaagatagtgataaggaggatagacaactcgacgagcaggcaggtgacgttctcgaagcgtcggaacgggcttctgaagaaggcgaaggagctatccatcctctgcgatgcggaggtcggccttgtcgtcttctccagcaccggcaggctctatgagttctccagcaccaactgggcatggtgcactgctcacgctgaagaatatataccaactcctataactggagaactccagcaaactcccctcaaaggagctgaatatgcgcacaatatatgcgcacaatccgatagtacagaatcttctgaacttgaggttggcaagagctgcaagccacgcatgggccaaagggggcagattgctgcagatgccaatagcatttggcagagggaggcagcaagcttgaggcagcaactgcacaacttgcaagaaagccacaagcaactgatgggtgaggagctttctggcctaggtgttagagacctacaaggtttagagaataggcttgaaataagtctacgtaatatcagaatgagaaagggaagcctaattcaccaggaaaacatcgaactttctagaagcctaaatgtcatgtcgcaacaaaaattggaactgtataacaaggttcgatgcaaaattctcttagaaacttgtgactacatgttaacacattatcccaagcaactaaaggaacaacttgatttcagcttcaggcctgtgaacagagaggtgccacagatgcaaatgaaagttccagcactccatacagctttcgtatcatacaaaatgctaatatgcctcctagtcttgaattga

SEQ ID NO: 12245 - DNA, 2658 bp, Oryza sativa
  Clone ID: TFbOSC400780j.C1.o8.gm
atggagtgggcgccggtggccgaccacaagatgaggaagaaggtgtggggcacctgtggacaagatggtgtgggactccgtacgcagaaaacaattgaacgctataggacgtatacaaaggaaaatatcggcaacaagacagtacagcaagatatagagcaagtaaaagctgacgctgatggtttggcaaagaaacttgaagctcttgaaacttacaaaagaaaactgctgggtgaaaagttggatgaatgttctattgaagaactgcatagcctggaggtcaagctggagagaagcctcattagcatcaggggaaggaaggttgccaaactgagagagaaggagatgaagctgcgcaaggacaatgaagagttacgcgaaaagcgctcacctgtcgaacggagggagttcgacagggcccaccacccggcgccgcgaggcctgtcgaaccgggggcgttcgacagggccctccaccgaccctgtcgaacaatcggcgtttgacaggccggccggagaggaggccgaggaggcgccggccgggaggaaagggttggcgacgccctccagcagtgaagttaagatgaaagttggacagatgtttcatgacaaaggtcacttacaagatgcggtgaagaggtgggcatttgtccagaagcgtgagttcaaggcaagaaacccgggcacacacatggctattctcgatgaggtgaatgaatatggggagaatgttcttcgtcgggctttctggtcatttgggtgcatgatagaggcctttaaaaattgcattcctttgctctgtgttgatggcactttcatgacaggcaagtacagaggaacaattctaaccgcgatcggagtcgacgcggatagccatgtcgttcctgttgcttttgcatttgttgaaagcgagaacacatcaagctggctatggtttttgcggcacattaaaatgatcaagaaccttatggatgaagctaaagtgaaagatcgttctcgtcgtaagaaagcttgcattctttgcggggagaaccattcccgaactttctgcaatgtgctaaagatgcgaggaccggatcaatattggcgtattgatcctcgttgggttccaaggctgagagcagctgggttgttgacgtttgcacggttggtcgagccttcacgtgcaaggtccgaacgaatccacattgacgcggcgcttatgagtgctcttgtcgatagatggaggcctgagacccacactttccacctcacagttggagagatggtgcccactctgcaggatgtgtcttatttgttggggctgccgatagctgggccagcagttggcccaacaatggtgaatgctggatgggcggatgaccttctggccagttttggtggtgtgctgcctgttgcactggaggatctcacagatgggcacgggcctacgaaaagttggttgaatcagtttcgacaggatgtcttccctgatgaccaggaggagtggatcgtgcagcggcacttagtcgcttacctgttgtggttgtttggatgggtgatgttcacgggaactcacgctgactccgtggacaagcacttcatccactttgcggagcagattgcagagttacctatcgcggagattccacagtacagttgggggtcggcggtacttgcggcgacatatgccggactgtgtgatgcttgcgtgaggaacagcaagcaaagttcactccctggatgcccgttgctacttatgttgtgggcgcacgagcgcttcgacattgggaggcctcagcttgactcgtacgcaaactacggtttgcgagagatgtacaggtctggtgttgatgacatcgacgatcgtcccactatgggatccttgtggacacaccgtgagccgcagtgggttagcgggacgacacgtcgtgtctacactcagtttgtagctgactttgatcagcttacgcctgaccgtgttcggtggactccctacactcagcacgatgtcaatgatcgtgcaccgcacggtctcgcggatctttgcacgcgagatatgcaactctggaggacgacttgtcacctcgtgctggacgtgcacgtcgagccacacaatgtccacagggttctcaaacagttgggcatgtatcaggacttccctccgagagatggtcgtcctttggcagatagtcttcataggtacttcagaaaggggctcgggctttcctacgagctagttattgtgaccacggttcagccgacggtacaagagtgggagcacgcagctgataacttggcacttcagacacctccagacgatgggagttattatggagcttaccttcgttggtaccgcagtgttacacgatggaggtgttttcctccacaaagagatagcaccgtcccccaccaggcagcgattactgacacgtttgcccctcagcctagatcagcttacaagtcaatggcggaatttgttgagcacgttcacgtggagtccgacaccctgctgcaaagactagaggcgagacctccagtcgtcaggtctgacgacgtggcgagtgtccttcgcaacttccgtgcacgtgctgccgcactactacgtcgtgtctcctgtcggagcgcggcagatgtggtgcagacgtcgggccgacggctgtcgcgcccagaaatttag

SEQ ID NO: 12246 - DNA, 318 bp, Oryza sativa
  Clone ID: TFbOSC29397j.C1.o1.fg
aaccaagcactgcttgatcagctgtttgatctgaagagcaaggagcaacagctgcaagatctcaacaaagacttgaggaaaaagttacaggaaaccagtgcagagaatgtgctccatatgtcctggcaagatggtggtgggcacagcggttctagcactgttcttgctgatcagcctcatcaccatcagggtcttctccaccctcacccagatcagggtgaccattccctgcagattgggtattcttcttttcttccagttacagttaatttcttgcctgaaaaaattcccaaaatgcagaggtcatgttctttttaa

SEQ ID NO: 12247 - DNA, 1101 bp, Oryza sativa
  Clone ID: TFbOSC401166j.C1.o21.fg
atggtgcgggggaggacggagctgaagcggattgagaacccgacgagccggcaggtgaccttctccaagcgccggaatggcctcctcaagaaggcgttcgagctctccgtcctctgcgacgccgaggtcgccctcatcgtcttctccccccgcggccgcctctacgagttcgccagcgcccccagtactcgtattgtgtatcttactcctagttctcttgcacccactccagctggagagtggagagagtggagagaagatctatctagaaaattcttgagtttgcaagctatgatatgcaacgaactttcttctaatgtggagctgaaaccgtttggttgggctctagctcaaggagaggtggagttggagctttgccgtatgggcccaatgtatataaaaaatatctataatttggttatagagtatttgtatttcaatgggaaaaagctgagctcgaactattctttagtgtacaggcaacacgccccaattctacaagtgctgcaaccaaagctttcaatactggttttgccggaaatacccgtaccgcttgctggttgttacttcttccgtttcataatcctacagaaaaccatcgaccgctataaagcatacacaaaggatcatgtcaacaataagacaattcaacaagatatccagcaagtcaaagatgatactttaggcttggccaagaaacttgaagctcttgatgagtccagacggaaaatattgggagaaaatttagaaggattctctattgaagaactgcgtggtctagaaatgaaacttgagaagagcctccacaagataagactaaagaagaccgagcttctggagcagcagatagccaagctgaaagagaaggagcggactttgcttaaagacaacgaaaatttacgcggaaagcatcgcaaccttgaggctgcggcgctggtggctaaccacatgacgacgacgacggcgccggcggcgtggccgcgggacgtgcctatgacgagcagcacagccggcgccgccgacgccatggacgtggagactgatctgtacattggattgcccggcactgagcgctcctccaaccggtcggagacaggttga

SEQ ID NO: 12248 - DNA, 1452 bp, Oryza sativa
  Clone ID: TFbOSC101782j.C1.o2.fg
atggcggcggcggctgcaggcatgggcggcggaggaggggtgcagcatcaggagacgacgacgacagtggtgcaggtagcggcggaggcgagtcggaagaaggtggaggtgagatctgcagggcggcgcgggcggcgggagatgcggcggatcgaggacgcgacgagcaggcaggtgacgttctcgaagcgccggagtgggctgctgaagaaggcgttcgagctgtcggtgctctgcgacgccgaggttgctctcatcgtcttctcccctcgcggccgcctctaccagttcgcttctgcctcctccgacttgcagaggacaatcgatcgctacctgaaccacacaaaaaactcatctgcacatgaagaaggagaggaatcatgcgtccagaagtggagatcggaggctacaaccctgggaaagaagatagaagcaattgagggctacaagagtaagctgttgggggaaggcctggggtcgtgttcagtgcaggagctacaagagcttgaagtgcagctggagaagagcttatgtagcatcaggcaaaagaagcaaaagatgctgatggatcagattttggagctcagggagaaggagatgaacctcttgaaggagaatatggtactccgtgatcagtgtaaggctctgtcatcgccatggtcgacgtctgtgggagagctgaagaataagcaggcggatgatgatgttcatcgtcatgaggattattccggcggcggcgtacgcgacgacgatgatcggcgcatgatggaggacgtggagacagatctggccgcggccaatcaggcgggcaaagtcttgaagaaaggtaagaagaaacaagccaaggatgaattagatcgccagaagcaggctgagaagaagagacggcggctggagaaagcgcttgcaaactccgctgccattatatctgagctggaaaagaagaagcagaagaagagggaagaacagcaaaggctggatgaggaaggtgctgcgatagctgaagcagttgctcttcatgtcctcattggtgaggactccgatgaaccctgccatttgatgctaaacaagcacagaagatgcaaccattgggatcactcagctggttttgatttcgccgtggatgcacaaggcgctgatatttatcctcctgatggactgatacagtgcgctgatcatgtttatgctcccaaagggaggtgtattgattgggggattggccagccattgccatcttggggagaggtgaaggacttgcagttgcaggcaccgtgctaccaaggaatgttccaccagtcagttgcatgcccaggtttcatagcagctcaagcggtctcctccttgcaaatcggaggagattcgtcagatattacctctccaagccaaggagcgactgtcgttaataggatgcttggtgccaccaacaggctcaacctttacagagagatataa

SEQ ID NO: 12249 - DNA, 837 bp, Oryza sativa
  Clone ID: TFbOSC407812j.C1.o10.fg
atggggcaagggaagatcgagatgaagaggatcgaggacgcgacgaggcggcaggtgacgttcagcaagcgcagggctgggtttctcaagaaggcgaacgagctcgccgtgctgtgcgatgcgcaggtcggcgtcgtcgtcttctccgacaagggcaagctcttcgacttctgcagcccgccggtcatcttgatggagctgtttcaccgttatgagatcaccaccagaaacactcggcttcaggagacaaaccgtgatgatgagcaaatggtcatggagatcacaaggctaaggaatgagatcgaccagctcgaagccagtttaaggaggcaaactggagaagacctgtcatctgtgtccacagtggatgagctcagccagctgcagctgcagcttgaatcatctctcagcaaagttcatgcgaggaaggatgagctcatgagccagcagctggaggatatgcgtcgcatggtacactactcccttattgtagtcgcagttgtggtttttgctgatgagtgcatcagaccgtgcatgagcagaacaatttcttgtgccgcatggggtgagctgcagctatggagttccttgccggtgggggagcagcagatgagtgagaactggcacagcgagaactggcagagccctggttccggggaggcgtcggcaatggaggcgctgacgatgctgccgccggcggcggcggcgacgacggcggcggaggcgttcaattgcttcttcccggaggaggagaagggggtggcggcgtcgagcacgttgctgcagctgtggccgcagccgcacgacggcgaccagcctgacctgcggctctggtag

SEQ ID NO: 12250 - DNA, 705 bp, Oryza sativa
  Clone ID: TFbOSC400881j.C1.o2.np
atggggagagggaagatagagataaagaggatcgacaacgcgacgagccgacaggtgacattctcgaagcggcggagcgggctgttcaagaaggcgagggagctctccatcctctgcgatgccgaggtcggcctcctcgtcttctccagcaccagccgtctctatgactttgccagctccagcatgaaatccataattgagagatacaatgagacgaaagaagatccccatcaaaccatgaacgcaagttctgaggcaaagctttggcaacaggaggcagcaagcttgaggcagcaactgcataacttgcaagaatatcatcgacagttgttgggacaacagctttctggtctggatgtagaagacttgcaaaatttggaaagtaagctggagatgagcttaaaaaatatccgtctgaggaaggacaatgtcatgatggatcaaattcaagaattaagcaggaagggaagcctcatacatcaggaaaacatggaactacacaagaaagtcagccttgtccatcaagaaaacatcaatttacagaaaaaggttgcggtgcctacagcctagaacaaacttgactatggagtttcaagcagttgggaagcatatgacatgaaagaagacaatataacattacatagcaatatagagcccccaaggcagggaagcaccaaattacagtggctacccagtacctagcac

SEQ ID NO: 12251 - DNA, 606 bp, Oryza sativa
  Clone ID: TFbOSC400524j.C1.o33.fg
atgtctttcaccggcacgcaggacaagtgcacggcgtgcgacaagaccgtccacttcatcgacctcctcaccgccgacggcgtcccgtaccacaagacctgcttcaagtgcagccactgcaaagggattctctcgatgtgcagctactcgtccatggacggcgtcctctactgcaagacccactttgagcagctcttcaaggagacggggagcttctccaagaagttcgcgccaggttgcagatctacagacaaggaactggcaagggccccaagcaagatatgttcagcgttttctggaactcaggataagtgtgcagcctgccagaaaacagtgtacccactagaaaagctaactttggaaggtgagtcataccacaagagctgcttcaagtgctctcatggaggctgcatcctgaccacctcctcctacgcggcgctcaacggggtgttgtactgcaagatacacttcgggcagctgttcatggagaaagggagctacaatcacatgaagaagaagagcgagtcccaggaggtgttgccggaagtggtgcccgaagagcaaccggcgccgccgccgccagacgaaaatagagaggacaactag

SEQ ID NO: 12252 - DNA, 1491 bp, Oryza sativa
  Clone ID: TFbOSC27185j.C1.o2.fg
atgaagtggctctgcgctttcctgaaggggacgaaggacggcgaggccaaccgacggcgccctcgggtgacggcaggagaagagaccacgctctgggaagaaccagttagaccaaagaaggaagaaccacctagacataacaatgaagaaatggaccatgcacttgcccttgctcttgcagacgatgccaaaaatacaaaagagagaaaccatgacaagggagaaaacgatgaagaactcgctagagcaatacaggacagtctgaacatgaatccttaccagccttacaatccttgtgcaccctctcagacccaggccaggtcgagaggatacagggtctgtgggggttgcaagcatgagatagggcatggccattacttgagctgcttgggaatgtactggcaccctcagtgcttccgctgttcttcctgtcgccaccctatccgtgagatggaggtgttctcaggaagtgacagtttactttattctgtttcccagttcaccttgctaggtacagatccataccacaagctgtgctacaaggagcttcatcacccaaagtgtgacgtctgccttcaatttatcccaacgaacaggactggtttgatagagtacagagcccatccattctggggacagaagtattgtcctttgcatgagcatgatagaacacctcgttgctgtagctgtgagaaaatggagccaaggaacacaaagtatatgtcattaggggatggacgcagcttgtgcatggaatgcctggattctgcaatcatggacaccggtgaatgtcaaccgctataccattccatcagagactactacgaagggatgaacatgaaactagaccagcagatacccatgctcttggttgaacgtcaagcccttaatgaagctatggaaggagaaagcaaaggaccgcatcatatgcctgaaacacgaggcctttgtctgtcagaggagcagactgtgaccagtatacttaggaggcccagaattggtgcaaatcggttactagatatgaaaacccaaccgcaaaagctaactaggagatgcgaagtcactgcaattcttgtattgtttggcctccccaggctgctaacgggctccattcttgcccatgaattgatgcatgggtggttgcgcctcaaaggttaccggaacctaaaggcggagattgaggaaggtatatgccaggtcatgtcttacctgtggctggagtcagagatccttccatccacttcaagatatggacaggcttcaacatcttacgcttcatcttcgtcgtcctcctgtcgaccaccaccgtccaagaagggtgggatctctcacaccgagaagaagcttggagaattcttcctgcatcagatcgccaatgacacatcatcagcatacggcgatggtttcagagctgcctatgcagctgtgaacaagtatggccttcgccaatcactgaaccatatacggctaaccggaggctttcctgtgtaa

SEQ ID NO: 12253 - DNA, 2649 bp, Oryza sativa
  Clone ID: TFbOSC15565j.C1.o3.fg
atgggggataggccagacatgggtgctggtgtggccttgcgattctcgcataatgattggacccttgaggaagactcaaaagccctacattttctccagccagatttggtactttttacaggtgattatggcaacgagaatgttcaacttgttaaaagcatttcagatcttcagctccccaaagcagctattcttgggaatcatgactgttggcacacgtatcagttttcagagaagaaggtagatcgtgtccagcttcagctagagagccttggtgagcagcatgttgggtacaaatgtttggattttccaacaataaagctgagtgttgttggtggacgaccattttcctgcgggggtaataggatatttagaccaaagcttctgtcaaaatggttgctgtcattcttagttgcttcaccgggttggtttcttattgcatactacttctgctgtgtagtaacatgcagtgaaatcgagctacagtggtatggtgtcaatgatatggctgaaagtgcaaagaggatatatgatgctgctacaaatgcaccaaaggagcatgctgtcatattactggcacacaatgggccaacaggtctaggctcaagaatggaggatatttgtgggcgggattgggttgctggtggtggtgatcatggtgatccagatctggagcaagccatatctgatctgcaaagagaaaccggagtttcgataccgctggtcgtgttcggtcacatgcacaagagcctcgcctacgggagaggccttcggaagatgattgcctttggagctaaccggactatatatctgaacggcgccgttgtgcctagagtgaatcatgcgcaatcaagcaggcagcctgcaatctccacaagcgaaaagactgggctcgaaggattaacaggactgatggttccgacatcgcgggcgttcaccattgttgatctctttgaaggcgccgttgagaaaatctccgaggtctgggtgacggtgggtgatgccaggacggagcttgagcaggaattagtcttgtacaagcaaccacataaaagtgtcccttccaacattgccatttggagctctatgggttggttgaccaaattttttagaggttcaacccacaaaatctcggaagggcaataccacagcaaacccgcggaggagacgatatggaatggaccctctaattccgcagttgtgacgatggtgtacccactagagtccacatttggtcaactcgacttgctattgttggctactgatctccgtcaacttgtcattgacgatgtagattgttgtgatttggatgtcccgtcagaatttgacaatgaagatatcgctcgtgctatatcactctctctattagaggaggaacaaagaaaggcaaaggcaatagaaaaggacatgcatttggaggaggatgaacaacttgcaagagctatccaggaaagtttgaatgttgaatcgcctcctcgtgctcgtgaaaatggcaacgccaatggtggcaatatgtatcaaccactgccatttatgttttcttctggattcaggacttgtgccggatgtcacagtgagattggtcatgggcgtttccttagttgcatgggagctgtttggcatccagaatgttttcgctgtcatgcttgtaatcaaccaatatatgactatgagttctccatgtcgggaaaccatccataccataaaacatgctacaaggagcgctttcacccaaaatgtgatgtctgcaagcaatttattcctacaaatatgaatggcctgattgaatatagagcacatcctttctggttacaaaaatactgtccatcacatgaggtggacggtactccaagatgctgtagttgtgaaagaatggagccaagggaatcaagatatgtattgctggacgatggtcgcaaactctgcctggagtgccttgattctgcagttatggatacgagcgagtgccaacctctttatcttgaaatacaggaattttatgaaggcctaaatatgaaagtggaacaacaagttcccttgcttcttgtagaaagacaggctttaaatgaagccatggaaggagagaagactggtcaccaccatcttccagaaacaagaggtttatgcttatcagaagagcaaactgtcagcacgatattgaggagaccaagaatggctggaaataaagttatggaaatgataacggagccatataggttgactcgtcgatgtgaagtgactgcaattctcattctttatggtctcccaagattgttgacaggttcaattttagctcatgagatgatgcatgcgtggttgcgacttaaaggatatcgcacacttagtccagacgtagaagagggcatatgccaagttcttgctcacatgtggattgagtcagagatcattgcaggatcaggcagtaatggtgcttcaacgtcttcatcctcatcagcatccacatcatcgaaaaaggggggaagatctcagtttgagcgaaagcttggtgattttttcaagcaccaaattgagtcagatacctcaatggcctatggcgatggttttagagctggcaaccgagctgttcttcagtatggtctaaagcgcacccttgagcatatccggttaacagggactttcccattttga

SEQ ID NO: 12254 - DNA, 1875 bp, Oryza sativa
  Clone ID: TFbOSC900069j.C1.o4.fg
atgccgttaaggagtggtcatggtccttggaagtgtcgtcgttgtcgacccaacaagcgcaagggaaggctttcgcttgccgcctacttggcaacttgccactcgtaccattgctccgccaacatcaagcatgttggcaacgatttgctcataggggtaggggttcataggggcgttcttgggtggggagagatcaagaaccggagctgtccgtggccggtggttcgcctgtcccgagctcgattagttaccctttgtctcggttcttggtgcgtggtcaatcgggactacagagaattggagtttcttgtgggagtttcagggtcacttcgaggtgaaagcggactgagcgggaggcgaggcgatcgacggcgaactgaattcctagtttgttgcaggctcaagctttggttttctgaagtactggaaacgttctcgattggcgaaaagtttgtgagatttttgtcttctggctacagaaaattcgaccctcagataacctcgagtcatgggttgggagcgtatgatgaaagtgataatgaagatatagatcgtgctattgcactgtctttatcagaagaacaaaataagggaaaagctgttgatatcgattataatttggaggaagatgaacaacttgcacgagctctccaggagagccttaatgctgactctcctccacgtcagaatattcctgttgagaatgttccatcagagcccccaagagagctgcctccgattctatttgcctcaagtggatccagaacttgtgctggatgcaaaaacccaattggtcatggacgttttcttagctgtatggattcagtatggcatcctcagtgcttcaggtgttttgcttgtaacaagcccatctctgagtatgagtttgctatgcatgaagatcagccataccacaaatcatgctacaaagattttttccatccaaaatgtgatgtctgcaagaactttattccaacgaacaggaatgggctgatcgaataccgagcacatccattctggatgcaaaagtactgtccttcccatgaagatgatggcactcctaggtgttgcagttgtgaaagaatggagccgatggacatcaaatacatcacattagatgatgggaggaaactctgcttggaatgtctcaattcttcaataatggatacaccagagtgtcaacagctgtatatggacattcaggaattttttgaaggtctgaacatgaaagtggagcaacaagttccaatactcttggttgagagacaggctctaaatgaggctttagaaactgagaaaaatgggcatcatcttcctgaaacaaggggactatgtctttctgaagagcaaattgtcagaacgatcttaagaagaccaataattggaccgggaaacagaattatagatatgatcacagcaccatataagctggaaagacgatgtgaagtgactgcaatcctgatattatatgggttgccgagattacaaactggctcaattctcgcccatgaaatgatgcatgcttatctacgtctgaaaggatttcggtctcttagtcctcaggttgaagaaggcatatgccaagttctttcccacatgtggctcgagtcagagatcatctttggttctagtatcgacatatcagccacctcagtggcatcttcgtcgtcgtcatcttcaactccaaccacatcaaagaagggcgcaaagaccgaattcgagaagaagctcggagcattcatcaaacatcagatcgaaacggattcatctgaggcatacggagatggttttcgagctgccaatcgggctgtcgaaagctatggcctgagaagtacccttaatcatatgaaaatgacagggtctttcccatattga

SEQ ID NO: 12255 - DNA, 1554 bp, Oryza sativa
  Clone ID: TFbOSC100716j.C1.o3.fg
atgacttttgtttctgttaaaaagtacaggagttcaggcttgaaagtggtggccagatcgtttcctctacaaacctatagtgtaagaatccagaagggaactagtggctctaggcttggaaagtgcaggtacaaggattttcgtctgccaatacttgaaaacatgggttggctgagcaaaatttttaaaggttcagtaaatagagtatcaagagggcactacaatggaaacacccatgaaggccactcagcatggcacactaaagcctatgagcatgacagtgaccatgaagacatagatcgtgctattgcattatctttatcagaagaagatcagcggaaggggaaggctgttgatgaggtagatattgatcatcgtttacatgaagatgaacaacttgcacgggctctacaagagagtctgaatgatgaacctcctcgtcagaatgttccagtaaaagatgttcactcagagagtactccagcaactttcatgcccccatatatattcccttcaactggattaagggtttgtgctggatgtaaaactccaatcggtcaaggacggtttcttagttgcatggattctgtttggcacccccagtgcttcaggtgttttgcttgtgataggccaatatcagaatatgagattccaacaaacaaagatggccacattgaatatcgggcccatcctttctggatgcagaagtattgtcctgcccatgaaactgatcgtactcctaggtgctgcagttgtgaacgaatggagccaaaggatagtaagtacataacattagatgatggccggaaactctgtttggaatgcctgaatacttcaataatggacacagacgaatgccaaccactatatattgatattcaagaattctatgagggtttgaacatgaaagtggaacaacaaattcccttgctgttggttgagcgacaagctttaaatgaagccatggaggccgagaaaactggacatcaccttgctgaaaccagaggtctctgcctatctgaagagcaaattgtccgaactatactaagaagaccagtaattggaccaggaaacaagattgtagacatgattacaggaccatacaaactggttagacgctgtgaagtgactgcaattcttatcctatatggccttccaagactgttaactggctccattctggctcatgagatgatgcatgcttacctccgacttaagggataccaaactcttgatccaaaggtcgaagaaggcatctgtcaggttctagctcatatgtggctcgagtcagaaataacatcaggatctagtagcatcattgcatccatcgcagcatcatcatcgtcatcgtcgtcatcttcagcaccctcatccaaaaagggtgtacagacggacttcgagaagaaacttggagagttcttcaagcaccagattgaaacagacccttctgatgtatatggagatggttttcgagatggcattaaggccgttgaacgctatggcttgagaaaaactcttgatcatatgaagcttacaggggttttcccgtgttga

SEQ ID NO: 12256 - DNA, 588 bp, Oryza sativa
  Clone ID: TFbOSC900047j.C1.o2.fg
atggcgacttcctttcaggggacgacgaccaagtgcatggcgtgcgacaagacggtgtacctggtcgacaagctcaccgccgacaacagggtctaccacaaggcctgcttccggtgccaccattgcaagggcaccctcaagctcgcgaactacaactcgtttgaaggagtgctctactgcaggcctcactttgatcagctgttcaagaggactggaagtttagacaagagctttgaaggaactccaaaggttgtcaagccagaaaaaacagttgagaatgagaatgctattaaagtctcgagcgcatttgctggcacgagagagaaatgcgtgggatgcaacaagacagtctatccaattgaaagggttactgtcaataacaccatgtatcacaaaagctgcttcaagtgctgtcatggaggatgcaccattagcccctcaaattacatcgcacacgaagggaagctctattgcaagcaccaccatattcagttgatcaaagagaaggggaacttcagccaacttgagaatgaccatgagaaggcatcacaatctggatctgtagaggatgaagattcagaatattag

SEQ ID NO: 12257 - DNA, 675 bp, Oryza sativa
  Clone ID: TFbOSC400879j.C1.o19.fg
atgacgttctctggtacacaggacaagtgcaatgcttgtgacaagaccgtgcatttcattgatctccttaccgcggacagtattccctaccacaagtcttgcttcagatgcagccactgcaaaggcacactttcgatgtgcagctattcgtccatggatggggttctttactgcaagacccattttgagcagctattcaaggaaacaggcaccttcaagaagaacttcccctcaggtacaaaggcaaacagtgaacaggctaagattcccagcaagctgtcctctgtgttctgtggaacccaggacaagtgtactgcctgcaagaagactgtgtatccattggagaagatgaccatggagggtgagtgttaccacaggacctgcttcaagtgcgcccatggcggctgccttctgacgaacgcctcctacgcctcgcacaacgggatcctctactgccagaaccacttctggcagctgttcaagaagtccggcagctacgacaacctgctgaagcccgcctccgccgccgccgagaacaccgtcgaatccgaggtcgccgtcgcggagcccgcgaaggaagacccggagacggaggaggcagccaaggaagaagaagaagaagcgtcaccggagcaggtcgcggaagctgttgtagaggaccaggagcactcatga

SEQ ID NO: 12258 - DNA, 591 bp, Oryza sativa
  Clone ID: TFbOSC27184j.C1.o1.fg
atgtttagcgggacgcagcagaagtgcaaggtgtgcaccaagacggtgtacccgatggaccagctctccaccgacggcgtcgtcttccaccgctcctgcttcaagtgccaacactgcaagtccaccctctcccttggcaactactcctcgattgaaggagtgccatactgcaagccccatttcgagcaactgttcaaggagaccgggagctacaacaagagcttccaatcacccgcgaaacccgcatcggagaagttgactcctgagctgacaagatcacctagcaaagccgcacgcatgttttcagggacacaggagaagtgtgccacttgcagtaaaacagcgtatcctctagagaaggtgacagttgaaggacaggcctaccacaagtcctgcttcaaatgttctcacggtggctgtgccatttcgccatccaattatgcagctttggaaggtatcctatactgcaagcaccatttctcccaacttttcaaggagaaagggagctacaaccatctgatcaaatgcgcatcagtcaagcgcgccgaagcacagccggcaccaccaccggccgctgcagattcctcctga

SEQ ID NO: 12259 - DNA, 621 bp, Oryza sativa
  Clone ID: TFbOSC401780j.C1.o2.fg
atgtcgttcaccggcacgcaggacaagtgcaaggcgtgcgacaagaccgtccatttcatcgacctcctcaccgccgacggcgtctcctaccacaagacatgcttcaagtgcagccactgcaaggggaccctctcgatgtgtaactactcttcgatggatggtgtcctgtactgcaagacgcactttgagcagctcttcaaagagacggggagcttctcaaagaaattctcgcaaggtggtaaatcttcagagaagagcgaccagggaagagctcctagcaagctatcttcagcattctctggaactcaagataaatgtgcagcctgccaaaaaactgtgtacccattggagaagctaactctggagggtgagtcttaccacaagagttgcttcaagtgctcgcatgggggctgcatcctgacgacgtctttctacgcggcgctcaacgggatcctctactgcaagatccatttctcgcagctgttcaaggagaagggcagctacaaccacttgatccagaccgcacaatcgaagcagaaagagtccgaggaggctgcaccggtggcggccacagaggccagcgagaaagaacaggaagtgcccccacaagacgcgacatag

SEQ ID NO: 12260 - DNA, 5406 bp, Oryza sativa
  Clone ID: TFbOSC423043j.C1.o3.fg
atggcggcggcggcgtggggcggcacgacgcagaagtgcgactcgtgcgggaggacggtctaccccgtcgaggagctcgccgccgacggccgcgtctaccaccgcccgtgcttccgctgcacccactgcaaggccaccctccagtttagtaactattcttctgtcgaaggtgtcctatattgcaaacctcactatgaccagatattgaaatcaaccggcagtttggagaaaagttttgaagggacatcaaaatcagctaaagcagaaaaatcgaatggaaacaaggggcaaccgaacagattctctagcatgtttgttggcacacaagacaagtgcgtagtttgtaacaagactgtgtaccctcttgaaaaggttaatcttaacgggagctcatatcataaatcatgcttccgttgcacccatggaggctgtactcttagcccatccaacaatgtcacacatgaaggcaaactttattgcaagacccatcactctcaattatttatggttaagggaaacttcagcaattttgaggatagtactccaaatgcaaaagtggatatcgagaagcaaccagaacatgaagatgctaccaagaatccaggaggcccaggtcaaggtgatgggctcactgagaaacctttagaaagtgaactcactcctgagaaaccgtcacaagacgatattgtggctgaaaagcaatcacaaagtagcgttgatgtcccaaaacaatcagaaagcagcacaacagttcagaggtcagaagaaggggaaagggttaccaagggtgagtcaaatagtcatgtagtcagcaagaagccattggaaagcagtgtagaaaagccattccagagcagtgcagttaacttacagccatcaggaagtagtgcagccgtaagaaaaccatggcagcgcaatcttcccacagataagccattgctgagtaacacaaccactgaaaagtcaactccaagcagtgctgccattgaggaatcattgccaagtaatggggttgatgcaaaacagccagaaagcagcactgccagcacagtggtaaaaaggccatggcaacggagggtagctacggagaatctaccgcagagcatttcgccatcagataagccatcatcaaccagtgcagatgatgtgaagccatcagaaaacagcaaattgatcagaaaaccatggcaacgtgctgtggctgctgaggcgcagatacagaacagtggaccaactgagaagtcatcattgacaaatgatacaaagccatcagaaagcaccacatcaattaaaaggccatgggagcacaaagtggtcaatgagaagccactgcagaacaatatagacacggagaagccactgcagaacaatacagacactgagaagtcatctagcagtgctatcgatgtgaagctggcagaaaccagtacaacacccactgtgccacaggaacacagtggaatcacggagaaaccttcacagaccagtgcagatgatgtaaagccatcagagagcactgcagcagtggttaaaaagcaatggcaacgtaacatcggattccagaaacagccccagagcagtgtaactgatgcaaagacacctgaaagcaggggaatgggcaaaagattgtggcagcgcaatgttccaactgaaaagcaatcgcaaagcggtgcgtcggttgtgacaccatcacaagttagtgtggctagcaccaacccgctccaaagcagcgtggttgtgaaaaagccatggcaaagaagcgtgtctagagaaaaagagccagagaaggatatatctagcaacaaaccgttacaaaaccgtgtacttgctgaagaagcagagaaaaccaatgtgactgctgataacaaatcacagatcattcaagataaaaagaacaatggtgctaccacagagaattcatcacaaataagtgaaagtgccaaaaaactaccacttactgcaaataaatcgcaagctgatacttccacagaaaaattgtcagaaagtgacatacttgctgtagcatcatctcagatcactgaaccatctaagaagccatcagaaaacactgctgaaaatgagaagccatcacagactgatattgctactgacgagctacccctgacccaaagtgtagaagccatgtcagaaccatctccaagtgatgcagctcatcaggaaatctccgagagggagatactgacagataaattaccagaaagtaccatggctgttgagaagctatctcaaactgctactctaaccgaaaagccatctaaagaagatgctgcagagaagctaccgcaaaccaatgaaccttctgagcagccacacgagagtgaagagactgctgagaagccacttcaaaatgaagctaatgctgaaagcacaacaaaacaaagtgatctcagtcttgagaagccacctcaggttgatgccaatgttgggaatcctaccgagcctgaaagtgatgccacttctggtgtgaactcatcagatgctcaaatcaggccaactgctgagcagttagtaggacctcaaggcattgtatctgccgagaagacatctgaccagatattagaagctaacaccgatccagctgctgaccagtcatcagagtcccaagatgttgcacctgctaaagttgcaacggagcaaccattagaaaatcaaaaggctgcagcttcagagcagccattggaacctcaacacgaagcatatgaagagaatccacaagagcataatagtgatgcaactgccaaggagtcatcagaacctgaaagagatactgcttctgatcagttggctgagcagccatcagaatctcgaactgcaggtgagaaggcaacactgcgtgaaagtgatgtggttaccgaggatccagcagaacctcaaattgatgcagctgctgaaaggtcagctgaggtgttatcagaatctcaaactggagttgagacaccagtgctgcatcaaagtgatagaactaacgaggttccatcagaacctcaaactgatgaagcttctgacaagtcaactgagcagccattggagcctgaaaatgatgcatctgtcgaggatgagaagccaccggaaatcgaaagtgatgatgtgcatgataaaccatcagaaagcaccccagatactgaaaccctgcctcataacactccaaagagtagcataagcattagcgaagctgcagacggcaacgtttctgaggaggcaccacctcagagcagtgcatccatagaaacgccatcagaaagtgccatagctgtcgaggaaccaaaacacgacgacgaggccagcataaagccatccgaagacagcagtgctcttgaggagccgccgcaggacgatagcgccagcgtggagccatcagagaacactataactcttgagaaggcatcagaggaagatgagggaagtgtaaagccatcagaaggcaatgatgctcttgagaaaacattggaggaggatgaggcgagtgccaagctaccagaagacagtacgacctttgagaagccatcggagaaagatgatgctggcaccaagcagacagaggaccctgtaactcttgagaaggaaccagaggaagacaagggaagtgtggagccaacacaggacaatgctggtcttgagaaaccgttggaggaagacgaggcgagtgcgaagccatcagaggacagtgtggttcttgataagccatcagtggaagatgatgacagcgccaagccatcagaggatagcatggaccttgaaaagccagaggctcacaaaccatcagaggaagaagatggcgcgaccaagtcatcaccggaggatgctgccgttgaggaggcgccattgcaagtcagcgaggaagggagaaggcgggagttctccatggctccgaagcggaagccgccggcgagggcggcggcggcgaagttggaccccgacggcatgttccgcggcgtctccgccttcgtcgtcccccacgccgtccagtctcgccgcctcgaggtcgcggctccaccgagcaatccatcccaacccccaccaactctctctcctgtgcttagggtttcctggctttcgtcgtcggtgcaggtgtggaagcagaggctggcgcagatggggggacgcgtccaggagaagctcgccgccaagggcggcggcggcgcggtcacccacgtcctggccgccgacgccaaggcgctgctccgggagctcgacgccgcctggctccaccgctttcgcgggagcgtggtgtcattcgagtggctggaggagtgcctcaaatccggggagaggctaccggagcacaagtttgctatcaactacgaagaggaatttaagccgaagaaggaaggtggtgctgcaggttcaggaagcctcttctggagaatcctcaacgtatgctctccagacttgaacaggaacataactgagatttttggaaagctgatcaatatatatagagccctgggagatgaccgaagatcatttagctattacaaggctattccagtgattgagaaattgccattcaaaatagaaagcgctgatcaagttaaagacctccctgctattgggaaatcattgaaagaccatattaatgagatagtaaatacaggaaagctttccaagctagagcactttgagaatgatgagaaggttcgaactgtcagcctatttggcgaagtttggggtgttggtcctgcaactgctctcaagttatatgataaaggacatcgtacactggatgaccttcaaaaagacgattcacttacaagtgctcagaggattggcctgaagttctttgacgatatcaaacaaagaataccccgacatgaggttagtgagatggagaagcttttgcaagaagttgggactgatatcttgcctggggtgataattgtatgtgggggatcatacagacgtggaaaatcttcttgtggtgacatggatattattatcactcatcctgatggtgaaagtcatgtaggctttttaccaaaatttgttcagcgcttgaagggcatcaattttttgagggaggatcttattttcagcatacacagcattgagggaactgattgtggagttgacacatattttggtctttgcacatatcctgggcgtgagctgcgccatcgcatcgacctcaagaaggtatacccaaggaacagacatgcatttgggctgcttgcttggactggcaatgatgttctgaatcgacgattaagaatactagcagattccaaaggctacattcttgacgacactggtttgtatcttgctacaccgggcagtggtggaaagcgtgggggaagatcagatgctataattaattgtgacaccgagaaggatgtgttcgatacacttggattcccctggttggaacctcacgaacgtaatctctag

SEQ ID NO: 12261 - DNA, 5622 bp, Oryza sativa
  Clone ID: TFbOSC423046j.C1.o3.fg
atggcggcggcggcgtggggcggcacgacgcagaagtgcgactcgtgcgggaggacggtctaccccgtcgaggagctcgccgccgacggccgcgtctaccaccgcccgtgcttccgctgcacccactgcaaggccaccctccagtttagtaactattcttctgtcgaaggtgtcctatattgcaaacctcactatgaccagatattgaaatcaaccggcagtttggagaaaagttttgaagggacatcaaaatcagctaaagcagaaaaatcgaatggaaacaaggggcaaccgaacagattctctagcatgtttgttggcacacaagacaagtgcgtagtttgtaacaagactgtgtaccctcttgaaaaggttaatcttaacgggagctcatatcataaatcatgcttccgttgcacccatggaggctgtactcttagcccatccaacaatgtcacacatgaaggcaaactttattgcaagacccatcactctcaattatttatggttaagggaaacttcagcaattttgaggatagtactccaaatgcaaaagtggatatcgagaagcaaccagaacatgaagatgctaccaagaatccaggaggcccaggtcaaggtgatgggctcactgagaaacctttagaaagtgaactcactcctgagaaaccgtcacaagacgatattgtggctgaaaagcaatcacaaagtagcgttgatgtcccaaaacaatcagaaagcagcacaacagttcagaggtcagaagaaggggaaagggttaccaagggtgagtcaaatagtcatgtagtcagcaagaagccattggaaagcagtgtagaaaagccattccagagcagtgcagttaacttacagccatcaggaagtagtgcagccgtaagaaaaccatggcagcgcaatcttcccacagataagccattgctgagtaacacaaccactgaaaagtcaactccaagcagtgctgccattgaggaatcattgccaagtaatggggttgatgcaaaacagccagaaagcagcactgccagcacagtggtaaaaaggccatggcaacggagggtagctacggagaatctaccgcagagcatttcgccatcagataagccatcatcaaccagtgcagatgatgtgaagccatcagaaaacagcaaattgatcagaaaaccatggcaacgtgctgtggctgctgaggcgcagatacagaacagtggaccaactgagaagtcatcattgacaaatgatacaaagccatcagaaagcaccacatcaattaaaaggccatgggagcacaaagtggtcaatgagaagccactgcagaacaatatagacacggagaagccactgcagaacaatacagacactgagaagtcatctagcagtgctatcgatgtgaagctggcagaaaccagtacaacacccactgtgccacaggaacacagtggaatcacggagaaaccttcacagaccagtgcagatgatgtaaagccatcagagagcactgcagcagtggttaaaaagcaatggcaacgtaacatcggattccagaaacagccccagagcagtgtaactgatgcaaagacacctgaaagcaggggaatgggcaaaagattgtggcagcgcaatgttccaactgaaaagcaatcgcaaagcggtgcgtcggttgtgacaccatcacaagttagtgtggctagcaccaacccgctccaaagcagcgtggttgtgaaaaagccatggcaaagaagcgtgtctagagaaaaagagccagagaaggatatatctagcaacaaaccgttacaaaaccgtgtacttgctgaagaagcagagaaaaccaatgtgactgctgataacaaatcacagatcattcaagataaaaagaacaatggtgctaccacagagaattcatcacaaataagtgaaagtgccaaaaaactaccacttactgcaaataaatcgcaagctgatacttccacagaaaaattgtcagaaagtgacatacttgctgtagcatcatctcagatcactgaaccatctaagaagccatcagaaaacactgctgaaaatgagaagccatcacagactgatattgctactgacgagctacccctgacccaaagtgtagaagccatgtcagaaccatctccaagtgatgcagctcatcaggaaatctccgagagggagatactgacagataaattaccagaaagtaccatggctgttgagaagctatctcaaactgctactctaaccgaaaagccatctaaagaagatgctgcagagaagctaccgcaaaccaatgaaccttctgagcagccacacgagagtgaagagactgctgagaagccacttcaaaatgaagctaatgctgaaagcacaacaaaacaaagtgatctcagtcttgagaagccacctcaggttgatgccaatgttgggaatcctaccgagcctgaaagtgatgccacttctggtgtgaactcatcagatgctcaaatcaggccaactgctgagcagttagtaggacctcaaggcattgtatctgccgagaagacatctgaccagatattagaagctaacaccgatccagctgctgaccagtcatcagagtcccaagatgttgcacctgctaaagttgcaacggagcaaccattagaaaatcaaaaggctgcagcttcagagcagccattggaacctcaacacgaagcatatgaagagaatccacaagagcataatagtgatgcaactgccaaggagtcatcagaacctgaaagagatactgcttctgatcagttggctgagcagccatcagaatctcgaactgcaggtgagaaggcaacactgcgtgaaagtgatgtggttaccgaggatccagcagaacctcaaattgatgcagctgctgaaaggtcagctgaggtgttatcagaatctcaaactggagttgagacaccagtgctgcatcaaagtgatagaactaacgaggttccatcagaacctcaaactgatgaagcttctgacaagtcaactgagcagccattggagcctgaaaatgatgcatctgtcgaggatgagaagccaccggaaatcgaaagtgatgatgtgcatgataaaccatcagaaagcaccccagatactgaaaccctgcctcataacactccaaagagtagcataagcattagcgaagctgcagacggcaacgtttctgaggaggcaccacctcagagcagtgcatccatagaaacgccatcagaaagtgccatagctgtcgaggaaccaaaacacgacgacgaggccagcataaagccatccgaagacagcagtgctcttgaggagccgccgcaggacgatagcgccagcgtggagccatcagagaacactataactcttgagaaggcatcagaggaagatgagggaagtgtaaagccatcagaaggcaatgatgctcttgagaaaacattggaggaggatgaggcgagtgccaagctaccagaagacagtacgacctttgagaagccatcggagaaagatgatgctggcaccaagcagacagaggaccctgtaactcttgagaaggaaccagaggaagacaagggaagtgtggagccaacacaggacaatgctggtcttgagaaaccgttggaggaagacgaggcgagtgcgaagccatcagaggacagtgtggttcttgataagccatcagtggaagatgatgacagcgccaagccatcagaggatagcatggaccttgaaaagccagaggctcacaaaccatcagaggaagaagatggcgcgaccaagtcatcaccggaggatgctgccgttgaggaggcgccattgcaagtcagcgaggaagggagaaggcgggagttctccatggctccgaagcggaagccgccggcgagggcggcggcggcgaagttggaccccgacggcatgttccgcggcgtctccgccttcgtcgtcccccacgccgtccagtctcgccgcctcgaggtcgcggctccaccgagcaatccatcccaacccccaccaactctctctcctgtgcttagggtttcctggctttcgtcgtcggtgcaggtgtggaagcagaggctggcgcagatggggggacgcgtccaggagaagctcgccgccaagggcggcggcggcgcggtcacccacgtcctggccgccgacgccaaggcgctgctccgggagctcgacgccgcctggctccaccgctttcgcgggagcgtggtgtcattcgagtggctggaggagtgcctcaaatccggggagaggctaccggagcacaagtttgctatcaactacgaagaggaatttaagccgaagaaggaaggtggtgctgcaggttcaggtgtgttgcagtctgcaaagaggagcaaaatatcatcagacggtcctgagaatcggaaggaaactgctgggggtaatcgagaatctcgagatgcaattgcacatccaaatgaagattcggatgttgtaaaggggcctagcacgtgtacaagtagccaaagtgcctctggagattctaaggaaaccatagcttctcaaaatgcattcaaagctgaggaagcctcttctggagaatcctcaacgtatgctcctccagacttgaacaggaacataactgagatttttggaaagctgatcaatatatatagagccctgggagatgaccgaagatcatttagctattacaaggctattccagtgattgagaaattgccattcaaaatagaaagcgctgatcaagttaaagacctccctgctattgggaaatcattgaaagaccatattaatgagatagtaaatacaggaaagctttccaagctagagcactttgagaatgatgagaaggttcgaactgtcagcctatttggcgaagtttggggtgttggtcctgcaactgctctcaagttatatgataaaggacatcgtacactggatgaccttcaaaaagacgattcacttacaagtgctcagaggattggcctgaagttctttgacgatatcaaacaaagaataccccgacatgaggttagtgagatggagaagcttttgcaagaagttgggactgatatcttgcctggggtgataattgtatgtgggggatcatacagacgtggaaaatcttcttgtggtgacatggatattattatcactcatcctgatggtgaaagtcatgtaggctttttaccaaaatttgttcagcgcttgaagggcatcaattttttgagggaggatcttattttcagcatacacagcattgagggaactgattgtggagttgacacatattttggtctttgcacatatcctgggcgtgagctgcgccatcgcatcgacctcaagaaggtatacccaaggaacagacatgcatttgggctgcttgcttggactggcaatgatgttctgaatcgacgattaagaatactagcagattccaaaggctacattcttgacgacactggtttgtatcttgctacaccgggcagtggtggaaagcgtgggggaagatcagatgctataattaattgtgacaccgagaaggatgtgttcgatacacttggattcccctggttggaacctcacgaacgtaatctctag

SEQ ID NO: 12262 - DNA, 1272 bp, Oryza sativa
  Clone ID: TFbOSC34548j.C1.o5.fg
atgctgagggcggtgcggcctgcgccgtcggcggcggcggggcccgccgcaccgccgggcgacggcgaggcgcgcgcctgctacggcatcgtggtggcgtgcgtgtcgctgctgctgctgtgcgcgctcgtctccgccgtcggcgtcgccagggccttcgccgccaccggggtgctcgtcctgctgctcggcctcgccggctggctcgcgcccacggacgccttcgccgtcgcgctggcccccgagctctacgcggggaacgccggcggcggcggcggtagcgcccgcgcggcgccggcggtgcggctgcaggtgcgccggtgcgcgtcgtgcgggctcgccgcccaggccatcgacgcgctgcccgcgttcgcgtacgagccccccgccgccgacgtcgaggacggcggcgagggcaagccgcgcggcggcggcgcgctgtgtgcggtgtgcctggaggacgtcgtggccggcgagacggtgcggcggctgccgtcgtgcgggcacctcttccacgtggactgcatcgacatgtggctgcacgcgcaccggacttgcccgctctgccgccgcgacctctcgccggagaaggtcaccgcgaaatcctccgccgccgccgcgacggtctcctccaccgacgtgctgccgccgcatttcgtaggaatttggcacgaaataaatcagttcaaatcatcggagaaatcgctggtcgggatgcccgaggcggcggcggcggaggaggaaggcggtgatggctgctcgacgaggctagggtgctacggcttcatggcggtgaacgtcctgatggggctgtactgctccatcgcctacgccgtgagcgccaccgtggcgggcgccgtcgccgtcgcggtcgcgctcctcctgctggcgctcgccggcaggctggcgcagacgacgggaggaggctccgccgcggcggcggcgtcggggcggcggcggcggctgctgagctgcccgtgcgcgtgcgggctgatggcgcccggcgcgggggggatcggcgtgctgccggcgttcgcgtacgagcccggcggcggcggcggcggcgtgctgtgcgcggtgtgcctggaggacttgcgcggcggcgagatggtgcggcggctgccggcgtgcgggcacctgttccacgaggactgcgtcgacgtgtggctgcgcgtccgccggacttgcccgctctgccgccgcgtgctcccgccgcgcaagtccgtggcggccgcggcggcggcgtcggccgctgtgctgccgcctgtctga

SEQ ID NO: 12263 - DNA, 621 bp, Oryza sativa
  Clone ID: TFbOSC15905j.C1.o2.fg
atgtcgttcaccggcacgcaggacaagtgcaaggcgtgcgacaagaccgtccatttcatcgacctcctcaccgccgacggcgtctcctaccacaagacatgcttcaagtgcagccactgcaaggggaccctctcgatgtgtaactactcttcgatggatggtgtcctgtactgcaagacgcactttgagcagctcttcaaagagacggggagcttctcaaagaaattctcgcaaggtggtaaatcttcagagaagagcgaccagggaagagctcctagcaagctatcttcagcattctctggaactcaagataaatgtgcagcctgccaaaaaactgtgtacccattggagaagctaactctggagggtgagtcttaccacaagagttgcttcaagtgctcgcatgggggctgcatcctgacgacgtcttcctacgcggcgctcaacgggatcctctactgcaagatccatttctcgcagctgttcaaggagaagggcagctacaaccacttgatccagaccgcacaatcgaagcagaaagagtccgaggaggctgcaccggtggcggccacagaggccagcgagaaagaacaggaagtgcccccacaagacgcgacatag

SEQ ID NO: 12264 - DNA, 331 bp, Oryza sativa
  Clone ID: TFbOSC17444j.C1.o1.hg
atgcatctggatgcttcttacttctcacttgctccagatctccttgatttggtgcagatgatcctgcgggcgctcaaggagcttccagatccgatcatctccagccgccgtgccatcgccaagtacatctccgacaacttctccggcctcccttctcacacgacgcgctcctcaccgttcacctccgccgcctcaggtcacagggccttctcctcatgtctggacactcgtaccttctctccacctccgccaccgccgctcgaggacggggacgaggacgaccgcccaagaaagcttcctcctccgcgccgcctcaaaagcgcggacccgg

SEQ ID NO: 12265 - DNA, 882 bp, Oryza sativa
  Clone ID: TFbOSC419704j.C1.o6.fg
atggcgaccgacgtggcagcgactgagcccgaggtggcggcggaggaggctgcggccgccgcgcctgagaccacggccaccgccggggattccaagccggcgaaggaggccaaggccaagaaggccgccgcgccgaggaaggcacgctccaccgccacccacccgccgtacgccgagatgatctcggaggcgatcgcgacgctgaaggagaggaccgggtcgagccagtacgcgatcggcaagttcctcgaggacaagcacaaggaccacctgccatccaacttccgcaagcagctgctcgtccagatcaagaagctcgtcgccgccggcaagctgaccaaggtcaagaactcctacaagttgccgccgacgcgcgcgccggccgcggccaagcccaaggcgaagcccgccgccgccgcaaagccgaagccgaagccgaaggccgcagctaagcccaaggcggctgccaagccgaaggccaaggctccagccaagtccaaggccgccgcgaagcctaaggcggctgccaagccagccgcgaagccgaaggcggcggctaagcccaagtctccggctaagccagccgccaagcccaaggctgcccccaaggctaaagccaagccggccgcgaagccgaaagccaaggcggctcccaagccgaaggcggcagccgtgacgaagacgaaggcgacctcggctcccgcccggaggccggcgaaggcggcgaagacgtcagccaaggacacgcccagcaagaaggcggcgccggcggccaagaagcccgccgccgcggcgaagaaggcgcccgccaagaaggccgcgccggcgaagaaggcggccgctccggcgaggaaggtgcccgcccggaaggcgaagaagtag

SEQ ID NO: 12266 - DNA, 1416 bp, Oryza sativa
  Clone ID: TFbOSC400493j.C1.o13.fg
atggccgccgccgacgaagcctccaagccgccgcctctcccgccctacccggagatgatactggcggcgatcgaggggctgaacgagaagagcgggtcgaacaagtcggcgatctccaagttcatcgaggggaagtacggggacctgccgccggcgcacgcgtcgctgctcacggcgcacctggccaggatgaaggagtccggtgagctcatcttcctcaagaacaactacttccgcgccgacgcgcccgacgcgccgcccaagcgcggccggggccgcccccccaagccgcgggaccccaacgcgccgccgccgccgcccaagccctcctcgccgcgcccccgcggccgcccgcccaagtccaaggaccccatctccgacgccatccccaagtcccgcggccgcccgcccaagaaggccaagacggctcccgcccctcctcccgccgccggcgacggctccgctcccgtcaagcgcggccgcggccggccacccaagttagtctggcctctaatggtggcgaccggtgttctcgttagcggcggtggtgggagttggtacctctgcgcctcgtggacggcgaatcgaagacatggcggtcaaatcatccccgagcaagagccccaaagtaagatagagtttccggatctggatggccttggtggtggtggaggaggagcttctggcagtggttgccgacaccctgctcgtgtgcgggtttgtgttggtggtggagacggagtctgcgtcgcgcctggcacttcggtggtcgtcgttgaggtggcgacggtctctgcgctgtcctcggcgttacgacgtctgtcgtcccccttcgccgtgcccgagctagcggtggcgttgtttccctctgtcgcacctatgctagctgtggcgccggcaggcgtcggcatgtgtgctatgatcggcgcttcttcctctgttggcggcagcggttggctcgtcgtcatctacatcctccttcaagccgaagcctttggaagccttgtgattgggtgtttgttctgctcaaaatcttatggttccatgttgcaggtcgccctctccttagccatctcaggcctcaaagcaagacagaagtctattggcagcctctcaaaagccccattgttgttggttggctggtctacgttttggccctctcttttgattcctagtagcagaagccgcacatggtttgtcattcgggttgagctcggaccccctgtgcaatttcgattgtcagggttgttagaattcctcagattcaatgacgaatcctatggggatgttttgctgagtccggtgacgctcacaccaaaaatctacggctcaacaaccaacctcgatcttgtgccgttcccgtggaggcaaccgaaggggattaacggtttgtcaagtggtgtgcacttcaactga

SEQ ID NO: 12267 - DNA, 918 bp, Oryza sativa
  Clone ID: TFbOSC400044j.C1.o34.np
atgggcgccccgaagcagaagtggacctcggaggaggaggaggcgctgcggcgcggcgtgctcaagcatggccccggcaagtggcgcaccatccagaaggatccggagttcagccccgtcctctcctcccgctcgaacatcgacctcaaggacaaatggaggaatttgagttttagtgcaagtggactgggttcaagggataaattaaaggttccaaggataaaagggccttcatcttccacatctccaagctctcagactccgcttctcgtcctacccccaaataaagttgctgaggcttcaccatccgcagatcctgagaaaagctctcaggatgtgaagattccaaagtacagttccatggtaatagaagctctttgtgaaattggggatccaaatggttcggatgttgatgcaatttgccactacatagagcaaaggcacgaggtgcaagcgaattttagaagattgcttactgcaaaattaaggaggcttatagcagcgaaaaagattgaaaagattgacaggtcctataggatcacagaatcttatgcagccaaagtttcgcaagcaaataagtctccaagtccaaagaaggatccagccaagccactgaaggcatcgcagaatttaggttcatttgctggtacgagtcctgccctagaagcagctgcagctgcagctatgaaagtggctgatgcggaggccaaatcacaccttgcgaatgagcacatgacggaggctgaaaggatcttcaagcttgctgaggagaccgagtctctcgttacactcgcaacagagatctatgaacgatgttcaagaggagagatattaacaataatgcaagtggcgcaaagcaattttgaattccaatctgttagcggcaacggcagcggcactggttctactgtacttgca

SEQ ID NO: 12268 - DNA, 894 bp, Oryza sativa
  Clone ID: TFbOSC400039j.C1.o45.fg
atgggggcgccgaagcagaggtggacggcggaggaggaggccgcgctcaaggccggcgtggcgaagcacgggacggggaagtggaggaccatcctccgcgacccggaattcaccgcgctcctgcggctgagatccaatgttgacctcaaggataagtggcgcaacttgagtgtcactgctggaggatatgggtcaagagagagggcaagggtagctttgaagggaggcaagcgagggcctaaggcccttgctgaaccgatggatgccgacgaaaagaaccctgacattgatgataatgcaatcattgatgcacaaccgttggcagtggttgttgagcccatgcaacttgagagtactccagagaaagagaaatcagttgctaggcttgatgaccttattttagaagctataaagaagcttaaggaaccgtctgggtctaatagaacaacgatttcttcatacattgaggagcaatactggccacctgaagattttcaacgattactttctacaaaattgaaagcattggttgctactggaaaattaatcaaggtgaatcaaaagtacaggattgcaccaagttcgaactcttcaggtggaaagagcatcaaggtgtattccactggagaaatgaacatagaaaataataatgttagacagctgagtaagccgcaagtggatgctgaacttgataagatgaaaagcatgagtaaggaagaggcagcatcatttgctgctagggcagttgccgaggcagaagcagccattgctgaagctgaagaagcagcaagggctgcagaggccgcagaagccgaggctgacgctgcaaaggcttttcttgatgctgttgtgaccacgatgcaaaacagaaatcatgcttctgcggtatactga

SEQ ID NO: 12269 - DNA, 2844 bp, Oryza sativa
  Clone ID: TFbOSC417639j.C1.o19.gm
atgtggggccgggtgtgtggtggggcccggttgtcagtggcggtgtgggtgttgactgttcgtctgggcgtggaagcttctggaaggggaagaaggaagaaatggaccgcggaggaggagtccgccctcaaggccgggatcgcaaagcacggggctgggaaatggcgcaccatactcaaagacccagacttcagcaacgtcctgcgctaccgctccaatgttgacctcaaggacaaatggcggaacatgaacgtaaccgtgaacgcgtccggtgcccgcgacagggtgaaagcgcccgtcgttaagaagccaagatccgctcctaagcatgaaggccactctacctctacagctattgccgcggtaacttcagatggtgatgatgatgttgcggagcctgtgcctcttgcaacgtctacttcatccaagagatccctctcgaggctagacaatatcatagtagaggcagtaaggagcttgaatgagcctacagggtcatacaagacagccatagctaattacatagaggagcaatactggcctcctgctgattttgatcatgtcctgtcttcaaaactgaatgatctgacagcatctgggaaattgataaaggtgaatcgaaagtacaggatagcccctagttcatctttgtcagaagggcgaagctccaaagtagtgctgctcgaagatataaaaaaagaaccaacaaagttagatagggaagatgttgcagtcctcactaaatctcaaatcgatgctgaattagctcggatgagaaccatgactgcagaagaggctgctgctgctgctgctcgtgcagttgcagaggcagaagctatcatggctgaagccgaagctgcagtaagagaagcagaggctgcagaagctgatgctgtagctgcacaagctttcgcggaggcagcaatggcaacatttaaaaacagaagttcagcaaaattggatgggttccatgaagctaagctccaagccggatgcattcacaaggcgagggcaagcatgttccccctgctttcaaagagtgccatcctgggaagattgattgaggagaattcagacagcgatgaatgtgtcatcatattgtctgacatccctggtggcgcaaaatcattcgagttagtggcaaggttctgttatgggctgaagatagagctgtcttcagaaaatgtcgtctacctacgctgcgctgctgaacatcttgagatgacagaagaaacatctggggataatctgattaatcagacagagtcattctttaaccaagtagtcctccgaagctggaaagattccctggaagcgcttcggacatgtgatggccttctccctcatgctgaagaccttcacattgtgaagagatgcatcgaatcattggctggcaaagctagcatcgatccggacctcttcggctggccagtctcggaacatagtaccatgcaaagccccgggggaagtgtcttgtggaatggcataagcacgggtgcgaaggttaggaactgcagttcggactggtggtatgatgatgcttcctccctgagcttccctacatacaagaggcttatttcttccatggagtcaagaggcatcaaacaggagatcattgcgggttcgctcacatactacgccaagaagtttctcccagggttgaataggcgtcaaagcaccggaccaatgcccctgccggctgctaccctgtctgatgaagaacagaggcgcctgcttgaagagattgataggatgttgccacttcagagaggtttaatatccacaaatgttttgctctggctgctccggaccgccatgatcctgaaagtcgaccgcgcttgcatttcaaacttggagaaaagggtcgggatgcagctggacgaagccacattggaggatctactgctgccaaacttctcatacaccatggacacgctctacaacgtcgagtgcgttcacaggattctcgaccacttcttggcaatggatcagaccatgggtggcggtggcgcctccccatgcttggatgatgtgatggcatctccttcgttggcaccgatcaccgctgtcgcgaagctgattgatggctaccttgcagagattgcacctgatatcaacctaaagccactgaaattccagtctctggcagctgttttacctgaatatgctcggccactggatgacggtctttaccgcgccattgatgtatacctgaagtcgcatccgacgctgcctgaagctgaacgggagcagctatgccggctgatcgactgccagaagctgtcgctggaggcgtgcacccacgccgcgcagaacgagcggctgccgctgcgggtggtggtgcaggtgctcttcttcgagcagctgcagctgaggacgtcggtggccggctgcctgctcgtctccgacaacctggaggcctcgtcgaggacgctccgcggcggcggcgcggtggcggcgtccggcgaggccgggtgctgggccacggccgccgtgagggagaaccaggcgctccgggtcggcatggacagcatgcggctgcggctgatggagctcgagcgggagtgctccgacatgcgccaggacatccgcaagctcggccgcggccgccgccgcctccgtggcggtggtggcatcgtcgccggtggcaaggacggcggcgggtgggcagcgcgggtgcagcggatgctgacgccgaggatgatgaagctgcagatgtgcagcgcgcagcatgacgccgccgagcagcagcggatgaacaatgagcacaagaaggtggagaaggtggccaagaacaagaagcagctgtccatggacgacggtgacgacgaggaggaggcctga

SEQ ID NO: 12270 - DNA, 567 bp, Oryza sativa
  Clone ID: TFbOSC400798j.C1.o19.fg
atggccaagcccgcctcccgcgctgccaagcccgcgtcggcgccgaagaagcagaaggcaaagccctccgccgccgccggtggctcctcccacccgccttatttcgagatgatcaaggaggcgatcacggtgcttaaggagaggaccggctcgagcgcgcacgccatcgccaagtacatggaggagaagcacggggcgtcgctgccggccaactacaagaagatgctctccatccagctgcgcgggttcgcttccaagggcaagctcgtcaaggttaaggcctcctacaagctctccgacgccgccaaggactcgcccaaggccaagcctgccgcccccgcccccaaggcagcagcgccgaagccagcgaaggacgccgccaaacccaagaaggacgccgccgctgccaaacccaagaaggcccccgccgctggcaccaagcgcaaggcgccggagaagaaggtggtcgccaagcccaagaagtctccggcggcgaaggcgaaggccaagcccaagaccgtccggtcgccggccgcgaagaagacccgcaaggcacctgcagcttga

SEQ ID NO: 12271 - DNA, 549 bp, Oryza sativa
  Clone ID: TFbOSC900103j.C1.o6.fg
atggcggcggccgaggcggaccccaagcccgccgccaccccgtcttacccggagatgatactggcggcgatcgaggcgctggacgacaggaacgggtcgaacaagacggcgatctcgcagcacatcgaggggaagtacgaggggctcctcccccccgcgcacccgtcgctcctcacagcgcacctcgcccgcatgaagaagaacggcgagctcgccttctccaagaacaactacttccgcggcgacgacccgtccctcccgccccaccgcggccgcgggcaggcgccccaagcccaaggatgttccccggccgcccccgcccgcatgggcgcccgccttccgcggcgcggcgggtctcttgccccgccccccgcgggccgttttgctacccccctaggacccctcccccccacggcggccgggaagggctcttccgcgtctgcccccgcgcacatgaccgctcccccaccaagagccaggggtgatcagtcaaccccccctttccgcgttcctcaacgagcattcatgttcccccccgccgcctcttga

SEQ ID NO: 12272 - DNA, 1827 bp, Oryza sativa
  Clone ID: TFbOSC26017j.C1.o2.fg
atgcagcacgggagaaggggagggtggcggaagggcgaggcggcggcggcgggtgaacgcggtggcgggctcgtcctccccgatcacactctccggcatggggaaaggatggcgcaggcggcggaccgcgcgggagaccagcggcaggcggtcgtggatgcggcgctcacgcggggctgggctggccgcgcggtcgtggttggcggcggggcaacggaggacagggagaggaggagatggttgagccaggggagcgcgggagggggagtggcggcctcctccggggtcgccgtcaacatcaccaccgggcccatgacggagacggaggacgacatggccgtcgccgaggaggaggaggtggtggcggcgtcggcggagacggaggagcacgtgcagcgcatcctcctcgccattgacgccttcactcgccaggatccacaaggagaggagagggtggagaggtgggaggacgagatccgggagctgcgcgcccgtgacgtcgccaatgagcaggcacgctccctccgccgccaccgctctcgcctgccgacgtcgcatcgttccagcccgccgatgccgcaccgctctcgcccgccgacgccgcctctccgcaaccgtgctcgcccgccaccgtcgccgcttcgcctgctctggccgccattctggtgcggcgacggcgcccggttgaagaggtgccccttgggccgccctgcgccgtcgcctccggccggcttgcccagtcgccagaagataagagaagaaccacaaccacaaccccccttctcctctcagatccgcgtcgcggcggccccaaatcccacacgcgcacagcgcagcaccaacgccggaaggagacagcgcccctcgcccccgccaccccaaccctacgagagggagggagccagccagccagccagccaggcatggccacctccacttccactggccaccgcgccgccgacctcgtcctcccctcctaccccgaggcacgctctctttctaaaccctagctgttcctggccagatgcccagatctgtggcggaattgaccgggtttcttgggttgtcttctccttctctttgctgcagatgatcgtggaggcgatcgcgtcgctggcggaggagaacgggtctagccaggccgccatcgcgcgccgcatcgaggcggcccgcggcggcggcggcctcctcccgccgtcgcaccccgcgctcgtcgcggcgcacctctcccggatgtcagccgccggggagctcgtcgccgtcgcgggtgggaagtacgcgctccgcccgactcctccgccgccgccgccggcggatccggcggcggcggcggcggtggcggaggaggaggaggaggaggaggagttcctcgccgatgatgactcggccgacgacttaccgccgcctcctccgcccaagcgaggccgcggccgtcccccgaaggtgcgccccccgggctacccggccgtacccgccgccgccgcacccgtccccgtccccgtcggtgcgccggtcgacggctccgtcgccgccgccgcccccgccgtgccgcgccggcgtggccgcccgcccaagccgcgggacccgcacgcgccgcccaagatcccacgcccgcgagggcgcccgcgcaagaaccctctcccggaagggatggtgccgccgccgccgacgcgccccggcgcgacggccaagccgcgcccgcagttcgccgagtggttgatttcaagcaagaactgcaaaggactcactgcttccctgttgtttgctgttgttcctgctgcaaaattgatgatggtcaatgctcattgtcttcagcttgatccataa

SEQ ID NO: 12273 - DNA, 1536 bp, Oryza sativa
  Clone ID: TFbOSC400747j.C1.o13.gm
atggcagcatcgggcatgaagctcgccgtggcggtggcgtgcgcgctggcgctcgcgtcggcgtgccacggcctgcagctgggctactacaagcagtcgtgcccccgcgtggaggccatcgtgagggacgaggtgaagaagttcgtctacaaggacgccggcatcggcgccggactcatccgcctcgtcttccacgactgcttcgtcgagggatgtgatggctcggtgctcctggacccaactccggcgaacccgaagccggagaagctcagcccgcccaacatgcccagcctccgcggcttcgaggtgatcgacgccgccaaggacgccgtcgagaaggtctgccccggcgtggtctcgtgcgccgacatcgtcgccttcgccgcccgcgacgccgcctacttcctcagcagattcagggtcaagatcaacgtcccaggtggacgcctcgatggccgccgctccctcgactccgacgccctcaacaacctgccgccgcccaacttcaacgtgaaccagctcatcggcgcgttcgccgccaagggcctcgacgccgaggacatggtggtgctctccggcgcccacaccgtcggccgctcccactgctcctccttcgtctcggaccgcgtcgccgcgccctccgacatcaacggcggcttcgccaacttcctcaagcagaggtgcccggccaacccgacctccagcaacgacccgacggtgaaccaggacgccgtcacgcccaacgcgttcgacaaccagtactacaagaacgtggtggcgcacaaggtgctcttcgcgtcggacgcggcgctgctgacgtcgccggcgacggcgaagatggtgtcggacaacgccaacatcccggggtggtgggaggacaagttcgccaaggcgttcgtcaagatggcatccgtcggtgtcaagaccggctaccccggcgagatcaggaggcactgcaggcaaccagcaacggagaagaagatcgacgtcatcatcgtcgcgatggcgttgcaaggcatggagcaagaagcagcagggcaacctcccgcctcggccgctttcccgtcttccgcggaggcggcggcggcggcggcgagcccgacgagcggcgggaagcgcatcgtcctccgcatcaggatcccgccggcgtggatgcccgaggaggacgcgtgcctggcgcgcctcgccgcggagaacggcttccgccactggcgccgcgtcgccgagggcatggcggcggcgcgctcggggcgccgcccccgccgctcgcccgggcagtgccgcgacaggtggcgcgaccacctcgcccgcgacgtgtaccaccgccccttcaccgccgacgacgacgccgagctcgcccgcctcctcctcaagcgcgacggcgacggcgagcggtcgtggaaggacatcagcagggcggcctactgccgcacgtcgcgcggcatgaggcggcggtggggggagctccgcgacagcgacgcgttcctcaggaagctgtggtgtcctcctccgccgccgatgcagccgtcctgctga

SEQ ID NO: 12274 - DNA, 1038 bp, Oryza sativa
  Clone ID: TFbOSC403480j.C1.o2.fg
atggtctccgccaaccagccgccgcccgacgcggccgcggcagcggcgggctcggctggggaggacgccagcaagaaggtgcggaagccgtacaccatcaccaagtcgcgcgagagctggacggagcaggagcacgacaagttccttgaggccctccagcttaatcataattactatgaaatgcttccaacgtattggtccccctatttgcatatgattgccaataatgtgttttggcgcaccaaaaacactgcatttgttgctgttgaattcaagtatctgtacaaaagctttgatcgtgattggaaaaagatagaagcttttgttggatcgaagactgttattcagattaggagccatgcacagaagtattttttgaaggttcaaaagaatggaacaagtgagcatgtcccacctccacgaccaaagcgtaaagctgctcatccataccctcaaaaggcctccaaaaatgagccaggatataccataaaggcagattcatcttccatgcttagagaactcaggcatgaatgccactgtttcgtcatggacacacaattctatcccaccaattgtagcctcatccatggtgaaaggtttgttgtccgtgttatgccagattttgcacaagtatacagcttcttgggcagcgttttcgatccaagcacaagtggccatttacagaaactaaaggagatgaatccaattgatgttgagacggcattgttgttaatgagaaatctctccatcaatttgactagtcctgattttgaagatcagaagaagttgctatcttcatacagtaccccgtctgatgggcttgagctaggaagcaccagaagctcagttctagctgatagaccattaagtgctccattcataatgtgtaagggtgcaaccgtgtacagtaggcttgcacagctggtgatggcattctcgtttctgtcatctggcagagaaggcactactgccccaagtgacccatggcatagccagaaacagaatgctccatcagtccatctgatgagatatgtgtga

SEQ ID NO: 12275 - DNA, 342 bp, Oryza sativa
  Clone ID: TFbOSC401124j.C1.o47.gm
atggagaagattatgggggaaaatgagatcaggacccgttcgcccgtttcaagacgagacatggcatccagctccaaggcctcgtcctcgtcgtcggcgtcggcggcgtcgtcggagtggacgaagcagcagaacaagcagttcgagcgcgccctggcggtgtacgacaccgacgccccggaccggtggcacaacgtcgcccgctacatgggcggcgccaagtccgccgaggaggtgcgccgccactacgagcggctccaggcggatgtcgagcagattgaggccggcggcgtgccgttctccttgggctacggcgccacgccacaggccggccgccgctag

SEQ ID NO: 12276 - DNA, 1266 bp, Oryza sativa
  Clone ID: TFbOSC404834j.C1.o14.fg
atgactcccgccgatgccttcctcatcctcgacttcctcgccggcaaccgcctcatcccccactccgtcttcaccaccctcctcgcctccctcccatccgtctcgccccacacctctcctcgcctccgcgcaggcctcgctctccgcgctctcgactccgccctctcgatctcggagtcgtcggagatggacgcccccaccctcctgcgcaaggcgcgggctgtcctcgcggatccagaccttgcccccttctttccgcagcacctcgctgcacccgcctctgccgacgacgccccggccgccgccgtggctcacctcaaccgccttctcgacgttgagtgggcgagcctccctccttcctcgctcgagatcgcggccgaacggatcgttggctctcaagccctccattcgtgggcaaatgccgaccacgcccaacgttcaaagcttcgtctactcgctgaaaaatactccacttctttgtatcagttttactcacccttagccgtttctgcagtaggagagtccacagcgcttgagattttagacacgcttcaacggccggatgcatccacaaatcatccaggaacgctgcctcaagttgataatgcaccggaaacaaacggtgcttctcattgtgctcaacaaaacgatggggccaagagcggtcttgttaaacaaaatgctgaagccgatcgtcctcaacaagatagcactcgacatcaacaagactcggtgcaaggagcatccaattcccaacttaaagaaagttcagtaacaatggaatctattagaggcacgggtcctgatatcacaggctttatggaagaagctacacctcgtgttgctggacagtttgcccctgacaacatcaagaaccatcaagtcacaggttctaagcgcagtttaatggagaggaatccgactgccagcacttatgagggggagcatttgtgtaatattatggtggtatctcatcgtatttttgaagtgcagtgggatggcagcgattccgaagggaaaaggcctgcagcaaagcgccggttacccatttttgaaaggacagcaaaaccttctcctacagctgcacataagacgagaaaaaagtggagcgagaaacaagaaaaaaccttgctggaaggggtggagaagtatggaaaaggcaactggaaagatatcaaaatggcataccctgatgtatttgaagatagatcgacagtagatttgaaggataaattcagaaatttggaaaggcatctatgcgcttga

SEQ ID NO: 12277 - DNA, 897 bp, Oryza sativa
  Clone ID: TFbOSC400903j.C1.o89.fg
atggagtggacggcggcagagctggcggaggcaaggtcggtcatcgctagggtcagcgacgcctacaactccggcgtaggcagcagcagcagcgcctgcgacaccaagcacgaccgcattatgagggagctccaggcgaggttcccgtcgaggaccatggtccaggtaatcgatctgtacgttaatctcacggtggagacggcggcgcagccgcaggacgccggcagcgccggcgacgccgccgccgtcgtccaccctacttttgccggcggcatgcccgttgtgaacaacaacgacggcatggtgcatggtggtgctgctatggaggtgggggcggtggcggtgaacggcggggacggtgaggtggtgaacccggacaatgctgatgacgatgtgctttggactgattatgagcacaggctgtttctgactgggatgcgtgtgtacgggcgtggcgactggagaaacatctcgaggtacttcgtcagaagcaagacgccggagcagatctccatgtacgccgacaactacttccacatgatggagatcgccgcggccatggaagccgacggcggcgacgacgacgacggccaccatgaaatcaataacaacaacaacaacttgggcggcggccagctgcacgccgtcgtcggcgccgtcgggcacggccccggtgccgggcacattgctccggcgaccccctccaacaacaacaccgccgccgccgccgtgaacaacaacgtcgacacaccgttctgggttccgctgctgtacaaccccgagatagagcagcggatgatggagatgcaggcgcagtcgcagaaggcctgggatgatcagcagatgaagatggctgaagctgcaactccaaaggaggagggagcagctgataagtga

SEQ ID NO: 12278 - DNA, 657 bp, Oryza sativa
  Clone ID: TFbOSC404185j.C1.o1.fg
atgcaggcaaaaccacttgggggttgtttggatcaaacgggaacgttcaggggtaatcgcttaagcacctcccaatttggagatatggatgatgagtataacgaacaagacaactgggacaacgacaggactgagaatcatgtggtcgaaaatacaaccaaacttaattaccattcatacatgaacagacaaacacgagccaaatggtccaaatctgaaacggacaagttttacgagggtcttcaacaatttggtagcgattttgcaatgatacagcatctcttccctgataagagccgtaatcaggtgcgacaaaaatttaaagctgaggagaaaaaacatccaatgcaagttcatgatgccataatgcatcgctcgagagataatttgtattttaaagaagtaatcaaaaagctcaacatcgaagatgtccagccagatatcaacaatacacatgaacaggagggtacatcaaatgaagaggaccctggaaataagaatataccgggtggattaattaatgaggaggaagaaaatggtttagattggtcagataaagagctggacatgcacagatctgaggtcgaagagaaggagcacgtttctacaaatgatgatgatgatgatgatcttggtgatgtttttgattggtactaa

SEQ ID NO: 12279 - DNA, 183 bp, Oryza sativa
  Clone ID: TFbOSC10045j.C1.o14.gm
atgcaacagatcgcggcgaggctgccggggaggtcagataacgagatcaagaacttctggaacgtgcggctgcgcaagggcaagaagctccggcagacgtcgtcgtcgttgtcgatggcggcggcggcgaccagacaccgcctcagcgaggctgaccggagtcgactgtcacggcgtggctga

SEQ ID NO: 12280 - DNA, 387 bp, Oryza sativa
  Clone ID: TFbOSC5376j.C1.o1.fg
atgctggcctcctacatccaggagcacggcgccggcaactggcgtgccgtgccgaccaacaccggggtgatgcgttgcagcaagagctgcccgctccggtggacgaactacctccagccggggatcaagcgggggaacttcactgagcaggaggagaagctcatcgtccacctccaggctctcctcggcaaccggagggatcatatggaggtgatttcaccaatgaaagatggaacatttattgattgggatattgttgacaatatatggaatcatgctttcagcttttatgctgaggagcatcctatgttgatagttgaaccatctacaaacacagggcagcaaagagagaagtatctattgactttaaagatcatgaaggcataa

SEQ ID NO: 12281 - DNA, 327 bp, Oryza sativa
  Clone ID: TFbOSC102271j.C1.o7.gm
atggccgtgccaagcctacaaatcgattcatcccgagtccccgaccatgtgactacgggagatgggctgcaggtgccggtgacgaatgagctcgtggcggcgcagggaacaggagcaggacaagatcttcctggacgccccgcgaccgcgacggcgacggcgccccacgaccacgagcagttgggatcctctccaaaattccaagcttccaacgtcttggcccaatccaatccccagccacaggtcgcggtcaccgccaagctcaccacacgggtatttgatggagttaaaggtttaattcgaggtggatttaggggttttttctaa

SEQ ID NO: 12282 - DNA, 330 bp, Oryza sativa
  Clone ID: TFbOSC412948j.C1.o9.fg
atgagttcatcatggacgacgaagcagaacaagctgttcgagagggcgctggcgacatacgacaaagacacgccgggccgctggcagaacgtggcgcgggcagtgggtggtggaaagacggccgaggaggtgaagaggcactacgacaagctgcttcaagacctgcaccacattgagtcggcaggccgtcagggttcccaatacggcggcagcagcagcagcaaatccaaaggtggcagcagcagcggggagcagagatatcggaacagagactggaagcagcaaccagggctccatagtggtgccgtgaaaagagcctctcagtattag

SEQ ID NO: 12283 - DNA, 123 bp, Oryza sativa
  Clone ID: TFbOSC400524j.C1.o37.gp
tgtgacacttacttgttgcccattgtagcgtgcaggttcatgacggtttcttcttcctctcgggaaaacatgccgtgcttcagccccggcctcaggtaattgatccatctcagcctgcaactc

SEQ ID NO: 12284 - DNA, 264 bp, Oryza sativa
  Clone ID: TFbOSC400935j.C1.o12.gm
atgtcttctaggtcaagcagctcctcccgcaacagcaacagtgtcaacatggactcagagtggagcaaaaaggagaacaagctgttcgaggaggctcttgcctactacggcgagggcgcgcctgacctctttcacaaggtgtctcgcgccatgggaggcaccaagacagccgatgaggtgcgccgccactatgagatcctcgaggacgacctcaagctgatagaggcaagaagagtcccgttccccaagggtggaagcatctga

SEQ ID NO: 12285 - DNA, 1083 bp, Oryza sativa
  Clone ID: TFbOSC401559j.C1.o1.fg
atggacgcgaaggacatcctcggcctccccaagaccgccttcccgtccgtccaggagaagaagccccgcgcgcccaaggagccgcagcggaagcccgatggcgtctcgcgcgaggtgtacgcgctcactggaggggtggggatggctccactcatgccgaccatcgaggcttcgcacctgaagcggcgaccagctgttgagaaggagaagatagcatggcagtggctacctttcacgtcctctgcacggactgacaaccttcaactttaccattgggttagagttgtaaatggtgctccacccactggtgactatcactttgcaaaatacaacaagaaggcggatgttctcaaatacaccgatgaggagtatgagaagtatttaaccgatcctgcatggagcagggaggaaacagataaactatttgaactatgtgaacgctttgaccttcgcttcatagtaatagttgataggttcccaactgatcgcagcatggaggatttgaagagccgttattattctgttactcgtgctcttctgattgctagagctcggtcatttgatgaagttgctggtaatccccttgtgaaggaaacattcaatgctgctcatgagaccgagagaaagcgtgctttatctgcacttctctcccagacaaaacagcaagaacgaaaggatgctgagattttagcagaagcaaaacgcattatggaaactcgtgctgctagcaaacatactgaggaagcgggagcactggcacactttgataatgttgatggtgtatctcccttgagcaacacacacccattgtcaactgctacacttccagctgcagcagtgaataactccatacctgcttcactgcgaatggtgaatttgaagcccaaggtcccgacgaaagcagtttgcgtcgagcatcttgaactacggaatgagatacttacactgcttaacttacagaagcagctgcaaaataaagaagctgaagtttcagctaacagagaaaattcctttacagaggcaccaagcacacctaaggatagtgccaagcagtggcaactgaagctcactttcaatacatga

SEQ ID NO: 12286 - DNA, 1284 bp, Oryza sativa
  Clone ID: TFbOSC411335j.C1.o19.fg
atggacgcgaaggacatcctcggcctccccaagaccgccttcccgtccgtccaggagaagaagccccgcgcgcccaaggagccgcagcggaagcccgatggcgtctcgcgcgaggtgtacgcgctcactggaggggtggggatggctccactcatgccgaccatcgaggcttcgcacctgaagcggcgaccagctgttgagaaggagaagatagcatggcagtggctacctttcacgtcctctgcacggactgacaaccttcaactttaccattgggttagagttgtaaatggtgctccacccactggtgactatcactttgcaaaatacaacaagaaggcggatgttctcaaatacaccgatgaggagtatgagaagtatttaaccgatcctgcatggagcagggaggaaacagataaactatttgaactatgtgaacgctttgaccttcgcttcatagtaatagttgataggttcccaactgatcgcagcatggaggatttgaagagccgttattattctgttactcgtgctcttctgattgctagagctcggtcatttgatgaagttgctggtaatccccttgtgaaggaaacattcaatgctgctcatgagaccgagagaaagcgtgctttatctgcacttctctcccagacaaaacagcaagaacgaaaggatgctgagattttagcagaagcaaaacgcattatggaaactcgtgctgctagcaaacatactgaggaagcgggagcactggcacactttgataatgttgatggtgtatctcccttgagcaacacacacccattgtcaactgctacacttccagctgcagcagtgaataactccatacctgcttcactgcgaatggtgaatttgaagcccaaggtcccgacgaaagcagtttgcgtcgagcatcttgaactacggaatgagatacttacactgcttaacttacagaagcagctgcaaaataaagaagctgaagtttcagctaacagagaaaattcctttacagaggcaccaagcacacctaagcgtgctaatagagatgttgatagaccctttgttcctgatactgttgggtttgcaggtgagagagcaggcaagcgggaccacaagcggaagatagtgctatggatcaactccattcttgcttggaagcttcccggcgtgcactttcaccaagagtttgctcccgtcggtagaagccgttcttggcttttgtctgtacagtgcatctgccctgagaaggttttcttcgtactcctcgttggaagatga

SEQ ID NO: 12287 - DNA, 3819 bp, Oryza sativa
  Clone ID: TFbOSC900117j.C1.o6.fg
atggaggctgtcgcatcatattgcttggatgtatgtggttttgcacaaagcagaatgatctacctcgcgccgccggaggagtccttttgtagccgctcccgcgttaaccgcccagctcatcccgcgagggtctacgttccccggaatccccaatttcgtgccctcgtcgtctgttggagatcgaggactcacctggcactcagggctgtgcgcattggattatttgtgaattgcgtctgcggtggcaatttgtgtgccacggagtgtgtgttaccatggaaagtgagaaatgtgaataaacgatatgccaaaataaatgaagattggcaggacaaagatgcaacaaatgtgcataaaagtaaagtgcgaaagaaaaaactgtctgacatgctaggttctcaatggagcaaagatgagctagagcgtttttatggatcctatagaaaatatggaaaagattggagaaaggtggccagttctatccgtgatagaacatctgaaatggtggaggctctttacaacatgaataaggcatatttatctcttcctgagggaacagctactgctgcagggttaattgcaatgatgactgatcactataatattctggatggaagtaacagcgatcatgagagtaatggttcaccaaaaacttccagaaagccacgaaagcgtggtcgtgcgaaatttcaatctgtgtcgaaggcttctgatacacaacatcctgatcaattgcaatctcaacctgcttcgtcaagctatggatgcctttccctgttgaagaagaaacgatctggagggaacaagccacgtgctgttggaaaacggactccacgagtgcctgttgctagtatgtaccagcgagatgagaagatagggccgacaaatagacaagccaaaccagatggtaatggtgatgatgaaggtgcacatgtagctgcactagctttggcagaggtgtttcaaagaggaggttcacctcaggattctcaaacgcctggaagatctggtgaccgtatgttcctgtctcctgtaaaaagtacagacagaaagaatgctgattcggagatgggaagctcaaagctacatggattccaagtagatgctgatttccctgaaggtagtttaggaagtagggaagcagagactggcgattatcccaaatatgcatcctatttgatgaataacgaaggttctgcgtctggcaagtctcagcaaaaggtgaaaagaactcagaggaggagaaagaaagctgcacggaaaacagatgatcaacttgaggatgacagagaggcctgtagtggcactgaagaaggccatagcgccaaaaagactaaagatgaatcagaggtgaatggattgggccgtaaaggaagatggccatctaagaaatcaaacaaaagaaatcgccagctgttctttggtgatgaaagctcagcccttgatgcattacatacattagctgatctatccgtgaatattcttcaaccttcttctatcgttgaatctgaatcatcagcacagattaaggatgaaaacaaagataatgattctgatgaaaagcctagtatgcctgcagcagtgtcagtacttgagaagaaagataaatccaaaagtacagtgaaaaaggttaaaaggcagtcagaactcgcaagcgctgacatggctgctcgcaaaaaagctagaattgccaaagttcctaatcgtgatggaatcgctatttctgaaacaaagcagctagattctaaatttggtgttcaaacagagaaaaagaaaagaaaaccttccgcggcaaagatttctaaagatgaaaaaagtgcacttaaagatgttgagaagactgagtggatggaaattagtgacttggacaacgtttctgctgaagaagggaaggtatcttctaataaagccatggatactgtggatacaacacaaggtgccacaactcagcaagctgacttagcatcaaagggtagaagtcgccgcaaaataggcattctgaaagcacttgctccagaatgtagacctactgatggtgctgatgatctccgaagtgataaattctcttacgctgtgaataatgtcattgatcttaaggactcactctctcattgcttatcttcacgtttgctccgtagatggtgcacgtttgaatggttctatagtgcaattgattttccatggtttgaaaagagtgaatttgttgagtatttgaatcatgtgaagttgggtcatgtgccaaggctgactcgtgtcgagtggggtgtcataaggagctcccttggaaaaccacgtcgattgtcgaaacagtttttgcaagaagagagagagaagcttgctcagtatcgtgagtctgtcaggcaacactatgctgaacttcggtctggtgttcgagaaggtctaccaaccgatcttgctcggcctttaggagttggacagcgtgtcatagcctgtcatcccagaacaagggagcttcatgatgggaatgttctgaatgttgaccataatcgttgccgggttcaatttgatcgacctgaactgggtgttgagtttgtaatggatattgattgtatgccactacatccactagaaaatttcccagagtctctcagacggcagaacattgttaacaaatattacaatagtttctcagaagcaaaattcgaggatcggtccaaagagttaggtactggaggtccaacaagattcacatcaaatgtgtgttttgatggtggtgatgcaacctccaacataccttctaattacccaataaatactttaatgaagcaagcaaagggtgacacggttgattcaattgcacaggccaaagttgcagtaaatgaggttgctgttgctgctcagcagtcaatgtacagtcagccgtgcacactgtcacagatacaggaaagagaggctgatataagggctcttgctgaactatcacgtgctcttgataaaaaggcaagtttgaaaggcttagtcctcatgttctctgttgaagctttgttggtagaattgaggcacatgaacgaagaggtgtatggaaggcaaaaggatggagaagcttttagagattttgagcacttcagaaaacaatatgctatggtgcttgtacagctaagagattctaatgatcatgtggcttcagccttgctttctctgcggcaacgcaacacgtatcatgggcatccagcacaatcatatcctaaacccatggaaaatggagccttaactggcacaccagacctgtataacctttttggctatattaatcaggaatctgggtcccaagtgatggaagttattgagacttcgaggtcccgagcaaaattgatggttgatgttgctattcaggcaatgtgcagtgtgagtgaaggagaggatgcttatgccaaagtaggggaggcactcgataatctgaacaatcgcagcactggctcgggttccagtatactaggcataagacggatacctcctgattctggacaggccaattcatctcatcaagataacaccacatctggccactttgatcctgcaacaaataacatttctagtccaagattgcccaatggttgcgattctgaaccgcaatttccctcagagttgatttcatcgtgtgttgctacgatccttatgatccagaactgcacggaaaagcagtaccatcctgccgaagtcgcgcacatcctggattcagcgctttcgcgcctacagccttgcagctcacaaaatgtaaccatcttcagggagatcgagatgtgcatgggcatcatcaaaaaccaaatgctggcgttgatacccaccccaagtggctag

SEQ ID NO: 12288 - DNA, 2622 bp, Oryza sativa
  Clone ID: TFbOSC400431j.C1.o41.fg
atgggtccagcaaaaggttctcgcacaattaccaagatcacaataaaggggtatgacgatcgacagcatgacgaggatccaaatagttcaagcaaggttaaactaaaaaagagaaaaatgtcagatttaggtcctcaatggagcaaggatgagcttatgcgcttttatgaagcctaccgtcgacatggaaaaaactggaaaaaggtcagtgcatctgtgggtggaaaatcagcagatacagtagaagccctttacagtgtgcaccggactttcttatctcttccagaacgtgaaggtactgccatgggatttgttgcattggtaactggtcatcacaatgtttcggatgaatccaagagtcataaaggaagtgatcaaacagttagagcatctgggaaggtacggaaacgtgaagctacagggcagaaagagaaggaagcacctcatgctcaccgctcctatcatgaaagaagaacttctggattatcttctttcaagaaaagatactatggagaacttgtcaagaacattccaagacatccttcagggaaacgtactcctcgtgtaccagttatttttcctgcagacatgaatgttgctcatgctggcataccagaaacagaaaatgccatcaactgtaccaaaaaggctagtggagctaccaataatgagcttgaatgctcatctcatggaagtcctggaatctcagaatcagccaagtttgttcaaggccagactttcctggaagctaaaggaactggaagcttgaaaaagagaagaattgagcagagtatggaacaaggtcagacaattaaagatgagcataaaaccgcaatggtggctaaagaagggaatgaccttactgaatatcagagacttaccaatctattttccccagatgagatgttggtcttagatgtcttggagagtttagtgactgtacccagtaaaatatcagagcctaagattaatattccttcaggtacacttggaagggatgattctgcattgtctcacagaagggaggaaggtccttcagttaagagatccaaacaagggaagcaagttggtgaatgcagtgcctccaagacaaggaataaaaggagaaagaagttaatagctgaagaggtgcctactgaaggagtcacttctaatcatttagatttgccagaagagcgtcaagttgatgccactgagtgcgccttgaattctgatctggaaaggggaacagttgatttacctgaatcaactgcaaatatttctaccaaaatccctgatttgccatcacaattaaaacctgagataaatatgtcgagaaggagcaaaagaaaatccaaaagtccttgtggttctaagtatgtcgtttgcaatggagcagataatttacaggctaggagattgcagcattgcttgtcatctgagtcacttcgtagatggtgtacatatgagtggttttacagcgcagttgattatccatggtttatggataatgagtttgtgaactacttgaattttgcgaatttgagccatctgtcaaggctcactcggtccgagtggagcacaataaggagctcacttggcaaaccccgacgtttttctgatcattttctggcagcagaaaaagataaacttgaaaattatcgcaaaaaagttaggcaatactatgctctactaagtgaagattcgtgggattctctaccaccagacctagctcgaccattttcaattggtcagcaggatcgttataatgtccagtttgataggcctgaccttggtgttgatgaagtaaaggacactgattgtatgcctgtaaactggttggataatctgcctgatgacctcaaaaagaggagcttcctttcaaataattcacacaacagagtagaggttgagcaaattccaaagtttacttcaaaagagaactgggatcatatcagcggagaggccgagccatccaaaaccatgcacataacttcagatgaacaggttgaggttttgctgtccaaatctatttttaagaagcattacgatcatagtctatctatccatgggcaggttgaaattgctgtggatattgaaagactatccaacaagagtacatctggtaattgtggaccattacagccgctccagtctgttgatgacaatgtacggagtagaggtttgtcagagcacaggaatggtcacaatgatgagctagattcttatattacttcctttgtccaaatgtcattggcacaagccaagcagatggttgacgaagccatgaaggaaatctctgagaatggtaaaagttctctagaagaaacaggcatatcaaatgaagcgacggattgtacaggcccagaaccggaatctgctgctaattctgaacttccgcgcaacctgatattcaactgcattgccacgcttcttgcaatcaagcattttagcgagggccgacatccacctcctaacatagcaggcgtcctggagcgtgcttgcttaatgctgcgaccaagctgtgcagagaacctgcccatctataacgaaatagagaattttatcgctgtcataaagaaccagatactagctcttgtgccatcggcatcaagcaatgccaggctacccatgtacatgtaa

SEQ ID NO: 12289 - DNA, 1437 bp, Oryza sativa
  Clone ID: TFbOSC421143j.C1.o4.fg
atggcgagcagagcagtggagggggaaggggagggggaggaggagggggaggggaagggtaacctggaggatgagtcacttattcaaatgattaacatatatgggcataacaactgggaaactgttgcacgcgctatacctggtcgaaatgcacaacaatgcagagtaagggagcatgcatctaaccacttcaaaaggctttctgaactaaaattgttaaagtcgcgtacaagcaggacaagtgctgcaatcaaagaacactggagaggtcctatgaaaagaaaattaaattcgtatttagcttcaggattgctcaaaaaatctcctggtctgcctgaaaatctatcagtttcgcagagtagtgactcaaatattcttcagcagtgtgatgtttcatctgatgagaataaactgttatcagatttacgaccaagcctaaaatctaaagaaggggtgagctcaaaatgtgatggttcatcttctgataatcaactgttatcagatttacgagcaagcctaaaatctaaaggggcaagctcaaagtgtgatggttcatctggtgataatcaactgttatcagatttacgagcaagcctaaaatctaaaggggcaagctcaaagtgtgatggttcatctggtgataatcaactgttatcagatttacgagcaagcttaaaatctaaaggggcaagctcaaaatgtgatggttcatctgatgagaataaactattatcagatttacgagcatgcttaaaatctaaacaaggggcaagctcaaaatgtgatggttcatctggtgagaatcagttgttatcagatttacaagcaagtttaatgtctaaacaaagaacaagctcaaaatataaacaaggggcaagctccaaatataaacaaggggcaagctccaaatctaaacaagggacaagctcaaagtctaaacaagggttcatagacctatgtgaaaatactgatacatcagaaggagaaagttctgagttgatatgtacagaaagaccagatcctgattcaggtgaagcttctcagaggataagggatagattgaattggcgtaaaagagcaaggaagaagctggttttcctgtcaagcccggtggagctcaaggtgtctgctgtggcagaatctgaaaggcacttacaggaaagtaaagaaatgagtccagaagttaacatcgtttctccaccagctgtactccaaggtttttcaccagaagttccatcagtatgtgaaaagattgtcgaaccaccactggctgatttcaaccaagctaagaatgtttgttctttggagacctcctcagacccatgcacactggagcaacatctggcgaatgtctcagatcttctagacatgtcatacatcgatggcttgatgatcattcctccttcaggttgcccatacgatggtgatttcatatga

SEQ ID NO: 12290 - DNA, 264 bp, Oryza sativa
  Clone ID: TFbOSC401872j.C1.o1.fg
atggcggcgtcgtggagcgagagtgaaaacgcgaggttcgagcaggcgctggcgacgtacgacagcgacaatcccaaccggtgggagctcatcgccacggcggtcggcggcggcaagacggccgacgacgtcaggcgccactacgaccacctccaacacgacgtcaccaccatcgacgacgaccactcccacgccgccggcgaagccctccccaacggcaacaacaacaataatactaacaaaggaaaccgaaaccaggcatga

SEQ ID NO: 12291 - DNA, 1026 bp, Oryza sativa
  Clone ID: TFbOSC21837j.C1.o42.fg
atgggggagggtgatgcagggcaggaatcctaccatgctatgagcaaatcacggccaccggatcagtactggatggacggacaggatctgtgcaggaagcccgcgtggaaatcggctacgcgggccaaatcgccccccatcgattttgaagcccacgagacagaagaggaggaccggattataatcgccgctcatgctatccatgggaacaagcgggcatgtattgcaaagcttttggatgggagaaccgacaatgctataaagaaccacttggaattctactctgaggcgtcgatccttcaacgatggtcgatgcaaacatggttgttacaagggatcttgaatccgggagtgcaatctgcaagcgttcccccagagttcaagatcttccgaatcccccttactcggaacggtggcggtggcggtggggacgaggcggaggggaacggtggcggcggtggcggttggggagcggcagcgacggcggtcgggagcagcggttgtggcctcgtaaggacgcccgatggcacgacaaagttgctgatctggagcacagagatgttgtacggcaccacgacgaccaccctcttgattgtggcgttcaccagcgcgctgcgcgtgaaggaggagctcgccggcgacgagctccatctgtctgtggtcatcgttccggctatcccggcgctaggctcaggttgcgcgcgctcctcggtcatacatgtgatttccactgatgcacgagagaggaggcgatttggtcggatggcgatttcatcggcgcggctgccggtggagtggattccttcgtcggagagatccccgagcctcgtatcttccactgctctatcctcttccgccttcgcctttgctgctgctcttcatgtgctgccaccacctcttcgtccttccctagccgtcattgccattggccgcaccaccatctatgaggacgctggccggcgtcgtactcttcatctccaccatgctgccgctccctctcctcacctcaccccttcccttctctag

SEQ ID NO: 12292 - DNA, 1169 bp, Oryza sativa
  Clone ID: TFbOSC102044j.C1.o1.gm
atggtggaggggagagagcgtgaacgtctctcctccttttgcagaagaaacaccggggcggcgttgagtgatcagttggccggcagcgggcgaagcggcgatgggggagcctggcagcggagcagcggctggctgctggcggagcggacggcggtggccagtgcgccgacgggcgtcgactcgctgctgctaccaccaccatgggcaactggcgtctcgcggctgccggtgagaacacggttaggttggagagaggatctggtagttgatgcccttgctgttgtgcggaggtggatgcggctgaggagctcctctgtcctcgagagcggcggcgcggcgacagagggggagagaggtggccggcggcggagcggggacggcggcagcgggagagggagagagaggcggtccgcccgatggcagcggcgggagaggaggaaaggtggcggccggctcgacggcgagctcggcggcggagatgttcgaacgcgccgggtgctcgaccacagccccgacctcaagcgcggcaacttcaccgacgacgacgacgagctcaccatcaggctccacgcccttctcgggaacaagtggaacacgcgcatcaagctcaagctcttgagccagggcatcgatccgcagaagcatcagccagttagtgcccggaccagcgttgctgcggcaagcgagctaaccacgacggccagcactgtcagctttccgcccctagcaccggcgccggtgcgagggagctcaaggaggaaggagggaaggctgggaggggtcttcctcgtagtcgtcgctggcggcagaagggtcgccgcgtgctcgcccattgccgctctgccaccgcgctcgccctccgcttctctgcccgctgtcgcgctcgcgctccactgctcggcccgccgccgctccgctgccgcgctcgccctccgttgcgccacccgcatcctggctcgcactccgccgctccacccgccgccgcgctcgcccatcgccgctccgtcgccacgctcgccctccgcttctttgcccgccgctgcgctcgcactccactgctcggcccgcctcgctcgcgcccgcggccgctccgctgccgcgctcgtcctccgctgcaccacttgcatccgcgcgcgcttctccgcctaccgccggcctccctcactaaa

SEQ ID NO: 12293 - DNA, 2109 bp, Oryza sativa
  Clone ID: TFbOSC101063j.C1.o16.fg
atggacgcggcggcggccggcgggggcggggcggcaaagcggaagcgcagcttctccgaggacgacgcctacctcatcctgcacaggtaccagccggcgacgatcctgacgatgctgcaggagatggggaagcaggtgggcgcggggaaggggatcgactggagggcgctggtgcggaggacgagcaccgggatcacctccgcgcgcgagtaccagatgctgtggcgccacctcgcctacggccacgagttcgtcgagagcgtcgagcccgcctccctgccgctggacgatgggagtgatctagaatgtgagattgagattgtccctgctccgggtaatgaagcattagctgaggccacatcgtttgccaagactattatcaccggatcttcacgtgaacaaacctctggtcaacgtgtcaactcagaagctgctgcgctaaacactccaaatgaaaagatagtgcgtgttccatctgataaacagcttgtgcctggtcaccgtctaacaaacggtacaggtccggtttccagctcaaagcagccctcccacacaggctcatctcctgatcctttggaccctaatggacatcccaaaaagaaaaagaagcctaaaccatggtccagagaggaggacatggaactaggagcaggtgtacagaagcatggtgaaggaaattggatggaaattctgcataaatataaatttgatagttcaaggacgcatcttcaacttcaacagagatgggcgcttatttgcaagcgtcaggggtcaaccaagcctgctacccctaaaatacccaatgttatgtcggaggaactaaaggcagcacaaaaagcattttcattggccattgggacgaccagatcgtctacattaagaccaggaggtgtgccacatcacaatccaatggttactactacgaatcctgaggtgaaatctgttacagcaccttcaccattgccggtaccggtgcatgttgttccggtgcctgttccagtgcaaccagtacaagtgcagttaccaccacctcagttgcatcaagcacctgcgcaatctgcacctccacctccaaaagtatcaaatgcttcaaataagtcacgaaataattctaagaaacaagttgcccaatcaattcctgtgaatggccctttgtcgatacaagaggcagctcttgctgctggtgggcgaattgccgaaccaagtgttgccaccaattttttaaaagctgcacagtccacaaaagctgtgcacataagatctcgaggaacaggatcttcaaaatcttctacgggatctaaaacacctactgtggctggtgaacctgggacacagcttggcagtgatcaacacctagaattacaaagtactggtggtccatctcaagttttgactgcacatgcaactgaacaagttcataatgtttcagaagtcgctggggttaatcctctgggacaatccgctggagtgcatttatcagaaactaagaaagcactgaacaccacaccagtgtctggatcttctgacaaaatggaaatagatgacaactctaattattttgcagtcacaatggaggacttgttccctgaggatgtgaagcaggaagatgttcaagatcccaagattgaggaggccatagaccccaaggatgcagacatgttagaatttgatcgctttgtggcccaaggatgcttaaataaggataatgtggataagagcaaggctgccaagattgctccagaagctcaaagcgttattggcagccagaaaaaacagctgaagacgctgcccacagttggcaaaagcaaccctgtatttgctggacctccagcaactgcgaaaaagaccaaagctccagttccacagggtgggatgtctagcggcatagttggcgtgctgaatagatcattaggagggaaggcacctgctcctgctaccacaggcacccaaagtactgtccagaagcagcaaagcatgagctcaaagggcaacttgttagtgcccaagaatgtggcgcctggcaccgtaacaccagccaacaaccgggccaacacagcggtgaacggggctagcaaggtgaatccaccagccagccagaagccagcctaa

SEQ ID NO: 12294 - DNA, 719 bp, Oryza sativa
  Clone ID: TFbOSC900320j.C1.o9.np
atgcaccgatctcctttctgtacgtggccggcggcggagcggggacggtggcagcgggagagggagagagaggcgatcgacgcgacggcggcggcgggagaagaggagagtctctccctccccaaggcgatggggctgctccgctgccgaaagagctgctgcctccactggatgaactacctcagccccgacctcaagtgcagcaacttcaccgacgacaacgacgagcttaccatcaagctccacgcccttctcggcaacaagtatctgctccggttagctcttcttgtgttcttggtgctgattgattggttctgcaggtggaacacgcacatcaagcgcaagctcatgagccagggcatcgatccgcagacgcatcaaccggttagcgccgggaccagcgttgccgcggcaagcgagctgaccacgacggccagcactgtcggcttcccatccctgcaggcaccggcgcccgaggcggcggtacgcgtccttgatctcccgcgcgctggcccccgcgtggaggccgaggacgtcgtagaacgaggcggcggcggcggcggccacgtggtccggcgcgacgacggaggtcgacggggagaaggaggccgagagcggcggcggcgcggcgtggaggcgcggggagggcggcggcgaggggttcgtcgtgggcgacgccgccgcgggacggaacgcgaggaagctggaggaggacagcg

SEQ ID NO: 12295 - DNA, 306 bp, Oryza sativa
  Clone ID: TFbOSC409191j.C1.o3.fg
atgagttcatcctggacaacaaagcagaataaggtgtttgagagggcgctggcaatatatgacagggatacgccagatcgctggcagaatgtggcacgggcagttggtggtggaaagtcagttgatgatgtgaagaggcactatgaaaagctgatcaaggacgtggatcgcattgactctacaggaggccatcaaggatcccattacaacagctccaatgctagcagcagcagcagcagcagcagcagcaactctcggggcagtgccaatgaggaccagaggaggaggtaccacaactttcagtga

SEQ ID NO: 12296 - DNA, 336 bp, Oryza sativa
  Clone ID: TFbOSC413644j.C1.o7.fg
atggcgtcggcggccggctcgaagcagcagcaggcgatgatgtcgttgccgtcgtcccgcggcggcggcggcggcgggtggacgcagcggcagaacaagcagttcgagtgcgcgctggcggtgtacgacaaggagacgccggaccggtggcacaacatcgcccgctacatgggcggcgccaagtccgccgacgaggtccgccgccacttcgaccacctcgtcgaggacgtctcccgcatcgagtccggccgcgtccccttcccccgctactcctcctcctcctcctcccgcggagccgacgacggaaacagatctaggtacctgaagtatcagtga

SEQ ID NO: 12297 - DNA, 1560 bp, Oryza sativa
  Clone ID: TFbOSC33166j.C1.o2.fg
atggcggacggatcggacggccccgacgtgtctccggcggcggcggcggcggcgggaggaggaggtggaggtgagatctgggggacgttggaggagctgctcttggcctgcgccgtgagcaggcacggcacggggagctgggactccgtcgccatggaggtgcagacgcggagccccctcgccgcgcgcccgggcctcacgcccaccagctgccgcctccggttccgccacctccaccgccgcttctccgtcggcggggcggcggaggaggacgacgacgacgaggaggcggaggagggtggccccgacgcctccgccgcggacgggtggatggacgagctccgccgcctccgcgtcgccgagctccgccgcgaggtcgagcgatgcgatctctccatcggaacgctacagacgaaagtgaagcggctgagagaggagagagaacaaagcatccacggcggcggcggcggcgaggggaagccggagacggcgaacggcgacgagcggctgtcgagcgaggagcccggccggtcgtgcagggagtccaattccacagatctgaaacccgcggcgcgcgccggtgaccatagcgtcaaggcggaggaggaagacgaggacgcggcggcggcgaagcagcaggcctccggcgagtcggtggccgcgtccaaggagagcagcgacctgcggagctcggtcagactgcgccgccgccgctcgtacaagcccggcgccgacgaggacgccgacggcgaggaggcctccgcgctgcggccgccctcgcagtcgccgtcgtcgtcgtcgtcgtcgcagccgctcgccgcgctgctcgacacgttcgccgccaggttcggtcccctgctcgagcggctgcacgaaagccaggagagcgacgcgtaccgtggcgcgatcaggcgccacgtggacatcgagatggccgcggcggcggcgaagaaggaggagagcgcggagaagggtgaggccgccgaggaaggggaggggagcgacgacggcgagaagaaggtctccgtgtcggcgtcagcgagcaaggacaaggcgtgggggttgaggacgaagaaaggccgcggccccggcaagaactcggccagcgtcggtggccggaaaatggccaagctctcggaagcgacggaggcagcgaccgacggaagcaagaagcccgacaagaagatcgccgccgacgcagccacgcccgccaagaagcggaacgccgtggacttcctcaaacggctaaaccagggctcgtcgccgtcgaagaagaagaagaaaggctcaccaatggggacacggaagcgtgctgcggcggcgacgtcgccggagcagccgcagaagacgcgtaaggggcccggcaggaaggatgccggccgcggcggctccaagaagggcggcaagagcgccacgccgaagagaagcgtggggcggccaccgtcgaagcgaggtgccgccgccgcaacgacgccgccgccgtcgaagagggccaaggtgaaccggtcggagaagacggcggcgacggcgacggcggcgaagcggggtgggaggaggtag

SEQ ID NO: 12298 - DNA, 1944 bp, Oryza sativa
  Clone ID: TFbOSC33171j.C1.o5.fg
atggcggacggatcggacggccccgacgtgtctccggcggcggcggcggcggcgggaggaggaggtggaggtgagatctgggggacgttggaggagctgctcttggcctgcgccgtgagcaggcacggcacggggagctgggactccgtcgccatggaggtgcagacgcggagccccctcgccgcgcgcccgggcctcacgcccaccagctgccgcctccggttccgccacctccaccgccgcttctccgtcggcggggcggcggaggaggacgacgacgacgaggaggcggaggagggtggccccgacgcctccgccgcggacgggtggatggacgagctccgccgcctccgcgtcgccgagctccgccgcgaggtcgagcgatgcgatctctccatcggaacgctacagacgaaagtgaagcggctgagagaggagagagaacaaagcatccacggcggcggcggcggcgaggggaagccggagacggcgaacggcgacgagcggctgtcgagcgaggagcccggccggtcgtgcagggagtccaattccacagatctgaaacccgcggcgcgcgccggtgaccatagcgtcaaggcggaggaggaagacgaggacgcggcggcggcgaagcagcaggcctccggcgagtcggtggccgcgtcgaaggagagcagcgacctgcggagctcggccagcctgcgccgccgccgccgctacaagcccggcgccgacgaggacgccgacggcgaggaggcctccgcgctgcggccgccctcgcagtcgccgtcgtcgtcgtcgtcgtcgcagccgctcgccgcgctgctcgacacgttcgccgccaggttcggtcccctgctcgagcggctgcacgaaagccaggagagcgacgcgtaccgtggcgcgatcaggcgccacgtggacatcgagatggtgcggcggaggctggacgcgtcgccggccggtggcggcggcggcggcgccgccgccgccgagttctaccgcgacctcctgctgctctgcgccaacgcgctcgtcttcttcccgcgcgccgggccggagcgcggcgccgccgcggaggcccgcgcgcttgtgtccgcgtcgctccgcctccgcgagccgaagcaggagcctggcaccgccgccgccgccgcggtggcggcggcggccgggtcccctccggctgaggatacgcggagagctgagggcgtcgtctccgtcggcggcggcggcggcggcgctggcatcgtcgggtcgctgatcgagaagggagggaagccgctcatcgtttgccggaagcggagctccatcgcgaaggccgcggcggcggcgaagaaggaggagagcgcggagaagggtgaggccgccgaggaaggggaggggagcgacgacggcgagaagaaggtctccgtgtcggcgtcagcgagcaaggacaaggcgtgggggttgaggacgaagaaaggccgcggccccggcaagaactcggccagcgtcggtggccggaaaatggccaagctctcggaagcgacggaggcagcgaccgacggaagcaagaagcccgacaagaagatcgccgccgacgcagccacgcccgccaagaagcggaacgccgtggacttcctcaaacggctaaaccagggctcgtcgccgtcgaagaagaagaagaaaggctcaccaatggggacacggaagcgtgctgcggcggcgacgtcgccggagcagccgcagaagacgcgtaaggggcccggcaggaaggatgccggccgcggcggctccaagaagggcggcaagagcgccacgccgaagagaagcgtggggcggccaccgtcgaagcgaggtgccgccgccgcaacgacgccgccgccgtcgaagagggccaaggtgaaccggtcggagaagacggcggcgacggcgacggcggcgaagcggggtgggaggaggtag

SEQ ID NO: 12299 - DNA, 885 bp, Oryza sativa
  Clone ID: TFbOSC900351j.C1.o10.fg
atggcgccccccaatcgccccgtcgttgtgcccctcctctctctctctctctctcgcacacccccaccccgccgccgcctccgcctccgtacccctacgccgtgccatcgcgcctccaccactcgtcgcgccctccacacgccgccgcatcagcgcacgcgtcttccccctctctcggtcgctccctccgcatctcccctcctcaacccctcgatccacgtcgccgcagccccctccctcggtcgctccctccgctttcctcccccgcatcgctcgcgctcgctatccaaccgccgacgccactcctcccacctcttcgccgcgccccgccacgcctccaccgccggcgcccccatcgccacgctgcgctactccgcggtgctcgggattgaggccgccgtgctcgttggcacagctcgggactccacctcgtcgccgatcccgccctcttccactggagctccctcgctagcccgatgcaactacataaatgcaaataaatgcaagctgcagaggaagcaatttccggttagattgagctttgcattgaccatcaataaggcgcagagtcaaacaattccaaatgcaggcgtctacttaccggagcctgtcttctctcatgtagtaaacattactttcggtgggattttggcaaggcctatatacaccattacagactatgacaaaggaaatttggatgcaggcatgtcacaaactgatttcatcattatggaatctgcagaaattccaggctttggtggtactagctggactgaccaggagaccttgcttcttttggaagctttagtaattttgcaagcaaaatggggtgacattgcagagcatgttgatacaaaaaccaaagcacaatgcatgctgcactga

SEQ ID NO: 12300 - DNA, 765 bp, Oryza sativa
  Clone ID: TFbOSC3807j.C1.o1.fg
atggacgtcgctaagcttcgagctcacaggagttggttgagggtgaggcggtggcaccagcaagtgaccacactgccgcgtccagcaatcgcgagcatacaggggaggggaatggcggccaccactagcccgtgcctgccgagaatgacgaaacacaagcaggccccagcagcggaagagggggatgagaaatatccaaagttgattaattcatgcagactgccctttactcatatggttattgatgtgtcctaccacttgattttaatttgcaggctgttccttcttggacttgagaagtacggcaaaggcgactggaggagtatctcaagaaactttgtgatctcaaggacacccacccaagtagctagtcatgcacagaagtattttattcgcctgaactcaatgaacagagagaggcggcgatcaagtatacatgacataaccagcgtgaacaatggagatacatctgctgctcaggggccaatcacaggtcagccaaatggcccatcagcaaatcctggaaaatcctctaagcagtctctacagccagcaaatgcgcctccaggcgtcgatgcttatggtacgacaattggacagccagttggtggtcctcttgtgtccgcagttggcactcctgttacacttcctgttcctgctgcacctcatatagcctatggcatgcatgcccctgtccctgaagctgtagtccctggtgccccagtaaacatgcctccaatgccctaccccatggggatcctctag

SEQ ID NO: 12301 - DNA, 273 bp, Oryza sativa
  Clone ID: TFbOSC413644j.C1.o6.fg
atggcgcagcaggcaagggcgcagtggccgcagaagcagaacaagctgttcgagcaggcgctggcggtgtacgacaaggagacgcccgaccggtggcacaacatcgcccgcgccgtcggcggcggcaagtcggcggaggacgtcaagcgctactacgagatgctggaggaggacatcaagcacatcgagtccggcaaggtccccttccccgcctaccgctgccccgccgccgccggctaccaggccgaaaggttgaagcatttgaagatctag

SEQ ID NO: 12302 - DNA, 2799 bp, Oryza sativa
  Clone ID: TFbOSC900286j.C1.o9.gp
tttcaccaaaactccagcaggcaaaggagtaaactcagttaggaatcattaccacattacaatgatctgtgtgaggtttctgcataaatactgatagacataccaacaaacatccttgtcagccagcggacagcatgaccaacacctctagcaaaacctacatcactgttaacaggtaaaaactatcaagtatggagcggctgcagcaaaaaagaaaggtacaaaaagttaataccagcgataaatttaaacgaacttctactgcaaatcctacaacaatatggacaggaaagccattcactttcccatgtttagtttcatcccaagttacaaaaactaagtatgatacagagagcaagaaagcattgcactattgccgctaccaacactacagacgctacctgcttcctatgtctttccatgtatccacgtcgttgctgctgctcaacatcttcgaaccagagccgtactgtgccttgagagcagccacagggtcagatacaccgctaaccaggaccccagcacccccaagcctcccaggctgctggaaccccgaaaggagttcgattccattcctcttatgaagatcggcaaagttttctagtagtttgtgatctgatgtatgtggcggcattgaaggttgctgaaattccgcaaacacgctgagcgcgccatttttggttgagtaaactggtacaccagctgacggtctctgacactttgccaccataaccataggctcaggctgtattgttcgcccatccatatggtcaaaactcctcatcgctctctcctctagccccaagttagcaatgattggaggcctggaagaataaaccaggcgttcccttggattactcaacaacctagaagaagctggcttatcaacctttggtgaggggggcttgcttttgcttccatgaactgatgaaccagagctttgcaaggatgattgatggctaagaatttgcccaaacaacttgacatcaccaggccgcttttgctgctcctcattcccagcacttgtcttgacagaacaaggcctaaacaagccttcacgtgcttcctctcttctcccagtcgatagaaccccaagatttccattcgaaaggcccaagctgctgggcctgccattctggaatttcgatactgtgaactggtccgactgggaaatgcctgtgctttcagataagccacatacttcagttccaaagtgattatttcgtctctgttgcatgtacccatcgacattagaaaacagtgcatcatgacgattactggactggtctttaaatgttgggaacatgttcacatcttttgcccctgaagcaatgctggctctgttgccatgatcctcaaaattgggtgtagttatggcagctataccctcaaaacagattgaggtaggatcaggcagcgacgaactaaattggacaggcattaaatcctttggggtaaggggcttcggttttgattggattggatctgccagcttactttgctgataatttgaagtaaatgcaggactaatggaggaagcaccatccatgttcgagaagtggatgatattttccttactaaccccattttctgcaggcaagcaaacagacggtgttgattttccacctttaccaattgtactctcatgtgaacatccttcgatcctggaaacatcaatgccaatcccttcagaatgtaaactggatctactttccacatgcgctgccgcaacctgttcaactgaagtggccatgagatcatctccatgcatgttcactggtgttacatcctctatgtcttgcagcttatctgtgctctcaggacagttgatgtcgatacgagcacatgatgtttgattaatgtcttcacgtaactgtttatgatcaacaagaatgctgcagtctttttctgctttgctttcaccttcctcgacatttatgtccacaacatcaggcatgtttgatttgtcagcttctggctgcctagaggcaatatcagaaagaggattatgtccttgaatttctccatcagaaacaggacatgcatctatctccactttaggacatgactgtgcactacagatagctgaatccatctcagcaatacaggctccatctgtaccactccttcctccattggcatcacctgtagggaaaccagcatcagcagcaccttgatggatcagatccaaaccaagtgatttccgagccttgctgaaaaaaaccttgcattgttcaaatgacttgctcttcacgtatgacgaaattcgagcgaaatccttcccatatctattcatagcctcaataaaacttgacttctcatcatcattccaatcaactatgtcaacttcacactcctgatctgagagagtgccgtcatcatcaaagtttttatctgcttcaggagttaaaagatgctccattcttgagatgatccctatcttctggccaggatcagcagaactggtaatgcatgagcccatgccttctggggagagagttccacatatgcctgccaagacatcagcagctacagattctctctcgtgcaaagaaacatccccaacacaatccttctcggatcctttggtagaattatcaacaccacaaacagtcctcaggatagatttcgcagaatttttcttcacttcattcacatattcaaggccttgggctgccacctctgtggccaccccaagcatatcaagtgatgccgcatttgcctcaggattccatttctttccagatactgctcctaggtaattgttggcaggttgctgttgctgccgaagatcaagaa

SEQ ID NO: 12303 - DNA, 2455 bp, Oryza sativa
  Clone ID: TFbOSC400017j.C1.o12.fg
cggcggtgcgagcggccgccgctgctctgagcgagggggacacagtggtgccgtggcagtggacctcgccaatgagtccggcgccgagatggctgctagtcactcaggccctggaagtccatggtcgagctttgaggatcaggctcttgttgtgcttgtacatgatatgggtcaaaactgggaactggttagtgacgcactgaacagcattgttcaattgaagtgtatatatagaaggcctaacgagtgtaaagatcgccataaacttctcacagaaaaaggttcaggtgatggtgcggatagcgcagatgactcgggctcatcacaacactatcagtccacattgcctggcatcccaaagggtagtgctagacacctgttccagcgccttcaaggaccgttcgaggaagagactcttaaggcacacttcgagaaaataatattccttggtcaaaagttgcatccaaatcgtagaaagggtgagagccaagagctcaagcagataaacccactccattcttctcatcttcatgcactttctcaagcatgtgcacctggagtcattttgatgccgcttgatctttgtgatgcaatgactccaaacccggatgcactttctattggttactcgggatctcatgcaagtggtttaatgcttccaaaccatcccagttccattggccccacccttcctactggtaatatgaatactaggctaccagggtctcctggtatggttttaggcaatactttgccatcaccttcaacaccaaatactcctagggattctcagaggtacggaatgcctagacctacctctctgcagggtgatgagcaacaaagaatccagtacaatcagatgctcaacagcagaagtcttcagcaacctggggtgcctgttcctggtgcgcctgctggagttgatcgtggtgttcggatgatgcctggtgctcatggtatgggggtgatgactggactaaatcgtggtactccagtgaccaggccgccctttccaaggcttggttcctcaggaatgctaaatatggtttcacctggaaacatgcttcccaacaatgggcaaggcatgcaaaacacggtgaatgttcatcctggtaccatacctggccatggaaatactatgttgaggccacgcgatccaatgcagatgcttcggcctggccagaacatggaagaacataggcagatgatgcagggagtttcagatgcaattcagtcatcccaaccacatcagatgccacaacaatcacacgtgcttggaaatacacatcacccccatattcaaggaacaacccagtcaagcccacagcagcaggcttatgctatgcgcttggctaaagatagacacatgcaacaatgcatgatgacccaacaacagcacccactttctggagccagtgcagtgtcgactgtacagaatggttcacaaatgcaacagcagagccaagggccagcttccagtgctatcccatcttcgcagtcacaacataaacagcagcatccggcacaaaattcactagatagctcagtgcctcccaaccagcctgttaatacatcgcataagcagaagaagcaacagggtcagcagcagtctagacaaaaccagcagcaaagaaatcaaggtagccagcaagctaagcttatgaagagcttaggccgagggaatatgatgcaccagagttcaccagttgatgccactcaagcaagcggtatttctacaacctctaaaaaccaagtttctgataaaagtatggtgcaacagggcccggggtattttgctggtaataagggcttggttccatcagtggttcaacctggtaatcaacccaagatatatgggtctcagatgcctcattcaccaatacaaacatcagatgtaggtagtcaaagctcaatgcagggttctcctaaccagactatgttaacttctcaacaagctccacttcattcgtcatctccattggcacagcagcagcaacaacggtacatgaatccatcacataacaacatccagagattggtgatgcaacaaaaccgtcatatgaacactgatggtaggatagaatcacctgttgaccaagttcaacataatcaggcaattccctccacatccattgcaaagagtacagattcaggtagcccaggtggtgtttcatctataaaccagcggagacaagagtcatctcatgatccaactacagttccatcaacctcgcagttagctagctcgcctcaagatacctttgttggaaatgaaatgctgttgtcagtgtctagccaaggcatgttgcaaaggcaaatgtcaggtggcgtgcctatacatgggcatggtattggtgggcagaggcagcagctgcaatctcggcagcaacagcagcagaagcctgctgttcaaggcagtgtgtatgctcatccttcaaattcaggaccaggatga

SEQ ID NO: 12304 - DNA, 2793 bp, Oryza sativa
  Clone ID: TFbOSC900031j.C1.o3.fg
atgaaccctactcagccagtggttatacatgacagacattgtgttggtttgcttcctgcaagccatattgctgccggcaatacgatgcgaatatgcgcacgagtctccgaaagctttggggctcggaaatatattttagatgccaaaagatggtgcatcatagggaaaaatatggagtcacttgagccagaagacggtgatggacaccaatcagatgctacagatgacgacttaccaccacgtatatgcactggaaaagcgtaccaagcagagatccctaatcttgccacagaggatgagcgtcgtcagtacatgagcaacacaactgatagttgcatggcacttggttatgattgccctataccaattatgtggacattaccaagtgaattcaataagaaggaagaggaaatacaaaagcagcattcttcagaaaccaaggctatagaaaatagcagagatggggatagccaaacgacctcaatttgcccaaccagtaataacacaagtggacagtgttcaacatctcaggatccgcatccagagctacctgatcagatagtatctgacagtcatcaagcacacgatgataaattggctccatgttccactcaagaaggtctaaacttcactgataaggccatggcagatcaaggagaaattgaacagtttattccagtgcctaattcatccacttccatttggagtgatcaggaagcagaattattgctccttggcctctatatttttggcaaaaatctgcatgtgttgagcagatttgtaggtagtaagactgttggggatgtgctttcctactattatggaaagttctacaaaggagaagcatataaaagatggtcagcctgcagaaaagcaaaaataaggagatgcattcttggggaacgcatttttataggttggcgaaggcaggagcttatatctcgccttaaatctaaaatccctaaagaagctcatgatctgttggatgagatgttcaaatctttcaacgacagccaaacatcattaatggattttgtttttcatctgaaatctgttgttggaatagaagcttttgttgaggcggttgcgatcggtaaagggaaggatgatttgactggttttgttttggacccatccaaaccaaaccaagtcctttctgttcagcccggcatgcctgcaggcaaagattgttcctctcttgcttcagaagatataatcaaattcttaacgggtgatttcagaagaagcaagacaagatcaaatgatcttttttgggaagctgtctggcctcgtttgcttgcaagagggtggcactcagagaagccaaatgatgtcagcacaacgaagaattgccttgtattcattgtgcctggtattcaaaggttttcaagaagtgaacttacaaaaggcactcattattttgattctgttagtgatgtcctcaagaaagtggtagcagaccctgttcttcttgagatagaggttgatggaatgggcaatggtgttaatgctgagaaaaatggctttgacacagccatgaaactgaaccaagatgttcctttcgatggctatcacgagcttccaaagtttacaataatcgatactagcttggtccaaggggaagagccctcgcaagtgagggagctgaggaacttgcctgctgatgcaaatattagttttggccctttgcgtcatacacataatatggtgagtgatagttcctcagacgaacatgacacagatgacagatcatcagattacaaggaaggctacgcaggagttacagctgatgagaatggcactgaaatggtttcatccaagaatgcagacaatgaaagccaagtggactcttttcgaaatatggctgctacatcatgctcagtttttccagttaatggccattcttctaatggcaatggtgacacaattggtgcgacaagcttctttccccagaaaactaaaattgaaaagcgcaagtacttatccccagtgacgaagcgcagaagactaactagctgtagcaatgaccagaccagtcgacgcagcttttctttctcaaaaggccccggtttagaaaaagagaaagtcaagctgccatcaacttcatcaaaaccaactgctattgatgttggtggtagttttcaatccaaatcacttgcgagctgttctggcaaggagaagccatgtcagcagataaaggatgcatcaaactctcatgccaatgacagatcaaatgagaagatgaatgtggcaaggccaaaggagaagccatctgggcataaggtagatacactggcttctgttcattcgaagaccgccgttgaggatacaaaacctgccaaaggagtagctcagtctagtgatttggtggctaatcaggttaaactagaaacaccgcaggatgataagactgtcacaattgcgcacgccccttcatcagacaaccatggtagcatcctcaagaataaggagactacttccagttcaaacaccgagatcgctcatgatgccccggaggcaacaagaggaggacctgccaaccctcagcctgatcttcaggcttcttcgcaggcaatgaatcctcggaggcaaggaaccagagtcaggcctcccacggcaagagcccttgaagcggtcgcctttggcctcctcggaagcgggaagcgcaaggctgaccccactggctcgagcaggcctcgtcagcgagctcgcaagtccaccaaggaggcagcttccgtgtccaccagcagcgacaccgagaagtcgagcatgcactctggagctcggcaatga

SEQ ID NO: 12305 - DNA, 341 bp, Oryza sativa
  Clone ID: TFbOSC4439j.C1.o1.hg
gcacgtcggcggtgcgcctctgaagaagtgcttagcatggagtgcctatcgtcgccgtcgccgtcgccgtcgccggcgtactacgccgcggtcgccgtcgccgcctccaactcgtcgccgaccgtgtcgtcgtcgtcgtcgctggtgtcggtggaggaggccggcgagaagatggccaacgggtacctctccgatggcctcatggcgagagctaggaggaagaagggtgttccatggactgaagaggagcacaggaaattcctggtagggctcgagaagctcgggaaaggcgcctggcgcggcatttcccggcacttgtcacgacaagaacaccgacgcag

SEQ ID NO: 12306 - DNA, 675 bp, Oryza sativa
  Clone ID: TFbOSC23942j.C1.o6.gm
atggcccccggtggtggtgtactgttcgccggtacgtccgtctgctcggaggaggggcaggatgaggatgaggagaccattgtggaaagtcgtgcttttgagcaaagagtaaacttctgggagcagcctaatcaaagatgggggcggctgggcaggggcacagccgaacctggccatggaggaccagcacaggtcctcgcctctagcggccgtcacgtgatgatgagatgtgttggaagggatggagatgatggcctccgtcgaagtgagaatgtggcggccgagatagttgaggaggagaagccttcaccgctcaatgccctcaaccgcctccgcctctcgagctccttcgccccaccgctattgtcctcttcacgcgccgatgggggtagaggagaagccgcgcggccatcaaggagacacgcaccggcactaagcatgggttcgtcgtggacactcgatcagaacaaggtctttgagctggcgctggcgacatacggcaaggacacgccggaccgctgggaaaatgtggcgcgggcggtgggcggtggcaagacagcggatgatgcgaagaggcactataagaagctggaaaatgacatcggccgcattgattcaacaggtgccagcagcagcaactccaatggccgtagcagcagtgaggggcagaggtag

SEQ ID NO: 12307 - DNA, 864 bp, Oryza sativa
  Clone ID: TFbOSC405208j.C1.o4.fg
atggattcatccaaccaaaaattcatagatcttcttagtcaagactctccaaaccatgcagaaaagactagccacaactcccctccccaacaattccccaataattttccccaatctcagtttacccaaagcttcaacccacattttttacacaatttctatccattttgttccccaagcaactatccaccatatggtcattctcctcccagctttcaaggtactcctccaagctttcaaggtattccacatcaaggaaattgggcacaacctaatttagccaccttacaaggtttccatttgcaagaaaatatggtgcactcaccaaatcaggggtttggaactgcaaaccaccaagcaatatttgcactgcaataccccttagttagagccactgtcaacagttcttcccatgggtcagagtcatcgactccctgccctgcaagacaacaagaggcgccagttaatctcgagtcgtcaagtgaaagcagcgaagacgaggtgaggagagcaacacgcaccaattggacagaagaggagaacttacggttaattagtgcttggttgagcaactcggttgatcctatagatggaaatgacaagaagggagagtattattggaaggatgtggctgatgagttcaacaacaaccgtcctacaaatggccacaagaggacagtcaagcaattgaagacacactggggaaatgttaagaaggacattgggaagttttgtggagtttatgctcaagttagacgtacctgtaccagtggacactctgatgacatgatcatggaaaaagctcatctatggtacaagaatcaatcaaatcagaagaagcctttcaccttagagtatatgtag

SEQ ID NO: 12308 - DNA, 2352 bp, Oryza sativa
  Clone ID: TFbOSC402357j.C1.o1.fg
atggagattaattcctctggtgaggaagcggtggtaaaggtgaggaagccatacacaatcacaaagcagagggagcgttggactgaggcagagcacaacaggttccttgaagccttgaaactgtatgggagagcctggcagcgcatagaaggtctcattgcaagatctatgaatggggaggaacacaagcaaggcagacataatccgttggaaaaggaagctatcaacaatggcacttctccaggacaagctcatgacatcgacatacctccaccacgaccaaaaagaaaacctaacagtccatatcctcgaaaaagttgtctcagctctgagacatccaccagggaagttcaaaatgataaggcaacaatatcaaatatgacgaacaatagcactgcacaaatggcaggtgatgcagctcttgagaaactcacttacattcagaaacttcaaagaaaggagatatctgaaaaaggaagttgctccgaagttcttaatctctttcgagaagtcccatcggcatcattttcttcagttaacaaaagctcttcaaatcatggtgcatccagggggctggaaccgactaaaacagaagtcaaagatgtggtcatcttggaaagggattctatttccaatggtgcagggaaggatgcaaaagatatcaatgatcaagaaatggaaaggctcaatgggatacacatcagctcgaagcctgatcattctcatgaaaactgtttggatacctcaagccaacaatttaagccaaaatcaaactctgtggagacaacatatgtggattggtctgctgcaaaagcttcacactaccaaatggacagaaatggggttactggctttcaagccactggaactgaaggaagccatcctgatcaaacaagtgatcaaatgggaggagccagcggaactatgaatcaatgcatccatccaacacttcctgtggatccaaaattcgacggcaatgccgcagcacagccctttcctcacaactatgcagcctttgcaccaatgatgcaatgccactgcaaccaagatgcctacagatcttttgccaatatgtcatccaccttctccagcatgcttgtctccacattgttgtcaaaccctgcaatccatgcagctgccaggcttgcagcatcgtactggcctacagtagacggcaatactcctgatccaaatcaagaaaatctttctgagagtgctcaaggaagccacgctggctctcctcccaacatggcatctattgtcacagctacagttgctgcagcatcagcatggtgggcaacacaaggtcttctccctctttttcctccacctatagcttttccatttgttccagctcctagtgctcccttttccacagcagatgttcagcgagctcaagagaaagatatagactgcccaatggataatgcacagaaggaattgcaagaaactcggaaacaagataattttgaagctatgaaggtcatagtgtcttcagagactgatgagagtggaaaaggagaagtgtcgctccacactgagttaaagatatctccagcagataaggccgacaccaaacctgccgcaggagctgaaacaagtgacgtttttggaaataagaaaaagcaggatcgctcttcatgtggttccaacacaccgtcaagtagtgatatagaagcagataatgctcctgagaatcaagaaaaggctaacgacaaggcaaagcaagcatcttgcagtaactcttcagccggtgacaataaccaccgtagatttaggagcagtgcaagcacaagtgattcatggaaggaagtttctgaagaggtggtcgtctaccagcattccgcatattcacatttatcttactcgctgaacatccatcactgcttttctaattcacatttctgctgtcagggtcgtctggcttttgatgcactgttcagtagagaaaggcttccccaaagcttttctcctccgcaagtagaaggatcaaaggagattagcaaggaggaagaagatgaagtaaccacggtgacggttgacctcaacaagaatgccgctattattgatcaagaactcgacacagcggatgagccaagagcttcctttcctaatgaattgtcaaacctgaagctgaaatctcgcaggaccggtttcaaaccatacaagaggtgctcagtggaagcgaaggagaacagggtaccggctagcgatgagggggaaacagggtgccagagtgggaagaacgtgttcaacgtgcccacttgcaagcatggacaggctggtgctgtgtacaacttcttctctgctacccaacaggggaaaatgcgtgactatgaaaggttgatgtga

SEQ ID NO: 12309 - DNA, 504 bp, Oryza sativa
  Clone ID: TFbOSC400025j.C1.o5.gm
atggggaggtcgtcggcgtgctgcgacaaggcggcggtgaagccgaagcgcggggcatggacggcggaggacgacgagcggctgcggtcgtacatccagcagcacggcaccggcggcaactggatggcctccgccgctgcggcaagagctgccgcctccgctggctcaactacctccgccccggcatccgccacggcgccttctccgaccacgacgaccgcctcatcctcgccctccacgccgccgtcggcaccaggccggtcctcctcctcgccgcccaccagctgcacgttgctagcaccagtagcggcggcatgcacgtcggagtcggagaagaaggacgcggctacgacgacgtcttcgccgccgaatcggagcacggacgacgcgctgatgatgatgatgaattggcacaaccaccaaaaccagctacaatatttgcaaggcaaattacaaactggtgtgcagcagcagcaacttgtatttggcatgccttactggtga

SEQ ID NO: 12310 - DNA, 889 bp, Oryza sativa
  Clone ID: TFbOSC101758j.C1.o2.np
tctactactgtcgtactcggtacatcagcaatttcagcagtgagctcacagcaaaatgttgctacgtgcagctgcgccgctgcagccgccgatggccgtgcctgcaccggcggcggcggtgggggaggaggcgaggaaggtgaggaagccgtacaccatcaccaagtcgagggagagctggacggagcccgagcacgacaagttcctcgaggcgctgcagctgttcgatcgtgattggaaaaagattgaagcatacgttggctcaaaaactgtgatacagataaggagccatgcacaaaaatactttttgaaggttcagaaaaatggtacaggtgaacatctgcctccacccaggccaaagcggaaggcagctcatccatatccacagaaggcctctaaaaatgcagaaatacaaatgccagtgctgtagtaccctcctgggacaattctattgctcaacctttaagtgcaagtcgcacgcaaggtatgtttacctactatgctcataaacctctgtccaaaattaatgagaaaaatccaacaaatgccattgacgaactaaatttggcaggtacaggtgctgttgctacaaataactgctctagtagcatagagagtccttctactacttggccaacttctgaagcagttgaacaagaaaatatgcttcgaccactacgtgctatgccagattttgcacaagtatacagctttctgggaagcatatttgatccagatactagtgggcatttgcagactttaaaggcgatggatccaattgatgttgaaacggtactactgctgatgagaaatctgtccatgaacttaactagccccaactttgcggcacatgtaagttgttctgtttttaaaatgctcattaaataga

SEQ ID NO: 12311 - DNA, 1002 bp, Oryza sativa
  Clone ID: TFbOSC407812j.C1.o29.fg
atgagcgcgacgcccaatccgatcgatgcctccgtcgtctccgccgccgccgccgtcgcgggcggcgggggaggtggggatgggggagggggaggaggagggaaggagaaggagaagcaggtggtggctgcgccgctgcagccgccgatggccgtgcctgcaccggcggcggcggtgggggaggaggcgaggaaggtgaggaagccgtacaccatcaccaagtcgagggagagctggacggagcccgagcacgacaagttcctcgaggcgctgcagctgttcgatcgtgattggaaaaagattgaagcatacgttggctcaaaaactgtgatacagataaggagccatgcacaaaaatactttttgaaggttcagaaaaatggtacaggtgaacatctgcctccacccaggccaaagcggaaggcagctcatccatatccacagaaggcctctaaaaatgtttcgccagctgctatatcacaaccccctcctctgggggagcaaggttgtgttatgtccatggatacatctcctgtcatcagaaatacaaatgccagtgctgtagtaccctcctgggacaattctattgctcaacctttaagtgcaagtcgcacgcaaggtacaggtgctgttgctacaaataactgctctagtagcatagagagtccttctactacttggccaacttctgaagcagttgaacaagaaaatatgcttcgaccactacgtgctatgccagattttgcacaagtatacagctttctgggaagcatatttgatccagatactagtgggcatttgcagactttaaaggcgatggatccaattgatgttgaaacggtactactgctgatgagaaatctgtccatgaacttaactagccccaactttgcggcacatctgagcttgctgtcatcatgtaattctggtggggacccaattaagtctgaaggcatggaaaatcttggatctccacagagttgccatctcccgttcatgtaa

SEQ ID NO: 12312 - DNA, 576 bp, Oryza sativa
  Clone ID: TFbOSC21363j.C1.o1.fg
atggcgaggagcggcggcggcaatggtgggggagaaggtggcggcggcggcggcaatggcggtggcgggggagggttgaagaaggggccgtggacgcaggcggaggacaagctgctggtggaccacgtgcggcggcacggcgaggggaactggaacgccgtgcggcgggagaccgggctgcagcgctgcggcaagagctgccgcctccggtgggccaaccacctccgccccgacctccgcaaggggcccttctcccccgacgaggagcgcctcatcctccgcctccatggcctcctcggcaacaagtgggctcgcatctcctcctacctgcatgggaggacggacaacgagatcaagaactactggaacacgcggctcaagcggcgggtgcgcgccggcttgacgccgtacccgccggagatcgagagggagatcgcgcacctccgcgcgcagaatctcaacctgtccgccgaaggcggcggcggcggccagataatatatctcgtttggtgtgcgtttggtggagcggttggggggtgtgggggcgtaggtgttctgggcttttttggggggtga

SEQ ID NO: 12313 - DNA, 1119 bp, Oryza sativa
  Clone ID: TFbOSC401140j.C1.o32.fg
atggggcgggtgccgtgctgcgagaaggacaacgtgaagcgcgggcagtggacgcccgaggaggacaacaagctgctctcctacatcacccagtacggcacccgcaactggcgcctcatccccaagaacgccgggttgcagcggtgcgggaagagctgccggctgcggtggaccaactacctccggcccgacctcaagcacggcgagttcaccgacgccgaggagcagaccatcatcaagctccactccgtcgtcggcaacaggtggtcggtgatcgcggcgcagcttccggggcggacggacaacgacgtgaagaaccactggaacacgaagctgaagaagaagctgtccgggatgggcatcgaccccgtcacgcacaagtccttctcgcacctcatggccgagatcgccaccacgctggcgccgccgcaggtggcgcacctcgccgaggccgcgctggggtgcttcaaggacgagatgctccacctcctcaccaagaagcgcccctccgacttcccctcgcccgccgtgcacgacggcgccggcgccggcgccagcgcgtccgcgctcgccgcgccctgtttccccgccgcgccgccgcaccacccgcaggccgacgacaccatcgagcgcatcaagctcggcctgtcccgcgccatcatgagcgatccctccaccgcctccgccgccgccgccgccgccgcgccctccgcccccgcggaggacaagccgtggccgcccggcgacatgtccgaggggctcgccgggatgtacgccacgtacaacccggcggcgcacgcgcacgcgcaggcccaggccgagttccggtacgacggggcctccgcggcgcagggctacgtcctcggcggcgacggcgaccagggcacgtcgatgtggagccaccagagcctgtacagcgggagctccggcaccgaggaggccaggcgggagttgccggagaagggcaacgacagcgtcggcagcagcggcggcgacgacgacgccgcggacgacggcaaggacagcgggaagggggcagcctccgacatgtcgggcctgttcgcctccgactgcgtgctctgggacttgcccgacgagctcacgaatcacatggtgtag

SEQ ID NO: 12314 - DNA, 2727 bp, Oryza sativa
  Clone ID: TFbOSC422196j.C1.o25.fg
atggagcccaatcccccgccgccgcccgccgccgccaccgcaacctaccgccgccgcggcaagcccaagcccaaacccaagcgcaaggcagccaagcccccctcgccgtccccgccgcccaagcgccaggcccgggacgaccccccgcacacggggccactcacccgccactcgccgctcaaccctgcgccggaggatgcaccgccccagctccacgccggggagcgcgacccgcctccgcgcgcctggatagagcccgcaaagcttccgccggtgagcgaggaagtccaggccgtcctgtcgcgcggagccggcgtccacgtcgtcccctccttcgcaggatggttttcatggaaggaaatccaccaaattgaaaagcaagcattgccttcgttttttgatgggatatctttacggaggacacctgagatatatttgggaattagaaattttattatgaagaaatttcattctaatcctcaaatgcatttggagttgaaggatttgtctgagttgtcagatggggagatggatgctcagttgaaagtcttggagttcttgtcacactggggtttgatcaatttccacccttttccaccagctgtacagggggtgagtgagctggttgagagcataacaaatgctgatacagaagagaaaatttctgtagtggataaattatttcagtttgaaacattgcagtcatatctcattcctgctcctaaccaagcagaggtgacagctccgattcacaccccgagcttgctttctgagcctactctaactgaagattcgattacccaagctgagtcttctgttgagtaccactgcaactcttgctcagttgattgctcaaggaagcgctaccattgcagaactcaggcagactttgacttgtgttgtgactgttatgacaaaggaaatttggatgcaggcatgtcacaaactgatttcatcattatggaatctgcagaaattccaggctttggtggtactagctggactgaccaggagaccttgcttcttttggaagctttagaaattttccaagcaaaatggggtgacattgccgagcatgttgctacaaaaagcaaagcacaatgcatgctacacttccttaaaatgccaattatggacccatttctgcatgatggagatgttaatgaaatatctcaggaaactgcagagcaggtctcagcagaacaaggtacttctcgtgtaactgagaaaatggaagtagaagacaaaacaaaagaaataaaaactaatgatagaaaaactgctgcaaaaccaaaattgaacttgacagaaacagaagtaaacctagacgacaatgttgttgcaaataatgataccaagagttcaggtgatatcaatgtggatgtatgtagcaatactggtgtatcaaatagatcttcagataccgaacctacaaagaaggaaacttctggggaaaacacatcaaacattgttaatgatgtcctgaaatatgcttttgaggctgttggtcacattccaaagatagagggcttgggttcatttactgaagcaggaaatcctgtcatggcactggtggcatttctatctggccttgtggatcatgacgatgttactacgttgtgctgtagttcactgaaagctatatctgatatgtctcctgctcttcaactggcaacaatgcattgttttattcttcaggatccaccaaatgacctcaaagatccaccgaatagagttgctattgcaaatctcactgattgggaaattggaacttgtagctttgcaaacacagattgtgggcaacaaaaagacaaggatgctacttcaaatccaagtgttactgacaatgatgacaatttaaaagaagagtctgctttatctgtggaagagccaaataccacatccacatcatcgaaaaacaccaggaaattatctaatgcgaaggaatctaaggatgaatctccccaagtggagcccaaacccagtagtgccaacgattgtgacaatccaatttctcaggtggcaaagagggcttctgataatataagaggacacagttccactgtgcttcctgtcagtctgaataatacaaatgaaccttgttccatatcttcccaagaggctagtgcaggaaacacaaaggatacaagtcatacagaacacatagaaggagataaaccaatttatgaggatccaccattagaaggaaaggtagagttgaacaagatcgaacatgaagtcactgacttatctgctgtacagcaacatgagtccatccaaacaagtttgaagaagggctacatacaagatcataacagtattaagaaaacagttgccgatgatgtctccgtacaaaggctacagcgggcagcagccagtgctatttcagcagctgctgtgaagtcgaaactccttgcaaagcatgaggaatatcaaatccagcgactagctgcacttgtgattgataaacagctccacaagatgcaagcgaaaatgtcagttttcactgaagcagataatttggtcctgcgagcgagagaacacaccgagagaactcggaagaagcttctgatggagaggagcgcgataatcgcttctcggatggcggcattgccacccagaccaaaccaccaacctgggatgcctgggagcagattgccggtaggaactatttttttcacagtggttctggttagattaggtaaaaataaatacggggcaaactaa

SEQ ID NO: 12315 - DNA, 828 bp, Oryza sativa
  Clone ID: TFbOSC401367j.C1.o92.fg
atggagaaagaggtaccaaaaaatttattgcgaatttccgtagcttctagtacccaagataccgagaggtatcatacgattttctaccacgtatcgcgtgatactcgcaaggtatcatatgatttcaaccacgtatcgcgtgatactcacgaggtatcatgcgatacctgccgtgtatcagacgatttctaccacgtatcacgtgatactcgcaaggtatcagacgatttctaccatgtatcacgtgatacttgcgaggtatcggatgatacctaccaggtggcggcgaccccgtcgagcgcgatgaggatcatcctccgcattaggctctcgccggcgtggacgcccgaagaggacgcgtgcctggagcgcctcgccagggggtacggcttccgccactggcgccgcgtcgccgaggagatgcagccgagggagcggcgccgctcgcccaagcagtgccgcgacaggtggcgggaccacctcgcccgcgacgtctaccaccgccccttcaccgccgacgacgacgccgagctcgcccacctccgcctccgcggcggcggcggcgaccggtggaaggacatcagcagggccgcccactgccgcacctcgcgcgccatgaggcgccggtggagggagctccgcaagagcgacgcgttcctcagggcgctgtactggcatcccgaccagccggtgccaccgctacttgacgacgcgttgtcgtgcagcgacgtcctcgactccagcgtggcctcctaccgtggtggctgcgacgccgtggccggcggcggcacgatcgttgcaccagggttcgcctgcttcgccgcatag

SEQ ID NO: 12316 - DNA, 1110 bp, Oryza sativa
  Clone ID: TFbOSC900052j.C1.o4.fg
atgccgtgcacgtcggcggcgtggatgttgcacgtgggtggtgcggcggcggagcaggcgtcgtcgtcgtcgtcgtccaagggaggggggagggtggtgacggcggggacgacgacgatggacacgggcgggtacaataatggaggtggtggtgggggtgggggtggcaatggcggcggcggcggcgaccaccaggagagcagcagcagcggcggcggcggcgggcagtcatccaggctcgcggcgcgcggccactggcgccccgccgaggacgccaagctccgcgagctcgtcgcgctctacggcccccagaactggaacctcatcgccgacaagctcgacggcagatccgggaagagctgcaggctgaggtggttcaaccagctggacccgaggatcagcaagaggccgttcagcgacgaggaggaggagaggctgatggcggcgcacaggttctacggcaacaagtgggcgatgatcgcgcgcctcttccccggccggaccgacaacgccgtcaagaaccactggcacgtcatcatggcgcgcaagtacagggagcagtccaccgcctaccgacgccgcaagctcaaccaggccgtccagcgcaagctcgacgccaccaccgcctccgacgtcgtcgtcgcccaccaccacccctacgccgccgcccacgacccctacgccttcaccttccgccactactgcttcccttttccggccgcctcccccgccgccgccgacgagccgcccttcacctgcttgttccccgggacggcggcgacggccgggcgcggcggcggcggtggcatgacatggccggacgccatggccgctggcgaggtcatcgacgacggcgccggcggcggccggtacgtcgtggccgagccgccgccgccgttcctggtgccggcggcgccgcacgggtggctcggaggccacgagatgatggtgatggtgaacgacggcggcgacgtcgccgccggcgtggcgtcgtcgtacgacgggatgataggcagggatcagggcggcggcggctcacacttcgaggcggctgcggcggcagcggcggcgccggcattcatagacttcctcggggttggcgccacatga

SEQ ID NO: 12317 - DNA, 981 bp, Oryza sativa
  Clone ID: TFbOSC406972j.C1.o10.fg
atggggaggcagccgtgctgcgacaagctgggggtgaagagggggccgtggacggcggaggaggacaagaagctgatgagcttcatcctgaccaacggccattgctgctggcgcgccgtgccgaagctcgccgggctgctccgctgcggcaagagctgccgcctccggtggacaaactacctccgccccgacctcaagcgcggcctcctcaccgacgccgaggagcagctcgtcatcgacctccacgccaagctcggcaacagagcgctggctcccactagcttgatttctgtggctaagagaaccctacacgttgattcagaaatagaaagcatcctcttaggtccagttgcctcattggaaaatggaagaaagctttttaaaaaatggtccaagattgctgccaagctaccgggcaggacggacaacgagatcaagaaccactggaacacgcacatcaagaagaagctcatcaagatgggcatcgacccggtgacgcacgagcccctcgaccggaagcaggagagcccggccaccacctcgcagtccaccgtcacggcggagtcgtccaagtccggcgaggcgaccaggcagcaaagccggcagcttgacgacgccgtcgtcagggacatgtccgtgtctgccggtggcgacagcccgccggagtcgagcactaacaccgccagcaccgccggtggcagtagcagcagcagcagtagccatcaccaggaccctctggtgaagtggctgctggaagaggacctgctgcccaccggtgacgagccatggctcaatttcacggccagcaacgacgtcgacgagttcagtagcatcgccgccaccggcgccacgccggcgctgccgtgggacgtcggcatgacgacggactggctgctcgactaccaagattttgggatgggagactcgagcttggtggtcgatgcctccatggtcaacagctcaaatgggtccaacttctag

SEQ ID NO: 12318 - DNA, 1089 bp, Oryza sativa
  Clone ID: TFbOSC400903j.C1.o93.fg
atgctgctctctcattgttttgcagtagcattcgctctctctgcgctgctcgccggcctcgccctcgccatggacgacgcaacgttcggcatggagtggacggcggcggagctgggtgaggcgaggtcggtcatcgctagggtcagcaacgcctacgactccggcgccggcagcagcaacagtgccggcgacaccaagcacgaccgcattatgagggagctccaggcgaggttcccgtcgaggaccatggtccaggtaatcgacttgtaccttaatctcacggcggagacagcagcgcaggcgggggcggcccagccgcaggacgccggcggcgccggcgacgccgccgtcgtccaccctacctttggcctcgcgaacgacaacttcggcatgcccgttgcgaacaacaacgacgacggcgtcgacgccggcatggtgtttggtggagctcctatggaggagggggcggtggcggtgaacggtggggacggtgaggtggtgaacccggacaatgctgatgacgatgtgctttggaccgattatgagcacaggctgttcctgactgggatgcgtgtgtacgggcgtggcgactggagaaacatcgcgaggtacttcgtcggaagcaagacgccggagcaggtctccatgtacgccgataactacttccacatgatggagatcgccgcggccatggaagccgacggcgacgacgatgacgaccaccatgaaaacaataacaacaacttgggcggcgggcagctgcacgccgtcgtcggcgccgtcgagcaccatgaaaattacaacaacaacaacttaggcggcgggcagctgaacgccggcctcggcgccgtcgggcacggccccggtgccgggcacattgctccggcgacctcctccaacaacaacgtcgccgccgccgccgcgaacaacaacgtcgacgcaccgttctgggttccgctgctgtacaacctcgagatagagcagcgcatgatggagatgcaggcgcagtcgcagaaggcctgggatgatcagcagatgaagatggctgaagctgcaactgatccaaaggagggagcagctgataagtga

SEQ ID NO: 12319 - DNA, 1017 bp, Oryza sativa
  Clone ID: TFbOSC400397j.C1.o62.fg
atggctcacgagatgatgggtggcttcttcggccatccgccgccgccgcctgcgacggcggcggtgggtgaggaggaggacgaggtggtggaggagacggaggagggtggccatggcggaggagttcaggggaagctttgcgcgaggggacactggcggccggcggaggacgccaagctcaaggacctcgtcgcgcagtacggcccccagaactggaacctcatcgccgagaagctcgacggcagatcagggaagagctgcaggctgaggtggttcaaccagctggacccgaggattaaccggagggcgttcacggaggaggaggaggagcggctcatggcggcgcaccgggcgtacggcaacaagtgggcgctcatcgcccgcctcttccccggccgcaccgacaacgccgtcaagaaccactggcacgtcctcatggcgcgccgccaccgcgagcagtccggcgccttccgccgccgcaagccttcctcctcctccgcctcccccgcccccgcccccgcgccgccgccgccgccgcagcccgtcgtcgcgctccaccaccaccaccaccggtactcgcagcagtacagcgggtacagcggcgccgccgagtccgacgagtcggcctccacctgcaccaccgacctctccctcagctccggcagcgccgcggccgccgccgccgccgccgcggcggcgaacatcccctgctgcttctaccagagcacgccgcgcgcctcttcctcttccaccgccgcgtgccgcgcgcctcgcgtcgcggcggcggctgacacggtggcgttcttccccggtgcaggctacgacttcgccgccgccccgcacgccatggctcccgcggcggcgtccacgttcgcgccgagcgcgcgctccgccttctccgccccggcgggccgcggcgagccccccggcgccgtcgaccagcgcggcggcgcccaagccaccaccgacagccacaccatccccttcttcgacttcctcggcgtcggcgcgacatga

SEQ ID NO: 12320 - DNA, 909 bp, Oryza sativa
  Clone ID: TFbOSC400045j.C1.o27.fg
atgggacggcacgcgtgctctgccgccggtgtccagcagaagctgcgcaaggggctctggtctcccgaggaagacgagaagctctacaatcacatctaccgctacggcgtcggttgctggagctccgttcccaagctcgcaggtcggctccagaggtgcggcaagagctgcaggctgcggtggatcaactacctgcgccccgacctgaagcggggcagcttctcgcagcaggaggaggacgccatcgtcggcctgcatgagatcctaggcaacaggtggtcgcaaatcgcgtcgcacttgccggggaggacggacaacgagatcaagaacttctggaacagctgcctcaagaagaagctgaggcagcgcggcatcgaccccagcacccaccagcccatctccacggctgctgctgctgcggcggcggcattggacacgtcgacgcaggaccagaagccgccggccaccgccgacggcttcgccctgaagcagcagcagcaggtgttcgacccgttcccggtgatcgacagcttcggcagcgggttcgacgccacgggcatgccattgtacggccacctcggcggcaaggacgcggccgggttcgtggactacagcagcgtgcttgacgtgtcggagaacctgggctacggcgagagctccagcaacagcagcaactggaactgcggcgtgggcgcgccggaggtgaacaatgcgctcgagagcgagccgctgcattgggccaccgagagcaaggtcgagcctttcgtgggctacggcgagggggacgccatggagcacaagttcgggctgccctgccatgggcagcaagagcagggcatgacacatttcgacttcgacgtcagccggagcatggtggtcggcgacttcaacttcgagtacttccgatga

SEQ ID NO: 12321 - DNA, 1062 bp, Oryza sativa
  Clone ID: TFbOSC401533j.C1.o20.fg
atggggagggcgccgtgctgcgagaaggtggggttgaggagggggaggtggacgaaggaggaggacgagaagctggcgaggtacatacgggagaacggggaaggggcgtggaggtcgatgcccaagaatgccggcctgctgcgctgcggcaagagctgcaggcttcggtggatcaactacctccgggccgacctcaagagggggaacatctcgccccaggaggaggacatcatcctcaacctccacgccacactcggcaacaggagaatggagatgcataccgagatgctgtcagcgacaggctttaatttagcgcagagaaaatttcccatgctgctgacagatgacacggatggcggactctcatgcctgtggtccctgatcgccggccacttgcccgggcggacggacaatgagatcaagaactactggaactcgcacctgagccggaagggatacgagttcctccgcggcggcggcggcggcgccgtcgtcgacgtcgacctcagcaagttgcccggcggcgggaagcggcgcggcggccggacgggccgcagcagcagcgggaaggagaagacgaggacgaaggagaaggacaaggcccccgctccagaagctgcgcacaatgacgacggcggcggcggcggcggcggcggcattgacaacgtctcggcagctagccacagccacagggaggagcaggcacaggcgagcgccagtggtctcacatcagatgggctcgaggagggcccactgggcctaagcgaggagatggtgagtgggcccgtgggaccggtgagcccaaagcctgaggtgggccaggatgggtcttctgcagagagtggctgctgtgggcctagtggatccagtggcccaaccgaggctgtgggccaggacatgggcgacaagtccatggactgggacctggtgggcctggacgatggcttcgccaacgatgacatgtggggctcactctcctgggactacggggagttggtgggcccggatggagttcatcagggcgaggtgctatccgacttgttcttcttgggcaacctgtag

SEQ ID NO: 12322 - DNA, 1203 bp, Oryza sativa
  Clone ID: TFbOSC401612j.C1.o9.fg
atggggcaccactgctgcagcaagcagaaggtgaagcgagggctgtggtcgccggaggaggacgagaagctcgtccggtacatctccgagcacggccacagctgctggagctccgtccccaagcacgccgggttgcagcggtgcggcaagagctgccggctccggtggatcaactacctccggcccgacctcaagcgcggcaccttctccgagcaggaggagcgcaccatcatcgacgtccaccgcatcctcggcaaccggtgggcgcagatcgccaagcacctgccagggcgcacggacaacgaggtgaagaatttctggaactcgtgcatcaagaagaagctcatcgcgcaggggctcgaccccaagacgcacaacctcctgccggcgtcgaagacgctcctccatggcggtggcggtggcggcgctgcaaaccctagcggcaacggcctcgcgcagttccagtctaacaacggcgcggcggcggcgggcaccacgccgttcaccatcagctctccggccaaggcggccgcctacgatgtcgcgccgccggcgttgtacgacgtcgtcctccctgctaaccccgccggtggaatgctgatggcgcatgatcaccaccatcatcaccaggtcgccgcggcggcggcgccggtgggatacccctacgccgaccacggcggcaacggcggaggcgtgctgatgagcttcagggatcagaacgccggcgtccacggcgccgcctccatggacttcatgaacggctcctcctcgtcctcttccatggagcagctcggcggcggcggcggcatgtcgtcgaacggcaacggcagcttcagcgcgagcatggcggcgttcatggacgaggaggcggcaatgtgggccaccgccgtcgcgccgccgggcatgggcggcctcgccgggatggatcaggtggcgcagcagcagcagcagcagcaagtgctggtgcaggatgcggccgtgggcgttgcgccgacgacgctgatgatgcacggcggcggcgccgccaccgccggtgcaatggtggtggacaagagcgtggagatggtggacgtctcgtcggcggtgtacggcggcgcgacggcgacggcgttcgatctagacctgatggtggagtcgtgcgggatgttctgcggcggcggcggcgccggcaacgccatggagcagctgcagtgggactgctaa

SEQ ID NO: 12323 - DNA, 732 bp, Oryza sativa
  Clone ID: TFbOSC412577j.C1.o19.fg
atggggaggtcgccgtgctgcgagaaggagcacactaacaagggcgcgtggaccaaggaggaggacgagcgcctcgtcgcctacatccgcgcccacggcgagggctgctggcgctcgctccccaaggccgccggcctcctccgctgcggcaagagctgccgcctccgctggatcaactacctccgccccgacctcaagcgcggcaacttcaccgccgacgaggacgacctcatcatcaagctccacagcctcctcggcaacaagtggtctctgatcgcggcgaggctgccggggaggacggacaacgagatcaagaactactggaacacgcacatccgccggaagcttctcggcagggggatcgaccccgtcacgcaccgccccgtcaacgccgccgccgccaccatctccttccatccccagccgccgccaacgacgaaggaggagcagctcatactcagcaagccgcccaagtgccccgacctcaacctggacctctgcatcagcccgccgtcgtgccaggaagaagacgatgactatgaggcgaagccggcgatgatcgtgagggcgccggagctgcagcgccgccgcggcggcctctgcttcggctgcagcctcggcctccagaaggagtgcaagtgcagcggcggcggcgccggcgccggcgccggcaacaacttcctcggcctcagggctggcatgctcgacttcagaagcctccccatgaaatga

SEQ ID NO: 12324 - DNA, 1659 bp, Oryza sativa
  Clone ID: TFbOSC101345j.C1.o12.fg
atggaggaggaggaggaggcggcgaggctggcgggctcgcagggggagtcgccggcgatgctgcacccgaacggagacggagacggcgacggcggcgatgatgagggtgacgccagcggcggcgaagaggagcagggcggtgtggctagggcgggggttcgtcgccgcggcggcggcggccgtgtgcgcgtgcgtggcaggattccgctgaagaaggggccgtggacgcccgacgaggacaagcggctgcgggagtacgtggaggcgcacggcgaggggaactggaaccgggtgcagaggaacgcggggctgaaccgctgcggcaagagctgccgcctccgctgggcgaaccacctcaagcccgacctcaagaaggggcccttcagcaaggaagaggaggagatgatcatcaagctccatttatggctggggaacaagtgggctaagatggcaaactctacacatttgacatgctgcactcttgtaaatggccttgttaaaaggagtagacaaatgctttgccattattccttgtttgcagagaataacaaaaaacgatactgtcatcaggaaaagctgacatctaggccacaggataagttgccaggccgcacagataatgaaatcaagaacttctggaacactagatgtaagagaattcagagaactggtgaacctctatatccgaaggagtttaatcattttaagttgacagatctggaagtgatgaactgtgaaagccctgatgaatcacgtgccaagaaacgaacaaatgaggttttacagggaaatggtcaaagttacaaagaggtttttttcgataatttagactatagtagaccagaaaattatattcggccaaattgtgtgactccaaattctcttccagttgatgccacaagtccatttggtagtgccattgccacacaagatcagtcagtaccttttggtagtgccattgtcagtggacatccaattcttgatggcaacttctctacttctgggaccatacagaggcccatgaatgtagagctcccttcactccaatatcccaactatgactttaacaataataatgcatggtcatatcacgaccccttaggacatcctattgaccaggttgactttggctccctgagatcagaatatctctctccaaacaacaatggtctgctggatgcattggttcatggaggacatggacaaggggaacttgcaaattcccaaggatcttttgatgcttgttttcctcgtgttcaatgcaatcaagtgattcaatcgaatgctttctctctgagttcttcctttccaatcattggtgatgatctcctcgagaacagttgtcatgcttttgttggcatcaacaataatgcaagcagcctattccttgacagccaacctccacccttggtggaccctactttctggaggcacgatgtatcactagaaccgaatttgccagtttattgccagtttaacgaagaattgccgccctcaaatgagcagtttgccaaagatgcagatgacgctttcggtcatgggggtctttctgatgagaccaatctagctgctgcaggtcaaggcgatgaacatgaccttgaggacccctgggcgagcatgcccggtgcctgtgacatacctgattttccaagtgaatga

SEQ ID NO: 12325 - DNA, 1038 bp, Oryza sativa
  Clone ID: TFbOSC401316j.C1.o15.fg
atggggcgatcgccgtgctgcgagaaggaggggctcaagaaggggccatggacgccggaggaggaccagaagctgctggcctacatcgagcagcacggccacggctgctggcgctcgctaccctccaaggccgggctgcagcggtgcggcaagagctgccgactccggtggacgaactacctccggccggacatcaagaggggcaagttcagcctgcaggaggagcagaccatcatccagctccacgcccttctcggcaacaggtggtcggcgatcgcgacgcacctgccgaagcgcacggacaacgagatcaagaactactggaacacgcacctaaagaagcggctggccaagatggggatcgacccggtcacgcacaagccgcgctccgacgtggccggcgcgggcggcggcggcggaggtgcggccggcggcgcggcgggcgcgcagcacgccaaggccgcggcgcacctcagccacacggcgcagtgggagagcgcgcggctcgaggcggaggcgcgcttggctcgggaggccaagctgcgcgcgctcgcggcctccgcgaccccgggcgcgccgcacctcccggcaccccccgcgtcggcggcggcggcggcggcggctcacggcctcgactcgccgacgtccacgctgagcttctcggagagcgcggtgctcgccaccgtgctggaggcgcacggcgccgccgccgcggcggccgcgcgcgccgccatgcagcccatgcaggcgtacgacgaggcgtgcaaggaccagcactggggcgacgtcgacgccgccgacgtgggcttccccggcgccggagcggggttcacgggcctactcctcgaaggctccttgaaccagatcccgaggccggcggggagagacgcggaagccgacggcgagttccaggagaccgaggaggagaagaactactggaacagcatactgaacctggtgaactcctcgtcggcacctatgtcgacggccgtggttgtgcccgcctcccacgcgtactcgccggcgccggacttctga

SEQ ID NO: 12326 - DNA, 966 bp, Oryza sativa
  Clone ID: TFbOSC400903j.C1.o83.fg
atgggttcaatagtcattgaggggtggacggcatctgagatagaggaggctaggtcactgatcactagccccaacaacggtggcgaaggtggtgatggagaggggaacaagcagaagcattgcggacacatcgtgatggaactccatgaatggttcccttggaagaccataggccaggtaataggtttgtatatgaagctcaatgcggggaaacccatggttatgcatagcttgaataagagtgatgccaacaatagcatcggtgaggttgatcatgtgagtgccctcgcaaacggtaaccctgtgaggctagaggaacatcgacccatgttgaacaatgtgggcttagtgtttgattatccattggaagagatggagatggaaaatcaaacagatcaagagccgaagatggttgtagaggaggaggtgcagcctaaggagggattagtgatcaaggagaaagaggcgggggtgtcaaagattcacactaatagtcaacatgtgacgccatcaataaaaagaagggtgatttggacagaggaagaacacaggctgttcatggtggggctgcgcgtgttcgggcgcggcgactggaagaacatctccaagcaccttgtcaccaccaggacggcggcgcaggtctccagccacgcgcagaagttcttcctcaagatggaggcccgcggcgaggccgtccccccgccggccaagaggcgccgccgccgcatcaccggcgaccagcaggcggcggccgccgagcacgctgccgccctcaggcgccgcatgccagtgccaccgcctccgttcaaccccttcctcctgcccagcctcgtcgcgccggtgatgcaccgcctcctcccacctgggagccaggctgccggcgccgccgcctccggcagcggcggccagggagcttctcttcctcagatgccatggatcaacggcgccaatggcatggggcgctag

SEQ ID NO: 12327 - DNA, 864 bp, Oryza sativa
  Clone ID: TFbOSC900188j.C1.o10.fg
atggctaggaagtgctctagctgtgggaacaatggccacaactccaggacttgcagtggccaaagagttcttgatcacagcatcagcagcagcaacagtggtagtactactgctgctgctgctactgcctgtggtggcttgaggttgtttggggtgcagctgcaggtaggaggaggctcatctcctctgaagaagtgcctcagcatggagtgcttggcatcaccagcatactatggagcttctgcctcgccgtcggtttcgtcgtcgtcatcttcgcttgtttcgattgaggagaacactgagagggtctccaatgggtacctctctgatgggctcatgggaagggttcaggagaggaagaaaggagttccatggactgaggaagaacaccagatgttcctcgccggccttgacaagctcggaaaaggcgactggcggggcatttctcggcacttcgtcactacccggactccaacgcaggtcgccagccatgcccagaagtacttcctgaggcagaacagtatgacacagaagaagaggaggtccagcctctttgatgtggttgaaggtatcaagagggcagcagcaatgcccatttcaggatctgcatctgaactgcagatccccggcatgtcgatcggtgtcggcgtggtgaaggaggaggttgtcctgcctccatgtctgaacctgatgagtaacagttcatcagcatcacagcactcaccttccctgacattgctggcaaatcctcaggtgcagctccagatgcctgacctggagctaaagatgtccacatcccggttatctgaccaatccggtccgtcgccgagcacgcctttcttcgggaccatcagagttacctga

SEQ ID NO: 12328 - DNA, 1344 bp, Oryza sativa
  Clone ID: TFbOSC100940j.C1.o9.fg
atgtccgcgtctgcatccgctgtctgtctccttcctccccgaggaggaagcctggcccgacccgacaccgcactccccccagccagccagccagccactgtcgcggtgaaccaaaatatcccccgcctcgcctcgcctcgcctcgcggtaacatccatcacactcctcccccgccgcggccgccgctgcgcggtagatctcctcctcctccacctccaccgtctcctgctcttcctctctctcttctcggaggaaacccccaatttattccttccccgcaaacccgcagccttcctaaaacgaattaaatctccctcccttatccgccgctgcaatccctccccacaaaatctcgctgcgccgcgcgctgttttagggtttgagctcatggcggtggaggaggcgagcagcagcagtggcggcggtcgtggtgggggtggcggtgggggtggggaggaggggttgtccggttgcggcggtgggtggacgcgcgagcgggagaaggcgttcgagaacgcgctggcgacggtgggggatgacgaggaggaaggggacgggttgtgggagaagctagcggaggccgtggaggggaagacggccgacgaggtgaggcggcactacgagctgctggtggaggacgtcgacggcatcgaggccgggcgggtgccgctcctggtgtacgccggcgacgggggcgtcgaggagggctctgcgggaggtgggaagaaggggggtggtgggggaggaggtggaggtggaggggggcatggggagaaggggtcggctaagtcctctgagcaggagcgccggaaggggatcgcctggacggaggacgagcacaggctgttccttcttggacttgagaagtacggcaaaggcgactggaggagtatctcaagaaactttgtgatctcaaggacacccacccaagtagctagtcatgcacagaagtattttattcgcctgaactcaatgaacagagagaggcggcgatcaagtatacatgacataaccagcgtgaacaatggagatacatctgctgctcaggggccaatcacaggtcagccaaatggcccatcagcaaatcctggaaaatcctctaagcagtctctacagccagcaaatgcgcctccaggcgtcgatgcttatggtacgacaattggacagccagttggtggtcctcttgtgtccgcagttggcactcctgttacacttcctgttcctgctgcacctcatatagcctatggcatgcatgcccctgtccctggagctgtagtccctggtgccccagtaaacatgcctccaatgccctaccccatgccgccaccaacatctcatggatga

SEQ ID NO: 12329 - DNA, 957 bp, Oryza sativa
  Clone ID: TFbOSC401134j.C1.o17.fg
atggggagggcgccgtgctgcgacaaggcgagcgtgaagagggggccgtggtcgccggaggaggacgagctgctgcggagctacgtccgcagccacggcaccggtggcaactggatcgcgctcccgcagaaagcagggctgaaccggtgcgggaagagctgtaggctgcggtggctcaactacctccgcccggacatcaagcacggcggctacaccgaccaggaggaccggatcatctgttccctctacaactccatcggaagcaggtggtccatcatcgcgtcgaagctgcccggccggacggacaacgacgtcaagaattactggaataccaagctcaagaagaaggccatggccatgcatcatcatcatcagccgccgccgccgcagcagcaacactaccaccaccaccaccaccaccgtgtcgccggcggtggcgcgcgcgtcacgctcgtgtcgcctccgcccgccccgcagagccaatgcgcgtccatgcagccgtcgccggcgtccgcctcctcgtccggcggcgacgcgtgcagcttcggcgccgccgccatgtactccccctccccgtcaacccagcaggcgccacaggcggcgacgctcgcggtcgcggggtacacctccgtggcgacggcggcggcggcggcggcggtggcggcgcagcgctcgccgctcgacgagctgatctgccaggtgccaccacctcccactactaccgccgccgactgctgggccagcggcgtgaccctcgacgacgtgttcttgcccgagctcgtcggagccggcgagttccccaacggcgacctcttcggcgggttcggcccgctgctccaggacaggtcgtccatggagctctccgcgtgctacttccccaacgccgcggcggcggagatgtggccggcggccacggacatcgtcaagccggccgggctgtgccacagcctgacatga

SEQ ID NO: 12330 - DNA, 2832 bp, Oryza sativa
  Clone ID: TFbOSC400764j.C1.o2.fg
atgacaagcgacaacggaaaggctccagagaagggtggagaagcttctggaccttcatcagctccccaagaaggtgaaatcagcaatgaaccacaaaggcgccggccgctcagtgggaggaccactggtccaacacggcgttccacgaaaggaaattggacccctgaagaggaagatgacatcattgttcagatggtaaacaaacttggaccaaagaaatggtcaaccattgctcaagctttgcctggacgtataggaaagcaatgtcgggaacggtggcacaaccatcttaaccctggcataaacaaggaggcatggacacaagaagaggaaattaccctcatacatgctcatcgaatgtatggaaataaatgggctgagctgacaaaatttttaccaggaaggacggacaatgcaattaaaaatcactggaacagttcagtaaagaagaaagtcgactcatacatgtcatcaggtttacttacccaagtctcgtgtctccctctaaatgaatactctgcacactgtaattcctcacctgcgttgacccaacaaaacagcgaagacagtggtagctatgctgttcgagaggttgaaaattcatcagtgtgtagtcaatcatcacttgccaaggtttcttgctcccaagtgcacaatgctaatgtggcattgggctgtgatttgcaagtaaatgcgaatgttgacaataatgaagcgcatgattctcaatcttctgtgggtcacgaagcatgctatacttctgtgggggctgttgcaactgctatacctgaggtgcactaccacgtttcttcctctaacttcgatccagatcaacacttgcaagaggagtttgctcaaggattgaatttgcatatgagtatggatgaagtgccaagtaattctagttttgcagacaacccaactatctgtagtatagaaaatcatgaaaggtcattggaaccatatgatgtagcaatggagatgcctctctctatgttaccaagtgattctggagctgagcaaaaactacattttatgtcggaggctgacttcaatagtcctaattgtctgaaatctgaactttggcaggatatttccttgcaaagccttctttctggacctgatgcagttgaaactgattctttttcaagatcaaatcatcaatcggatgtatattcctctcaagcagataatgaatttttagcaccaccctacctattacagacatcaaattcttccagtgtgatggaggctacttatggacagagtccacagatgtcagtaccaccatctcttatctgttcaaatgttatgactgatgtaccttctgataatagatcagaaccaaaagaaatgacagtttctcaggcagaaatggtcacacaatcttccagttcttcaggtgacgctgaaatgtctgctaaccctggtagtagtaatggcagtgatattccttcaatgatggaaaggatacctgaatgtgcggaccaacatgttactaatgcggaagaacctgaagccagtatagagaaagaaccatcggttacaccgagtgctacagcagatgaaaagcaggatgagggagccctattctatgaacctcctcgttttccaagcatggatgttccatttgtcagttgcgaccttgtaacttctggtgatctccaagagtatagtccccttggtattcggcagttaatgcggtcgaccatgaatgtctgcactccaatgagattgtggggctcccctacacatgatgaaagccctgacattttgctgaagagtgctgccaaaagcttcatatgcacaccatcaatactaaagaaacgtcacagagacctcgtgtctcctattccggataaaagaatcgagaagaaatctgggactgaaaaggattgtggggtatcagacacatcctccatcggcattcaaacatgttttattaatgccactaaagatgatgctgttataactaaatcagttttgcgtattgagcgatctgcttcttctaaacctctggaaaagaaacttgagttctctgatgagaacaaggaaaatttggacaacacaattgaacaggcaaaagatggacagagtgcaggaaattacaaacacattgacgagcaggcaaggggggaacggcgtactgcaacaaatataactactacttatgatgatctgccaggcaatttacaacctgcaggtattcttattgagcacaacggtgatgatcttgtttccccagattatggtaaaaacaccatgaaacagaagcaaaacacaaatatggaatctttgtcagtctgtaaggagggagtgtctgctaaaaagcctgcggaacttattgtggagaaatcttcagcatgcataaatgtggattatgaatatgtgaacatattggctgataccccaggcatcaaaagaggactagaatctccttcagcatggaagtccccttggtttgtagatatgcaatttcagggttcatacttcgtcagcccagctaatggaagttacgatgcgctaggattggtgaagcagataaatgtgcagactgctgctgctttggcagaagcccgtgaggtgctggcaagtggtggccaatctgagaacataaattctgataaggaaaacctggagaatccagatgccaagaaggaaccaggagcaacaaccaaattgcaagcaaaaatcaagaccgaggggaaaatcctggatttcaacgaatgtgccacacctataagatcatcagataaaaaagctggcagcagtctgggaagatctttgagctcccctattccttcgtcccatctcctgaaaagttttcgatag

SEQ ID NO: 12331 - DNA, 831 bp, Oryza sativa
  Clone ID: TFbOSC401721j.C1.o17.fg
atggtggtggccggcaagaagcagggacggcattctttttctgcatcatcatcgtcgtcttcgtcttcttcttgttcagtagtgcagctgggtcatcatcagcgcccacagggtgaggaccctctcatcggcatcaaagcagcagcagcaggaggaggaggaataatgagaaagggcccgtggacggagcaggaggacgtgcagttggtttggttcgtgcggctgctgggcgaacggcggtgggatttcttagcaaaggtgtcaggtttgcagcgcagcgggaagagctgccgtctccggtgggtgaactacctgcatccagggctgaagcgagggaggatgagccccgaggaggagaggatggtggtgcagctccacgccaagctcggcaacaggtggtctcgcatcgccaagagcattcctggccgcaccgacaacgagatcaagaactactggcgcacccacctgcgcaagctcaagctcaaacagcaaaagcagcagcagtccgacgaccaccacaacgacaacgacgacgacgacgaccgcaactcctcctcctcttcgtcctcctccaacagcaacagcaacctgcagcagcagccgcagccagaggatgagtcgtcggccagtggcagcctgcaggcccaacatcatgaggaccagcaccaactgttccttcatcctctctggaacgacgacatcatcgtcgacgtcgactgctggagcagcagcaccaacgtcgtcgctccgccgccgatgcccgcctcgccgctctgggatatcgatgacgccttcttctgctcggattattcgctacctctctggggatag

SEQ ID NO: 12332 - DNA, 954 bp, Oryza sativa
  Clone ID: TFbOSC401780j.C1.o5.fg
atggggtgcaagtcgtgcgagaagcccaggccgaactaccggaagggcctgtggtcaccggaggaggaccagaagctccgcgactacattctccgccatggccacggctgctggagcgcgctccctgcgaatgccgggctccagaggaacgggaagagctgccggctgcggtggatcaactacctgcggccggggctgaagcacggcgtgttctcgccggaggaggaggagacggtgatgagcctccacgccgcgctcggcaacaagtggtctaggatagcacggcatctacctgggagaacagacaacgaggtgaagaactactggaattcttacctgaagaagcgagtggagagcggcggcggcaagacgagccaagggccaccaaccacgcctgcgtcagccgcgagctctcccgccgattcagacgactcgcacagcctgcagcagaagccgcacgagccggccaactccgactcgtcggagccggcgcacgagtcgtcgtcggcgtcggccgactcgagctgcctgacggtgaccacggaccacccgcccgtctcgaggccccacgcggcagtgacacccaaggtcatgttcgcggactggctcgacatggagtacatctgtgggcaggtcgcggcagcacctggtctggacgctgccggattcgcggtggttggtggtgctgcaggcgatcagcagcagcagcagcagcaggtgatgagccaggacggatcggttcatcaggccgatgggccatcgtgcggcgtggacgattcttccctgcagcagcagcagcaggaggggttcggtggcaacggcggctgctgggattttcaggagcagttcgacagcatcgaccagatgcaggcgagcggcggcggcggcggcttctgcgacctgctctccatgagcgacttcgacctctgggccgagctggaacgtaccgcgtga

SEQ ID NO: 12333 - DNA, 957 bp, Oryza sativa
  Clone ID: TFbOSC422332j.C1.o21.fg
atgacgaggcggtgctcgcactgcagccacaacgggcacaactcgcggacgtgccccaaccgcggggtcaagatcttcggggtgcgcctcaccgatggctccatccgcaagagcgccagcatggggaacctctccctcctctcctccgccgccggatccaccagcggcggcgcctcccccgccgacggccccgacgccgcccccaccgccgccgacggctacgcctccgacgacttcgtccagggctcctcctccgccacccgcgaccgcaagaagggtgttccttggactgaagaagaacaccggaggtttttgcttggattgcaaaagcttggcaaaggtgattggcgaggaatctctcgtaatttcgtggtctcaagaacacctactcaagtagccagtcatgctcagaaatattttatacgccaatccaatatgaccagaaggaaaagaaggtctagcctttttgacatggtgccagatgagtctatggaccttccaccacttcctggaggtcaagaaccagagacccaagtattaaatcaaccagcactacctccaccgagggaggaggaggaggtagattctatggagtcagatacttctgccgttgcagagagctcttccgcttctgctatcatgccagataatttgcagtcgacctatccagtgattgttccagcttatttctcgccctttttgcaattctcggttcctttctggcaaaatcagaaagatgaagatggtcctgtgcaagaaacacatgagattgtcaagcctgttccagttcattcaaagagcccaatcaacgttgatgagcttgttggcatgtcgaagctcagcataggagagtccaatcaagagacagtgtctacttctctttcattaaatctggtaggaggtcaaaatagacaatcagctttccatgcaaatccaccaacaagggcacaggcatga

SEQ ID NO: 12334 - DNA, 522 bp, Oryza sativa
  Clone ID: TFbOSC400259j.C1.o82.fg
atggatttgtacggcgcggcggcgggcgggggaccggtggcgaggcgaccgtggagcaaggtggaggacaaggtgttcgagagcgcgctggtgctgtgcccggaggacgtccccgaccggtgggcgctcgtcgcggcgcagctcccagggcgcacgccgcaggaggccttggagcactaccaggtgctcgtcgccgacatcgatctcatcatgcgcggcgccgtcgacgcccccgggtcctgggacgataacgacggcaacgaccgccgcggcggcggcggcaagccccgcggcgaggagcggcgccgcggcgtaccctggtccgaagacgagcacaggttgtttctcgaggggttggacaggtacgggcggggagactggaggaacatctcgcggttctcggtgaggacgcggacgccgacgcaggtggcgagccacgcgcagaagtacttcatccggcaggccaacgccggcgcccgcgactccaagcgcaagagcatccatgacatcaccaccccttga

SEQ ID NO: 12335 - DNA, 1077 bp, Oryza sativa
  Clone ID: TFbOSC7723j.C1.o1.fg
atggggagggcgccgtgctgcgagaaggttgggctgaagcgcgggaggtggacgacggaggaggacgagaagctcgccggctacattgccaagcacggcgagggatcctggcgctcgctgcccaagaatgcagggctgttgcggtgcggaaagagctgcaggctgcggtggatcaactacctgagagccggcgtgaagcgggggaacatctccaatcaggaagaggacgtcatcatcaagctccacgctaccctcgggaacagaaagtcttacgttgtgaaacggatggactacgtgtgtttgggcgcacgtgactactgcttccaacaaaacacacacgtacggtggtccctgatcgcgagccacctcccggggaggacggacaacgagatcaagaactactggaactcgcacctgagcaggcagatccacacgtaccggaggacgtacaccgcccccagcgaggccgccgtgaccatcgacgtgaccaagctccaggccgccgggaagcgccgcggcggccggaccgccgggcagtcgcggaagggcgacaagaagcgcgcggaggacgacccgcccaaggagaccgccgccgccgacacgccgttgccggagtcgagcccgcggcgcgcgcagagcgacgaggcgcggagcggcagcgtggtggtcgacccggaggagccgagcagccagcccaacaacggcagcagcggcggcggcggcggcacgccggacgggccgtgcagcgaggagacagccactgggccgacgtcgctggacccgatggagatgggcctctgggaggttgagagcgagttcgccgagatggaggcccttctgtgcggcggtgtggcgcccgacggccccgggataccggggctcgagccgctggacgtcgcggcccaggcggacgacctgctcgacatggactgggacggcttcgcggccgacctgtggggcgatccggcccagaggggcggccttgtccaagacgcgggcgagccaaacggctcgatgggctgcagctcggacgagctcgagtcgttcgcgagctggctcctctcggactcctgctga

SEQ ID NO: 12336 - DNA, 822 bp, Oryza sativa
  Clone ID: TFbOSC400524j.C1.o32.fg
atggggtgcaaggcgtgccagaagcccaaggtgcactaccggaagggcctgtggtcgccggaggaggaccagaagctccgcgacttcatcctccgctacggccacggctgctggagcgccgtccccgtgaaggccgggctgcagcgtaacggcaagagttgcaggctgagatggatcaattacctgaggccggggctgaagcacggcatgttttcccgagaggaagaagaaaccgtcatgaacctgcacgctacaatgggcaacaagtggtcacagatagcgcggcatctgcctggccggacggacaacgaggtgaagaactactggaactcgtacctcaagaagcgagtcgaaggcgcggaggctgcggccagaaaatccgccgagccggccgacgtcgtcaccggcagcccgaaccgcagcgagaccggccaagaacgcgtcgccgctgaccggccggcgagctccgagtcttccgggccggtcgagtcgtcgtcggccgacgactcgagcagcctcaccgagcccgcggcggggctcgccgccgtccggccgcacgcgcccgtgatccccaaggtcatgttcgccgactggttcgacatggactacgggactagcctcgccgggacggcgccgggcctgagctaccagggctcgtcgtcggtgcaggtcgacgtcccgtgcggcggcgccgtggactccctgcacgggctgggcgacggcggcttctgctgggacttcgacgacgcggccgatcacatgcagggaggaggagggctctgcgacctgctctccatgagcgagttcctcggcatcaactag

SEQ ID NO: 12337 - DNA, 1893 bp, Oryza sativa
  Clone ID: TFbOSC401196j.C1.o59.fg
atgagctccgcgccgcagcagttgctcgattcgtcgtctccggggccggggccggggccggaggtggaggacgacgggggaaggagggtgaggaagccctacaccatcaccaagtcgcgggagagctggaccgaccccgagcacgacaagttcctcgaggcgctgcagctgtttgatcgtgattggaaaaagattgaagcatatgttggctctaagactgtaatacagttggttgcctttgttactgaatatttcagagttttacaatttttaaatctaccgggcggagatcttattataaaccttggagttcttgcagcccctcaagttgtcctaccacaacaagcttctcatctaatggagcaaggctgtcttatacctatggacatatctcctgttgctagaaactttaatgcaaatgatgtattttcttcctgggatagtgctcttgcccaaagtttcagtccaaggcatacacatggtgcagcaaataattgttctagtagcgtagagagccaatctggaacttgtccaacttctgaggcaattgagcaagagatcatgcttccaacgctgcgtgccatgccagactttgctcaagtatacaacttcctgggaagcatatttgatccagagacaagtgggcatcttcagaggttgagagagatggatccaatcgatgttgaaacatggtggataccagttactacatgtggcttagataatcttgacatagtgctgttactgatgaaaaatttgtcaataaacctgacaaacccaaactttgaagcacataggaagcatatggcgtgtaaaaagttgtcaaagataaaatcttcacgaaacagtgtggtgtgtactctttccttttgcttggaagcaagtacgagcgtatatatttcttccaagaagaagaagaagaagaagaagaagagattgggtgcaatggtgcaaggtgcgagcggcggaggatggtcatcgaaagtggaggagggggtgatcgtgggtgggttgctggtggtgcagtgcatcctcgccggatacgtggtgttcgtggaccatgtcctcagccttggagccaacccgctgtccctcatcgtcctcggcgccgtcgcctcctccctcttcttccttcccttcgccgtcgtcctcgagaggaagaaatggccttccaagatttctcgcactctcatggcgcaattcgtgttcatagctcttggaggaacaacggtgtttcaagaactgatgcttctgggaataaagaagacaacaccagctatcgcatcagccatgccaaacttgagccctggactcatcttcatcattgcggcttgtttcaggttggagaagtttgacaagggatgcaagtacacaagagccaagatactgggaacgttggtgtgcttggtgggagctatggccatgagcttcttgcagagtcccgtttcgtcttctccacaactcacaacaactagttactatgactggatccttggttgcttctaccttttcctggcagtagttgttctctctatctacacggtgctccaggcagcgacgttggtgagcttccctgcgccattgacgatgtgcagcgtaacatcgatgatgggcgccgtcttcaccgcgatcctgcagttcatcgtggacggcaagatcgacatgggctcgccgagaatcgatgaaaccatcatctcaacgatcgtcctgatgaccgtctgttctgccctcctctctgctcttctcttctcccagttgctctgcctcggaagcttggcagggatggtgctcatgttctgtgggctctacatcgtcttgtgggcgaagagcaaggaaggtcatagtattattcatttggaaggtggcgatgttgagaaggctcttttatcctaa

SEQ ID NO: 12338 - DNA, 579 bp, Oryza sativa
  Clone ID: TFbOSC401693j.C1.o18.fg
atggcgacgccaccgctgccgccgccgcctcgggcgaggtgcgtcgtccgcctcaagctgccgccggcgtggacgcccgaggaggacgcgcggctgcagcgcctcgccaaggagaacggcttccgccgctggagccgggtcgctaggagcatgccacgccgctccgccaggtcgtgccgcgacaggtggcgccaccacctcgcccgcgacgtctaccaccgccccttcaccgcccgtgacgacgacgagctccttcgcctccactaccgcctcggcgaccgctggaaggagatcggccgcgccgtctacggccggacctcgcgcatcatgaagcaccgctggagggagctccggcgcagcggcttcccgctagctgccaccgccaggaaggtgcaggcgctcgacatggtggaaagcgaagtggaggagtcagaccagtcgctgccgccgccagagttgcagcgttctttggcggacgctcttgcctcgagcttcggttattgtagccttgccaacgagcacgcgatggatcccctggccggcagcctctcgctagggttcgcgtgcatggcagtttga

SEQ ID NO: 12339 - DNA, 804 bp, Oryza sativa
  Clone ID: TFbOSC27606j.C1.o1.fg
atggcgtcgtcgtcgacgacgaacacgtcggacggcgccgggaagccggcgtcgtcgtcgtcgtcggcgtgcccgagaggccactggcggcccggggaagacgagaagctccggcagctggtggagaagtacggccctcagaactggaactccatcgccgagaagctggagggcagatcagggaagagctgtcgtctccggtggttcaaccagctggacccgcggatcaacaagcggcccttcacggaggaggaggaggagcggctgctggcggcgcaccgccaccacggcaacaagtgggccctcatcgcccgccacttccccggccgcaccgacaacgccgtcaagaaccactggcacgtcgtccgcgcccgccgctcccgcgagcgctcccgcctcctcgcccgcgccgccgccgccgccgcccacccgccgccgttctcctcctacgccagccagctcgacttcagcggcggcggtgcgtcatcaggcgcgcgcaatagctcgctatgcttcggcttcggcatgatcaacaggtcgtcgtcgtcttcttcttctccggcggcggcgccgttcttgatcaagtcgtttaacggtacgagctatggtacgctgctgccggcgacgacgtccatggcggcggcggcgcagcctgtgtccaccatcaccttctcctccactcccatgagagagacgctggaactgatggatgccggcggccatgagaaccacggcgacgtcgacggcggcggcgacaagcggaagggcgtgccgtacttcgacttcctcggcgtcggcgtgtag

SEQ ID NO: 12340 - DNA, 963 bp, Oryza sativa
  Clone ID: TFbOSC402119j.C1.o10.np
atggggaggaagccgtgctgctccaaggaggggctgaacaggggggcatggacggcaatggaggacgacatcctggtgtcctacatcgccaagcacggggagggcaaatggggagccctccccaagagagccgggctgaagcggtgcgggaagagctgccggctgcggtggctcaactacctgcggccggggatcaagaggggcaacatctccggcgacgaggaggagctcatcctcaggctccacactctcctcggcaacagatggtcgctgatagccgggaggctgccggggcgaacagacaatgaaatcaagaactactggaacagcaccctcagcaagcgggtcgccatgcaacggaccgccgccgccaccagcatgccggcggcggccaccaccagcagcaatgccgacgccgccggcgctgctgcacgacgccggcgatcgccggagccccgcacggtcgtcgtcagcccaatccggaccaaggcgctgcggtgcaacaacaacagcagcagcgggatagtggtggtgcagcaggcaggcgcctgcagccacggcggccgtccgccggagagcggcgcgccgggagacgcggcggctgataaggtggccacgccgcaggcggtgcagcagcagcagcagcaagagctggccggagcggaggatgacgacgacctgccggtgccggccgtctgtatcgaccttgacttggacgacatcgagctgggaggactcgacggcttcctgatcagcccgtggcgcggcggcggccacgacgacggtaacgccgccgccggagcggtgccgaatctgccgatgccgattggctatgagctcggcggcgccggtggcggtggcgaggctggagctgttgacctggaggcgttgctggggcagctggaagcagaggaagacgacgacggtgaccaccaccaccaccaccaccaccaccaccaccag

SEQ ID NO: 12341 - DNA, 1116 bp, Oryza sativa
  Clone ID: TFbOSC400944j.C1.o31.fg
atggggaagggccgggcaccgtgctgcgccaaggtggggctgaacaaggggtcgtggacgccggaggaggacatgaggctcgtcgcctacattcagaagtacggccacgccaactggcgcgccctgcccaagcaagcaggtttgctccggtgcgggaagagctgccgactccggtggatcaactacctccggccggacctcaagcgcggcaacttcaccgccgaggaggaggagaccatcatcaagcttcacggccttctcggcaacaagtggtcgaagatcgcgtcgtgcctgccggggaggacggacaacgagatcaagaacgtctggaacacgcacctcaagaagcgggtgtcgccggagcagaagaagggtgggggcaagagcaagaagaagacgacctgcaccgacgtgctcgtcccgtccccatcgccgtcgtcgtccaccaccaccacgaccaactgctccagcggcgactcagccggcgagcagagcaacacgagcaaggaggaggaggaggagacggacaagatcgagatccccatgctcgagctcgacccctgctgcttcgacttcgacatgctggttgaccccgttgtcccggacacgtactgccccgcggtgtcggcgtcggcgtcggcgtcggcgccgacgtcgccgtgctcgtccacgtccccgtcgtgcgcccgtgcaggcgtggacccgctgctcgacctgcccgaaatcgtggacctcgggccggagctatggagcatcatggacggcggcgccggcgacgggtgcaccgaagcgccgccgccggcgtggagcaatgcggcggcggcggcggcggccaatgcaacagtggccaccacgaccagcctggaggaggaggaggggaaggagtggtggttggaggacttggagaaggagctcgggctgtgggggcccacggacgactaccactgccacccgggcccacaaggtcagcccggtcgcgcgggcccaccaccctccgccgttgtggaggacccagtgtcgtgctacttccaagcgggccccacggcagccgccacgtggcagggacacgagccctcggctgtcatcacgagtaaccccatggattactacgtgtaa

SEQ ID NO: 12342 - DNA, 948 bp, Oryza sativa
  Clone ID: TFbOSC900238j.C1.o10.fg
atgatgaaggagtcgtacatggaggtgctcccgccggcgccggcgcactacttcgtcggccaggctgcggcggcgggcgggtggttcttgccggaccggcgcggcggcggcggagcgtggtcgcaggaggagaacaaggtgttcgagcaggcgctggcggcgctcgaccggaacgacccggagaggtgggagcgggtggcgctgctgctgcccggcaagacggtggccgacgtcatgacgcactacgacgacctcgagaacgacgtctgcttcatcgaggccggcctcgtccccttcccccactacggcgccgccggcggcggcggcggctccgggttcactcttgactgggacggcggcgatgaccccgccggccttgggttcaagcgctcctgctacatggtcggcggcaagcgcgcgcgcggccctgaccaggagcgcaagaagggcgtgccgtggacagaggaggagcacaagttgttcttgatggggctgaagaagtacggcagaggtgactggaggaacatctcccgcaacttcgtgacgagccggacgccgacgcaggtggccagccacgcgcagaagtacttcatccggctcaactccggcggcaaggacaagcgccgctccagcatccacgacatcaccaccgtcaacctccccgacgacgaccacggcaacccctcgccgtcgccgccgccgtccgtgctcaccgcgcactcctcctcctccgccgccgccgtctcggagcagttcggcgtgctcgtcgacggcaagcctccgccgccgccgctcggccgtggcgccgggcaccaccacttcatgccccatccctacgcccaggtgaagatcgaggccggcaattcgcacgtcgccggcggcggccgcctcgacgactccgttctggtgcagatgcaatgcggccagctgatgcagcctctcggttga

SEQ ID NO: 12343 - DNA, 951 bp, Oryza sativa
  Clone ID: TFbOSC419638j.C1.o9.fg
atggggagggcaccttgctgtgacaaggcaacagtgaagaaggggccatggtcacctgaggaggatgcaatgctcaagaactacattgaggagcatggcaccggtggcaactggattgcactgcctcacaagattgggctgaagaggtgtggcaagagctgcaggctaaggtggctgaattacctgaggccaaacataaagcatggggacttcaccccagaggaggacagcatcatctgcagcctctacattagcatagggagcaggtggtcaatcatagcagcacagctgccagggaggacggacaacgatgtcaagaactactggaacacaaagctgaagaagagactccttggccggcgcaaggaccgcggcggcggccaccaccaccgcagccagagcaccgccgacgatcttccggccggtggtgacggcggcatgaacgacggcggcggcggcggcggagagcggtcgctgagcgcgtcggcgatggagaggatccagctctgcatgcagctgcaggagctgcagaacccactgtccatccaccacaaccccttgctctctcatcagtggccaagcaaggccaccattgatgatcagaatcacaacaatgtcactgtggctgaacatggaatgtcaagctctgtgagcgaccaccaccgcctcgatgggcagcagctggagagcggcgccggcgccgccgccatgcagcaggcgtcgccgtcgagcggcggcgagaactccaacgtcgtcgtcgccatcgaggccgagctccaggagcttctctacgccggcggcggcgcgatcgtcgacggcggcgcgccgccgcagggggatgtggactggtggagctatgatcagggaaagcagtcacctgtgacttgctgggatttcacccctgaaaccagctccatcttccaggattatgcaacagtttatgacatctga

SEQ ID NO: 12344 - DNA, 1569 bp, Oryza sativa
  Clone ID: TFbOSC101223j.C1.o1.fg
atggaagagatgatcaagccggcaccggcaccggcgtcgtcggaggaggagaaggaggtggtggctactgctgctactggagaaaggaggcatgaggaggcgacggccgggagagaggagcaggaagaggaggaggaggaggaggaggcgccggtggtgctgaagaaggggccgtggaccacggcggaggacgccgtgctggtgcagcacgtccggcagcacggcgaggggaactggaacgcggtgcagcggatgaccgggctgctccgctgcggcaagagctgccgcctccggtggaccaaccacctccgccccaacctcaagaagggttccttctcccccgacgaggagctcctcatcgcgcagctccacgcccagctcggcaacaagtgggcgcgcatggcctcccatctgccggggaggacggacaacgagatcaagaactactggaacacgaggaccaagcggcgccagcgcgccggcctgccggtgtacccgccggatgtgcagctccacctcgccttcgccaagcgctgccgctacgacgacttctcctcgccgctgtcgtcgccgcagcaatccgcggggagcaatgtcctctctatggacgcagccgatgccgccggcgccgcctcgtccgggtacaccagcgcgcgcccgccgccgctcgacctcgccggccagcttgccatggggagccggccggttcagctcctcgccgcgacgccgttctccgcgccttcgtccccgtggggtaagccgttcgctcggaacgcgcagttcttccagttcccgcactcgtcgcccgtgtcgccgacgacgccgaccgggccggtgcaggtgcacccggtcacgccggagctctcgttgggctacggccttcacgccggcgaccgggccagactcccgcctgtctcgccgtccccgggtgccagagccgagctcccttcaagccaattgcgcccgtcgatggcgcctaccacagccgccgccgccgccaccggcggcttggtcggcggagcgctgcaggatcacccaaacgcggcgagcctcgaggccatgctgcaggagctgcacgacgccatcaagatcgaaccgccggcgccgccggaaaacagaggaacggaagaagaaggcggcggcggcggcggcaatctgcgcggcttccttcatgagcaaatttttgacaaattgatgcccatcaagtctgaagatttttgcatcgtggggttgcattctgtactaatttcacttcaatttccaggtgacggcaaaccggaggtagagctcaaggacgacatcgagacactcttcgaccttatcataccggcgacgttcccggcggcggcgccggagcccgccgccgccgcgacggccgcctccgccgcgcccaaccactccagctccgtctcgcagcacagcagcgacgaccaggaccactccaacggcgccgacgtcctcgacctgcccatcctcaccggcggcggaggcggctcgtcggagcaggacgactggagcctcgacggcgccgcctgccagtgggacaacatctccggcggcatctgctga

SEQ ID NO: 12345 - DNA, 906 bp, Oryza sativa
  Clone ID: TFbOSC102011j.C1.o25.fg
atggggatggaggcggagtgcgataggataaaggggccatggagccctgaggaggacgaggcgctgcggcggctggtggagcggcacggggcgaggaactggacggcgatcgggagggggatcccggggaggtcggggaagtcgtgcaggctgcggtggtgcaaccagctgtcgccgcaggtggagcgccgcccgttcacggcggaggaggacgccgcgatactccgggcgcacgcccgcctcggcaaccgctgggccgccatcgcgcgcctcctccccggccgcaccgacaacgccgtcaagaaccactggaactcctccctcaagcgcaagctcgccaccgccacggacggcggcgagatcgaccggccgtgtaagcgcgtgagccccgggccggggagcccgacgggatcggagcgcagcgagctcagccacggcggctgcggaagcggaagcggcggcgggcaggtgttccgccccgtgccgcgccccggcggcttcgacgccatcagcgcggcggacgtcgtgcggccgccgcggcggcgggacgacaacgacgacgacggcgacgacgacccgctcacctcgctgtccctctccctctccctcccggggttccaccacgacagcgcgcggagccacttccaggagctcccctccccctcccgctccccttcgccgccgccgtcgccgccggcagcatctccatccgcatacccgttcaacgccgatctcgtctccgcgatgcaggagatgatccgcacggaagtccgcaactacatggccggcgtcgggctccgcgccggctgcggcccgggcgccgtggccgagtccttcatgccgcagctcgtcgacggcgtcatgcgcgccgccgccgagagggtcggcgtcgtgacccgccaataa

SEQ ID NO: 12346 - DNA, 831 bp, Oryza sativa
  Clone ID: TFbOSC421872j.C1.o2.fg
atgcctacagatgatgccacggcgacgggcaacggcgacggcgccgctccccgtccggcagccgccgagccagcggcgccgctgtcgtccgtgtggacgcggcgggacgaaaagctgctggagatgctgctctggcgctggcagctggacccgcactgggaccggctcgccgcggagctcggcggcaagacggcgacgcaggtgttcgaccggtacgtgtgcttggccgacgagctgaggctcgtcatggcggcgccggcggtggacacgccgcccgcgtgggacgtgcaggacgaacgggaggccgctgtggcgccactacccgggttggaggccgacgcggcggccggcgccggagagtcagcggaggtgacggccattggcatcgctgccgccgcttctccgaatgcagctgctacgagcgctccgaccatcggcggcggggtggtattgaaatctagagagctgaaaaatccgcggaagacgaggatggccggcggcgggccaaggaagaaggcggagatgtggaccagggaagagcatagccaattcttgcacgggattagtacgtacgggaaggggaattggaaggcgctggcgagcgagttcgtgaagaccaagagctcgacccagatcgcgagccactaccagaagttctgcatcagggaagagaagaggaggctgagcaagtgcaagcgggcgagcatccacgacatcgtcagcccgacgacgacgacgtccgcgcctgaatctgccggcgccggcccgagtgcaccaccgtgcgcgctgatcgaaagcggtgcgctgattgcaggcgacgatgacgcatga

SEQ ID NO: 12347 - DNA, 526 bp, Oryza sativa
  Clone ID: TFbOSC411350j.C1.o2.np
tgctgcgtcgtcctgcgcatcaagctcccggcggcgtggacgcccgaggaggacgccgccctggagcgcctcgccgtggagaacggctcccgccactggcgccgcgtggcggcgcagatgccgcgcaagcgctcgcccgtgcagtgccgcgacaggtggagggaccacctcgcccgcgacgtgttccaccgcccctacaccgcggccgacgacgacgagctcacccgcctcgtcctgcgccccggcggaggtggcgaccgatggaaggacatcagcagagcggtgcacggccgcagctcgcgctccgtgaagcgccggtggatggagatcggcacgagcgatgagctcctcaggaagttggcacccccggtcatcgatgctgtctccggccacggtggtggacgccgtcgtctgatgcggccaaatcaagcttttggatggcgccgttgctagctagggccagttcactgacgcgatgagctcctcaggaagttgtggcacccccggtcatcgatgctgtctccgg

SEQ ID NO: 12348 - DNA, 1029 bp, Oryza sativa
  Clone ID: TFbOSC401516j.C1.o2.fg
atgcagccgccgccgatgagggagaggcagcggtggcggcctgaggaagacgccatcctcctcgcctacgtccgccagtatgggccccgggagtggagcctcgtgtcccagcggatgaaccgccccctccaccgcgacgccaagtcctgcctcgagcgctggaagaactacctccgcccggggatcaagaaaggttcgctcaccgacgacgagcagcgcctcgtcatccgcctccaggccaagcacggcaacaagtggaagaagatcgccgccgaggtccccggccggacggcgaagcggctgggcaagtggtgggaggtgttcaaggagaagcagcagcgggagctccgggatcgggatcgccggcgactcccgccgccgctggacggcgacgagcgcggctgcgccggcgggcgatacgactggctcctcgaggacttcgccgacaagctcgtcaacgaccaccaccgccgaatgatggctgccccgatcctcccgccgtggatgtcgtcgtcgccgtcgtcttcttcctcgccgtcggtgacgcttagcctcgcgtcggcggcggtggcgccggcgcctgcggcgccgccgccgacgtggggtggtggtggaggaggggaggtggtggtggcggagttgatggagtgttgcagggagatggaggaagggcagagggcgtgggcggcgcacaggaaggaggcggcgtggaggatgaagagggtggagatgcagctggagacggagagggcgtgccggcggcgggaggcgacggaggagttcgaggcgaagatgagggcgctgagggaggagcaggcagctgcggtggagcgggtggaggcggagtaccgggagaagatggccggcctccgccgcgacgcggaggccaaggagcagaagatggcggagcagtgggcggccaagcacgcccgcctcgccaagttcctcgaccaggtcgccgcctgccgccgctggccgcccgtagagatcaacggcggcggcggcggcggccccggcggcggccggtga

SEQ ID NO: 12349 - DNA, 590 bp, Oryza sativa
  Clone ID: TFbOSC400608j.C1.o20.fg
atgggaagatcaccttgctgcgatgagagtggcctcaagaaggggccatggacaccggaggaggatgagaagctgctccactacatccagaagaatggccatggcagctggaggacactgcccaggcttgcaggtttgaacaggtgtggcaagagctgcaggctgcggtggacgaactacctgaggccggacatcaagaggggcaagttctcccaggaggaggagcagaccatcctccacctccactccatcctcggcaacaagtggtcggcgatcgcgacgcacctgccggggaggacggacaacgagatcaagaacttctggaacacgcacctcaagaagcgtctcatacagatggggttcgaccccatgacgcaccggccgcgcaccgacttcttcgccgcgctgccgcagctcatcgcgctcgccaccctccgtgaccagctcgccgcgacggcgtgcggcggcggcggcggtggcgacacggcggcggcggcggcggcgcagatcatgcagggcgccggtggtggtggtggcgccgacgttgccatccaggccgccaagatgcagtacctgcagtgcctcctgca

SEQ ID NO: 12350 - DNA, 386 bp, Oryza sativa
  Clone ID: TFbOSC8036j.C1.o1.fg
gtgttccatggactgaagaggagcacaggaaattcctggtagggctcgagaagctcgggaaaggcgactggcgcggcatttcccggcacttcgtcacgacaagaacaccgacgcaggtggccagccatgcccagaagtatttcctcaggcagagcagcctcacgcagaagaagagaagatccagcctctttgacgtgattgaggatgcagaaaaggctccgagtgtgaatgaacgtctgaaactgagacacgagacagcctctgtgcctgctgaaatgggattccctgcactgtcactgggtatcagcagcatggcacagccagaagccatgctgctgcctcctccatccttaaccctgacgccagctgttcatcaccagcagtga

SEQ ID NO: 12351 - DNA, 1392 bp, Oryza sativa
  Clone ID: TFbOSC400860j.C1.o23.fg
atggcgcgttttcaggaaaccaaggcgaggaatgatcaaggacctgttgctgatcatgttgggcaccaaaacctcatggaaaacctcacagatcctctggattccagtggcatggacatgatggacgaagcgcgaattcctaaggcgcggaagccatacacgataacgaagcaaagggagaaatggaccgaggacgaacataagctgttcttggaagccctgcagctccatggccgagcctggcgacgcatccaagagcacataggcaccaagactgccgtgcagatcaggagccacgcacagaagttcttctccaaggtcatcaaagaatcatctggggacaattgcaacagcttgggtgctgcatcatcaattcagattcccccgccgcggccgaagcgtaagcctgttcatccgtacccacgcaatctagggagcacagccagcaagaacgtccctgcactgaaacagctagagaagcctcagctgcaggtgcagtctctctacgaccaggacaatgggtcgccgacgtcagtgttaacagtaccacagatacgggctgatacactgggaagtgagagtggtgggtcgccaacctcgacgattgatattgaagagagatgtcctacaccaagcatagcaactgctgagttagctatggagttgcctcctacaaatgacgaggaggtcaagggcaatggcgatcatgaagaagttacatgtgacagatcaggagttccagtccttaggctatttggcaagagggttatggtgaatgatttacatcagatgtcagcccctgatgccgggaacctgcaaactgtggcagacatggaagtggacgcttcagctgagacaccaactagtggaactgggaaattctcttcccatggtgcagcagaagcaaatacatggaacccatggctgactaacacacagcagtttctgtattatcttcctaacggacaaattttctccgtgcattctgctctcccatgcttcacctaccataatgagggtgttacttgcacccagttttcaaacccacaggtggtagcctcagatcaacagcatcaacaccaaacttctgaagctgtagattacaagggtatacagagggaaggatcttggacggagtcaaatacatcctcaagcagtgtgcctgaaacagcaactcataattcagagactacagaatcatatagaaacggaaacagaaacgaagatgaaatggtaccttctccagattcaagaaaatgtgtgagcccaggttccaactgcaggcgaggctttgtgccgtacaagagatgtgttgctgatagtgaggcgctgctgaagtcacaggcgcctcaggaggaggcagacggagagatgacgaggctgtgcttataa

SEQ ID NO: 12352 - DNA, 301 bp, Oryza sativa
  Clone ID: TFbOSC25059j.C1.o3.np
atggtgagaggttctcatcctcttatcccagccggagtcggtccttccgctctggtcaaagcaaggctcccgtttcacggtgtaataggagcccagaagtcttcacccattaaatgtcctcgaatctcacccgctgcccccggccgaactcacaaagggtggcctcacggttccctggtggaggagttcattctccgacacctcccccgtaatcatggtcatagctgtttcctgtgtgaaattgttatccgctcacaattccacacaacatacgagccggaagcataaagtgtaaagcctg

SEQ ID NO: 12353 - DNA, 1242 bp, Oryza sativa
  Clone ID: TFbOSC401161j.C1.o35.fg
atgtcgtccgaaaccgccgcttcgccgccgccgccgccgccgaatccaccggccgccgactccacccattccagccccgcctccatgaccgacgagacgcacggcgcaggagcccatcccgacgagtcccaaccgcatcgctcctcatcgtcgtcctcctcccctcccgtggccgtcgacggcgagacgcgcgtcccactcccagtccggtccctgccccaacctagccacccatcgccgcctccttcgggggaggacgaggatgacgtcgtcatcaccggccaaatcgcagtgggtgacgccgcgggggcggcgatggaggagcgggtgaaggggccctggtcctcggatgaggacacgctgctgagcaatctggtggagaaactcgggccgaggaactggacgctgatagcgcgcgggatacccgggcgctccggcaagtcctgccgcctccgctggtgtaaccaactcgacccccaagtcaagcgcaagcccttcactgaggaggaagaccgcattataatggctgctcatgcaatccatggaaacaagtgggcggctattgcaaagcttttggttgggagaaccgataatgcaatcaagaatcactggaactctaccctgaggcgtcggcactgcactggtggccgatgcacacaaggtggtgttatgaagagagctattccggagaggcctaggtcggtttcagaagaaccttggccattgggcaatcttagttccttaaatgttagggaagcaatggaagctcccgcacaaacagtatctgaaagttatgttggggcatggcaaatcggggatcagagttgcaaaactgaagttgttgatccaccttatcttgcccgaccagttgcaaaggttggtgcattcaaaccatacaatgtaggacctgctcaatcatcacaaaaggaaatgctgagctttgccaccaagtttgactcaaaccttcatcctttcaagcctgaaaatggggtctgcaagtttgttgatcctacaagttttgctgctgaggtgccaaataaatgtgggcatggctgctgcagttctcatgggcaacttcgtaagaactcattgctgggtcccgagtttaatgagtttgaagatcatccaccaatttcagatagtagttttgcttcgttggtgtcagaaattagcagcattgcctggatgaaaagtggtttgcaaagcagtgacaccttagcgcggtctgttccaccagcttaa

SEQ ID NO: 12354 - DNA, 789 bp, Oryza sativa
  Clone ID: TFbOSC412573j.C1.o11.fg
atggggaggcagccgtgctgtgacaagaagaaggtgaagagggggccatggacggcagaggaggacaagaagctcatcagtttcatcctgacacatggccgctgctgctggcgagcagtgcctaagttggcagggctgctgcgctgtggcaagagctgccggttgcggtggaccaactatctccgccctgacctcaagcgtggcctcctcaccgcagacgaggagcagcttgttgtggacctccatgccaagcttggtaacagatggtccaagatcgccgccaaattaccagggagaacagacaacgagatcaagaaccattggaacacgcacatcaagaagaagctcatcaagatgggcatcgacccagccacacatcagcctctgcccaacaccaaggtggttagccaaacaagaacctccacgctgtccactgccacaaccgaatcagccaagtcaaatggtatggcatatccgttcgatcccgagggaggctgcagcagggacatgtcagtgcccacagactcgatggagcagtcaagcaggaacaccagcagtcatggcctggacccattggtgaactggctgttggaggcagagcttccagctgacgagccatggctaaattttactagcagcaatgaagatgacttcagtggcatcgttaagcagtcagcatgggatggaagcacaacagactggctgcttgactaccaagacttcagcatggacgattcgagcttgattgatggtgcaagggttcagaattcagatggattgaacttttag

SEQ ID NO: 12355 - DNA, 1026 bp, Oryza sativa
  Clone ID: TFbOSC407994j.C1.o11.fg
atggtgaggccgccgtgctgcgacaaggacggcgtcaagaagggcccgtggacgccggaggaggacctcgtcctcgtctcctacgtccaggagcacggccccggcaactggcgcgccgtcccgaccagaacagggctgatgcggtgcagcaagagctgtaggctccggtggaccaactacctgaggcccgggatcaagcggggaaacttcaccgaccaggaggagaagctcatcgtccacctccaggcgctcctcggcaaccgctgggcggccatcgcgtcgtacctccccgagcgcacggacaacgacatcaagaactactggaacacccacctcaagcgcaagctgcagggcggcggcgccggcggtgacggagacggtggcgccgccggcgacgcggtctccccgaagcccgccgcgcagaggcccgcgtcgtcgtccaaggggcagtgggagcggcgcctgcagaccgacatcgacatggcgcgccgcgcgctccgcgaggcgctcacgtcgctcgacgacgtcaagccaccgcatcagcccgacgccgccaacgccgccgcggggggaggcggcgccaccaccggagcagcagcgtccgccggcgccgatagccccgccgcgtcgagcacgtcgggggcgtcgcagtgctccccgtcatccgccggctacgtcctcaccaccgagaacatctcccggatgctcgacgggtgggcccggaagaagggcggcggcggcggcaggcgcgccgccggcagcgggccggccacccccggcgccaccgagagcgcgtccggctcgtcggaagcctccgaggtgtcctacggcggcacggccttgtccgcagcggcggcgcccgcgtccgccttcgagtacgagacaaagccgaccgtcaccgccgccgccgccgccgacgccggcgacgagacgcagctctccgccatcgagtcgtggctgttcgccgacgccgacggcatcgagagtggcagcttgctcgacgcggccatggattacaccttctaa

SEQ ID NO: 12356 - DNA, 1029 bp, Oryza sativa
  Clone ID: TFbOSC410931j.C1.o2.fg
atggggcggtcgccgtgctgcgagaaggaggccgggctgaagaaggggccgtggacgccggaggaggaccagaagctgctcgcctacatcgagcagcacggccacggctgctggcgctcgctgcccaccaaggccgggctgcggcggtgcggcaagagctgccggctccggtggacgaactaccttcggccggacatcaagaggggcaagttcacgctgcaggaggagcagaccatcatccagctccacgcgctcctcggaaacaggtggtcggcgatcgcgacgcacctgccgaagcggacggacaacgagatcaagaactactggaacacgcacctgaagaagaggctcgccaggatgggcatcgacccggtcacgcacaagccccgcgtcgacgccgacgccgacgtcgccgccggcggcggcgcggcgggcggcggcgcgcgttccagggccgcggcgcacctcagccacacggcgcagtgggagagcgcgcggctcgaggccgaggcgcgcctggcgcgggaggccaagctgcgggcgctcgcctcgccgccgccggcaacggccgcgctaagcggggtcgactcgccgacgtcgactctcagcttctcggagagcgcattgttcggcgcaggcagtgcggcccccgacatacacggcgccgcgcgcgccgccgccgttcaggccgtgcagtcatcatacggggaggcgtgccaggagcaccacttcggcggcgccaccgccgagacgagctttgccggagccgggacgctggccggtgtccttcttgactgctccgtcaccggcgccgaccagagattcgcggagaggaccgaggcctgctccggcgagctgcagggggaggacgacgacgacaagggctactggaacagcatactgaacatggtcaactcgtccatgtcgtcgtcttcctcgtcgttgacttccgaggtggtcacggacaccgagatgttcctgccggcgacggcagcggcggcggcgtcggcgacgccggtagagttctga

SEQ ID NO: 12357 - DNA, 2766 bp, Oryza sativa
  Clone ID: TFbOSC1541j.C1.o2.fg
caaaagccgaaaaagtgggaagaaattcgaaccgcggtgtcaacgcccttcctcactcgcttcgcacgtgcctccctcgccggcaacactccaagctcccccaccgccgccgccgtcgccgtcgccgcctcctccgccaccggcgccggcgacgatgcctcctcgcaaggccacctcctccgcaggtacgtgccccccctcctcgcctcgcacttccccctcgcggggacctcctcccgcgctgacgctggcggccaaaaccctacctcccctgtagatgctcgggccaagtggcggaagcggaagcgcaacgcgaacacctccgcggccgaccactccgacgactccgactccgcggtggctgcggcggcgaacgacgacaacgacgacgacgacgcggcgctccacgcgggcaccgcggccgtcaacgggggaggcggaaccctaggcgggggcgatgacgaccccgtggtggacctccgcgaggccgaggtgcaccccacggcgatcgagcgcgtctccgccttcccgcccgcgttccgccgcgtggtcaaccggctccacccctccgtgctcgccgtcatggcggcggagcgcgccgccgccgcggctggtgctggtgctggcggcggcggcgcggccgtccccgcgctcgagaacatctctcacgggcagctccaggtgctctcgtccgtgctccctgaccacccgtccttgtccaacgaccccgacaagccgtcctcctacgtctgcacccctcctctactcatggagtgccgcggcgtggccaagcagttcgatggcaaattgctcatggtacccaagcattcagattggttcttgccaatgacggtgcacaggttggagaggcaagtgctgccgcagttcttctcagggaagtccccggggcacacgccagagaaatacattatgttgaggaatagggtaattacaacgtatctggagcgtcctgcgaggaggcttgcattttctgagtgccaagggcttgtcacaagcacgcctgaattgtatgacctgagtagaattgttaggtttttggacgcttgggggattattaattaccttgcggctgggtctgttcaacggggcttgaggatggcagcaacactaatcagagaggagccaacaggggagctgcatctcatgtctgctccattgaaatcaattgatggtttaattttgtttgatcgaccaaaatgcagtgtccgggcagaggatattgcttctggggcatcactttcatcttctccagggatggaaaatggtgatgctggttttgatgagaagacattgttggagagattgtctgagagcttttgtagtttctgcgcacaacctttgcctagcttgcactacgagtcacaaaaggaggcagacattgctctttgctcggattgcttccacgatgcaagatttgttactgggcactcaagcttagattttcagagagtggatgggaagaaagatggactggacaatgatggggacagctggactgatcaggaaacatttctgttattggagggcatagacaaatacaaagaaaactggaatgctgttgcggagcatgttggaacaaagtcgaaaatacaatgtcttcaccattttcttcgtcttccagtagaagatggattgttagagaatattaaagtaccagaagcatccttttcatcgaaattttggttgatgcaaaatgcttctggctccgtttttaaattgccacaattgtttgccttaggaagcttgcctcaaagcggcgaagctggagaccttcctttcattaacactgctaatcctgtcatgtcactgatctctattatgtctctggccttactgttcagagatgatttgcagattgcatttttggcctcttcattaggaccaagagttgcggcatcctgtgcaagtgaagcattaattgttttgactggaggtgactccaggatcagttcaattggcaatgatgttatgggccatgctgctcgaccgaactgtggtgactaccttattcctaaaattaattcctcattggctgtctcttcagaaaatgttagacatgctgcaagatgtggcttgtcggcagcagcaactaagtgtaaactttttgcggatcaggaggagcgtgaaattcagagattaagtgctaccatcataaatcatcagttgaagaggctggagttgaagttgaagcaatttgcagacatcgagacctaccttttgagggacagtgagcagtccgagaggatgaggcaggggctgcaagctcagcgcatccggatgatgtcagggcttcggttagcttcacccagaggcaacactatggcctcaaatccattgagtcaagcgaacattcgaccgccaggaataccgggatcgatgccccaggccggcactccagctttctactccaataacatgcaggtgcacccacagatggctttcttgcagcagcagatgcagcaacagcaacaaaaacagcagcaacagcagcagatgcagctgcagcagcaacagcagcagatgcaactacagcagcaacagcagcgacaggccttcttgcagcagcaacagcagcagatgcaacagcagcagcagcagctgcagcaacagcagcagcggcagctgcagatgctctctttcgggggtcggttgcctctgtcagcgatgaacgctccctcaacctcggcagcgcccaatgtcatgttcgacaaccctgacatgcccggtccatcgaatcaaggttga

SEQ ID NO: 12358 - DNA, 1926 bp, Oryza sativa
  Clone ID: TFbOSC21652j.C1.o1.fg
atggcgctccacctcacccgtcccttcctccggccgtcgccgccgccgccgcggccgactcgtcggagctcccgggctcattgcctcgccccttctgccagcgcgcggggcccgagcttcaggaggccctacacgtccgtcctggtggtccccaccggagtcggcgccgccgtcgggggtttcgccggcgatgcgcttcccgtggcgcgcgcgctcggtgccgtcgccgactgcgtcatctcccaccccaatgtgctgaacgctgcgatgctctactggccgatgcccaacacgctctacgttgagggatacgcccttgacaggttcgctgaaggatcctgggctctccaaccagttcaccagaacaaggtaggtttggtgttggattctggaatcgaggaggagcttcgactccgtcacttgcaggttgcggatgccgcgagggcttctcttgggctccctgtagtcgagtacattgtgactgatactcctttggagatcaagacatggtttgatccaaaatgtgggaagtctacagggagtgttgggaactctgattctctcctgagggcagttgaggccctggtgaaccgctctgatgtgaatgctgtggcggttgttgcgcgctttccagatgatgatccagaagattcagattgttatcgggaaggaaagggagttgatctgttggcaggagttgaagcgattatcagtcatctaattgtgaagaaattcaaaatcccagctgcccatgctcctgcagttttacccccagttctcagtctgtcagtgtccccaagatctgctgctgaagagattggacatacctttctaccttgtgtgcttgccgggttaagcaatgcccctcaatatgtgatgaggaggaatggaaacatggataatggttgcatagtggctagtgatgttgatagtgtgattcttccaaaagatgcttgcggaggagatggtactattgcctttgctagaactgctacaaagaacaagcccttaatcattacggttcaagaaaatgaaacagttcttgatgatacccctgacaagttcaatatagaggcgctaaatgtccagaactattgggaagccattggagtaatcgcagctcacaaggcagcaaatgctcgggcatatgcatctactgtgctagttcagttagcacctgacttgctgttaatttactgtagtttcctgtcgggtgcgcctcttgagattagcatttctcgcatgcttacttaccagctggtttgggtgaaaaattcgggcaaaatagtttttgggtacctgaaatttcagaaatttgaagctggcatatggaatcctcaccgtatcgctctatgcagtattcgtattttggttttctctgcaagtctgcaggtgtcatcgcagcctccaccacggctcatctccgagcacttgccggccggtgatccgccgtcgccgcttagccggagcagaaagaggaggagcttctccgaggaagaggacgagctcctcctcaagctgcacgctttgctcggcaaccgttggtccctcatcgctgggaggctaccggggaggacagacaaagaggtcatgaaccactggaactccaagctgatggatagtactatagagcatccaccctcgctacatgatgatgaacaccgtcgacggcgtcgccgtctgcgaagcgaagctcacgacgaacgtggtgcaaagcatccgggccacaattcatcttcttcctccaaggacgtcaatggcgatgaatgtacagtcgccgacgacgcaagtagctgtaaccaccaagatgataaccgggctgttgcagaattgaacctagagcttaccctctctacgccttgcatctacttgttacttggacaggatcgtgaggatggatcgaagagcaaccagggtttaatttga

SEQ ID NO: 12359 - DNA, 1644 bp, Oryza sativa
  Clone ID: TFbOSC400850j.C1.o64.fg
atgcccaacacgctctacgttgagggatacgcccttgacaggttcgctgaaggatcctgggctctccaaccagttcaccagaacaaggtaggtttggtgttggattctggaatcgaggaggagcttcgactccgtcacttgcaggttgcggatgccgcgagggcttctcttgggctccctgtagtcgagtacattgtgactgatactcctttggagatcaagacatggtttgatccaaaatgtgggaagtctacagggagtgttgggaactctgattctctcctgagggcagttgaggccctggtgaaccgctctgatgtgaatgctgtggcggttgttgcgcgctttccagatgatgatccagaagattcagattgttatcgggaaggaaagggagttgatctgttggcaggagttgaagcgattatcagtcatctaattgtgaagaaattcaaaatcccagctgcccatgctcctgcagttttacccccagttctcagtctgtcagtgtccccaagatctgctgctgaagagattggacatacctttctaccttgtgtgcttgccgggttaagcaatgcccctcaatatgtgatgaggaggaatggaaacatggataatggttgcatagtggctagtgatgttgatagtgtgattcttccaaaagatgcttgcggaggagatggtactattgcctttgctagaactgctacaaagaacaagcccttaatcattacggttcaagaaaatgaaacagttcttgatgatacccctgacaagttcaatatagaggcgctaaatgtccagaactattgggaagccattggagtaatcgcagctcacaaggcagcaaatgctcgggcatatgcatctactgtgctagttcagttagcacctgacttgctgttaatttactgtagtttcctgtcgggtgcgcctcttgagattagcatttctcgcatgcttacttaccagctggtttgggtgaaaaattcgggcaaaatagtttttgggtacctgaaatttcagaaatttgaagctggcatatggaatcctcaccgtatcgctctatgcagtattcgtattttggttttctctgcaagtctgcaggtgtcatcgcagcctccaccacggctcatctccgagcacttgccggccggtgatccgccgtcgccgcttagccggagcagaaagaggaggagcttctccgaggaagaggacgagctcctcctcaagctgcacgctttgctcggcaaccgttggtccctcatcgctgggaggctaccggggaggacagacaaagaggtcatgaaccactggaactccaagctgatggatagtactatagagcatccaccctcgctacatgatgatgaacaccgtcgacggcgtcgccgtctgcgaagcgaagctcacgacgaacgtggtgcaaagcatccgggccacaattcatcttcttcctccaaggacgtcaatggcgatgaatgtacagtcgccgacgacgcaagtagctgtaaccaccaagatgataaccgggctgttgcagaattgaacctagagcttaccctctctacgccttgcatctacttgttacttggacaggatcgtgaggatggatcgaagagcaaccagggtttaatttga

SEQ ID NO: 12360 - DNA, 1158 bp, Oryza sativa
  Clone ID: TFbOSC25059j.C1.o1.fg
atggccgggggaggcggtagcctggcggtgggcggcggattgaacgggtggcgaggcgtcagcggcagcgtcggagctgcggggctagaggagggtagtgggccggcttggtggcgggggcatctaaccgccaacggctcgaggatgaagaagggggggggttctcgccggcacgctattccaactggcgaggcggttggaggaggtggtgccgtggtggggattgatggggaggccgccgtgctgcgtgaaggcggaggtgaagaaggggccgtggacgccggaggaggacctatgctcgtcgcctacgtccaggagcacggcccgggcaactggcgcgccgtgcccaccaacaccgggctgatgcggtgcagcaagagctgccggctccggtggaccaactacctccggccggggatcaagcgggggaacttcaccgaccaggaggagaagctcatcgtccacctccaggccctcctcggcaacaggtgggcggcgatcgcgtcctacttgccggagaggacggacaacgacatcaagaactactggaacacgcacctcaagaagaagctcaagaagatgagcgccaccggcggcggcggcgactacggcgagggaggtggcgccggcgaggtgaagaccagggcggctgcgccgaaggggcagtgggagcggcgcctgcagacggacatccacaccgcgcgccaggcgctccgcgacgcgctctcgctggacccctcgccgccggccaagccgctggactcgtcgtcgggcgccacggcgccgccgtcgtcgcaggcggcgacgtcgtacgcatccagcgccgagaacatcgcgcggctcctggagggctggatgcgccccggcggcggcggcggcaagacgacgacgacgccgtcctccgggtcgaggtcgtcggcggcgtcggtgctgtacggggaggccagccacagcggcggcgccacggcgccgacgcccgacggctcgacggtcaccagcaagacgaaggacgaggagaccgccggcgcgccgtcgtcgtcgccgccgccggcgttctccatgctggagagctggctgctcgacgacggcatgggccacggcgaggtggggctcatggacgtggtggtgccattgggggacccgagtgagttcttttag

SEQ ID NO: 12361 - DNA, 603 bp, Oryza sativa
  Clone ID: TFbOSC401857j.C1.o12.fg
atggcggcggacggcggcgacggcagcggcggcggcaggaagacgccgtggacgcaggaggaggacgaggcgctgcgtcgcgcggtgcgcgagcaccggcggcagaactgggcggagatcgcgctggcgctgccccggcgcgggcccaagtcgtgccggctgcggtggtgccagcacctgtcgccggagctggacagccgggtcttcaccgccgaggaggacgcgatcatcctcgcgcagcagcgcgtgcacggcaacaagtgggccaccatcgcgcgctgcctccccggccgctacgacaacgccgtcaagaaccggtggaactcggcgctccgcaagctgctgcaagtgcaacacgccagcggcgccggctccccgccggccgctgccgccgccgccgccggagacgaccgggacgatgccccagtctgcctccagctgttccccgcgagggccgggggcgtgaaggaggctggcttattcgccggtgagaaggatgtggaggaggaggacgtggcgaccagcctgacgctggggttgccggtgctgtgcgaggcggagctggagctcaggctggggcctgcgtggccggccaccgcgtga

SEQ ID NO: 12362 - DNA, 714 bp, Oryza sativa
  Clone ID: TFbOSC900016j.C1.o36.fg
atggtgacagtgagagaggagatgcgcaagggaccatggacagagcaggaggacctgcaactggtatgcactgtccgcctgttcggtgaccgccgttgggatttcgttgccaaagtatcagggctcaataggacaggcaagagctgccgcctccgttgggtgaactacctccaccctggcctcaagcatgggcgcatgtcaccaaaagaggaacatcttattattgagctccatgctcgttggggtaacaggtggtctaggatagcacggaggctgccagggcgcacagacaatgagatcaagaactactggaggacacacatgaggaagaaagcccaggagagaaggggtgacatgtcaccctcgtcctcctcgtcgtcactggtataccaatcctgcctcctagatactgtgccaatcatcagtatggatggaggagacattcatgatgatcgcagctgcatggcaagagtcctcaaaagcactcagagtgtcatggatggatataccatggatcagatatggaaagaaattgaggcgccaggggcaccttccttgctgggtatagatgaagggaaagacaaagcatgcagcaatctcccatgtccacttctgacatctaccatgtcagactacagctgccctgaggtattctggaagattgacaatgaagaaacaaggatgttggctacacaatctggttatggaaaatga

SEQ ID NO: 12363 - DNA, 1185 bp, Oryza sativa
  Clone ID: TFbOSC21498j.C1.o1.fg
atgcacgagagcgacagcgatcctgattctgacaggacacactggtatatgagcaatagcgatgacgagtcatttgttgataaagataaagattgcagaaggagcaccgtagccctgctgttgaagaaaggtccatggacatcttgggaggactccatcttagagaagtacatcaagaagcatggtgaaaggaactggaagcttgtgcagaagaacactggcctcttgaggtgtggcaagagttgccgtcttcggtggatgaaccatctgaggcctaacctaaagaagggggctttcagcaaggaagaagagaataaaattattaatcttcatcgcaaaatggggaataagtggtctcggatggctgctgatttgccagggcgtactgataatgaaataaagaactactggaacactcgaataaagaaatgcaagaacaatcgttcgcctttgtatcctgctaatgtatgcaacgatgctttgaatgaagatcaacatgagtctgctgaccccaacgttagggagaagctgaccaataatcatctagaagatactactagtatgtattctgcaccccagttttcagatgcttccatcagtaatatacttgataggagacttgcatcaaaagattatgactccatagaagatcaaagaaaccaaatagaagttgtagcaaaatatgagattccacttcctgtgttgaaaacaacgaacaatgacatatttccatcagcctctatctttgccaaccatggtatttcaaatggcaatctctctgctttgtccacaactgatgctttgcagatggagctccctttaatccaatttgatccaaacaaccagttcgtttactcaagggcttatgcgatgcacctaacaaactttgctttattaaatgatcaatcagaagaattactaaatgatactgatgtattgaactatgtggtgatgaaagaagagctttctggagggagtttgagtcctactattaatatgccatgtgaagcacataactccatggctgcctctaatgagctggtagtgccacaatatgaaggagatgctccacctcttcaagatgatttcacatcatatttctatttgaatgatactaatctatccatattcgaagacacaaatgaattgtttttggaaaacaagttggatactaaaggtaactga

SEQ ID NO: 12364 - DNA, 3270 bp, Oryza sativa
  Clone ID: TFbOSC900288j.C1.o6.fg
atggatagggcgtcgaatttcatacctggtccttatcaagaactcgtggatgccaaaccaattagatcgttagctcctatgttccctgcacccttgggaatcaatgtcaaccagtcaagcaccccgcctttggtatgtgtcactccggttggccaatttcctgtcggttttggttctggaatccttcctacctttggttcaactactgccttcactaccacagcaaatggggtttcttatacaagctacaccaataatggagctattgatgccactcctatctcggcatataagaccagaccaggcattgtatcacttgatggcgatgaaccttactcaggttcagcatctggacggaagtccaagagatcatctggttcagctgctgatggttcaaatggagttaagttcaagcgccctaagccagtttacaagaattttgttgctggcaaggagcttgcctttttaccaccttcatccagtgatcccagggaggttgtggaagcagtccacatgacctttgaagcacttaggcgtagacatctgcaactggatgaaatacaagagactagcaaacgggctgacctgaaggctggcgccatcatgatggcaagcaatatcagggctaatgtgggaaaaagggtaggacttgttcctggagttgaaataggggatattttctatttccggatggagctatgtatcatcgggttgcatgctcctagtatgggtggcattgattatatgagtgctaaatttggaagcgatgaggattctgtggcaatatgtattgttgcagcaggtggctatgagaatgtggatgatgacacagatacactggtgtacagtggttcaggtggcaatagtaggaacagtgaggagaggcatgatcaaaagcttgagagaggtaaccttgctctggagaggagcctgcataggaagaacgagatcagggttgtgcggggcttcagggatccattttgcctgactggaaaaatctacatatatgatggcctctataagattcaggagtcctggaaggagagaacaaagtctggtatcaattgcttcaagtacaaactgctgcgtgagcctggacagcctgatggagctgcattgtggaagatgactcaaggatggatagacaatccagcaagcagaggcagggttatattacctgatctatcatctgcggctgaagctctcccagtttgccttgtcaatgaggtagaccatgagaaaggacctgggcatttcacctatgccagtcaagtcaaatacttgaggcccctcagttctatgaaacccttacagggttgcggatgccagagtgtttgcctgcctggtgatcccaactgtgcttgtggacaacataacggaggtgacttaccttacagctcatcaggacttttggcgtgccgcaagccaataatttatgaatgcggtgatgcttgccattgtactacgaattgccggaacagagtgacccaaaaaggggtcagatttcactttgaggtcttccggactgcaaatcgaggctggggtcttcgctgctgggatcccattcgtgctggtgcatttatctgtgagtatactggtgaggtcattgatgagctcaaagttaatctggatgacagtgaagatgattacatttttcagactgtatgtcctggtgagaagacattaaaattcaactttggtcctgaattgattggtgaggagagtacatatgtatcagctgatgaatttgagccactgcccatcaagattagtgcaaaaaagatgggaaatgtctcacgtttcatgaaccatagttgttccccgaatgttttctggcagccagttcagcatgaccatggagatgacagccacccacatatcatgttctttgcactgaagcacattcctcccatgacagaactgacttttgactatggtgttgctggatctgagtcttcagaacttcctgcctgtacccccagattcgagctctggtattattccctgagaatgacgatgggtttcaacatgaactgtgaagagacagtcacttttctttcaaaatgcacatgtaggtcactaatgatgcacgagagcgacagcgatcctgattctgacaggacacactggtatatgagcaatagcgatgacgagtcatttgttgataaagataaagattgcagaaggagcaccgtagccctgctgttgaagaaaggtccatggacatcttgggaggactccatcttagagaagtacatcaagaagcatggtgaaaggaactggaagcttgtgcagaagaacactggcctcttgaggtgtggcaagagttgccgtcttcggtggatgaaccatctgaggcctaacctaaagaagggggctttcagcaaggaagaagagaataaaattattaatcttcatcgcaaaatggggaataagtggtctcggatggctgctgatttgccagggcgtactgataatgaaataaagaactactggaacactcgaataaagaaatgcaagaacaatcgttcgcctttgtatcctgctaatgtatgcaacgatgctttgaatgaagatcaacatgagtctgctgaccccaacgttagggagaagctgaccaataatcatctagaagatactactagtatgtattctgcaccccagttttcagatgcttccatcagtaatatacttgataggagacttgcatcaaaagattatgactccatagaagatcaaagaaaccaaatagaagttgtagcaaaatatgagattccacttcctgtgttgaaaacaacgaacaatgacatatttccatcagcctctatctttgccaaccatggtatttcaaatggcaatctctctgctttgtccacaactgatgctttgcagatggagctccctttaatccaatttgatccaaacaaccagttcgtttactcaagggcttatgcgatgcacctaacaaactttgctttattaaatgatcaatcagaagaattactaaatgatactgatgtattgaactatgtggtgatgaaagaagagctttctggagggagtttgagtcctactattaatatgccatgtgaagcacataactccatggctgcctctaatgagctggtagtgccacaatatgaaggagatgctccacctcttcaagatgatttcacatcatatttctatttgaatgatactaatctatccatattcgaagacacaaatgaattgtttttggaaaacaagttggatactaaaggtaactga

SEQ ID NO: 12365 - DNA, 990 bp, Oryza sativa
  Clone ID: TFbOSC900032j.C1.o1.fg
atggacatggcgcacgagagggacgcgagcagcgaggaggaggtgatgggcggcgacctgcgtcgcgggccgtggacggtggaggaggacctcctgctcgtcaactacatcgccgcgcacggcgagggccgctggaactcgctcgcccgatcagcagggctgaaacgcacaggcaagagctgccggctccggtggctgaactacctccgccccgacctccggcgaggcaacatcacgccgcaggagcagctgctcatcctggagctgcactcgcggtggggaaaccgctggtccaagatcgcgcagcacctcccgggacgcaccgacaacgagatcaagaactactggcgcacgcgggtgcagaagcacgccaagcagctcaagtgcgacgtcaacagccagcagttcaaggacgtcatgcgctacctctggatgccccgcctcgtcgagcgcatccaggccgccgccgccgggcagcagcagcagcaggaaggcggcaccgacacgccgcccctgtcgtggcagcacggcggctccgacgggctctacgagtcgccggagctcccggcgcccgatgccagctgctggccagccgagtactgcgcggcggccggcggcgcgcagtcgggcggcacgcctgcaccggagctgtcgagcaccacggccgggtcgtcgtcgctgtccacggactccggcgccggggcgcagcccagctggcccacgcaggccgacggcgccgagtggttcaccaccgcctgcgacgcctccagcgccaccggcggcgtggccatgcgcgacacggagctggagctggcccagccgccgtgccagggcgggcagacgtggacgacgtccgagtcgtcgctgcctggcctcaccttccccgacctcgccgtcgcggacttcgagatcggcggcttcgacgtcgatagcttctggacgagcatggaggacgaccagctgtggtgccccacccaggccgccgtgtga

SEQ ID NO: 12366 - DNA, 1080 bp, Oryza sativa
  Clone ID: TFbOSC400549j.C1.o10.fg
atggggcatcactcttgctgcaaccagcagaaggtgaagaggggcctctggtctcctgaggaagatgagaagctcatcagatacatcaccacccatggctatggctgctggagcgaggtcccggagaaagccggtttgcagcgatgtgggaagagctgccggctccggtggatcaactacctgagaccggacatccggcgagggcggttcacggcggaggaggagaagctcatcatcagcctgcacgccattgttggcaacaggtgggcccacattgccagccacctgcctggccggaccgacaacgagatcaagaactactggaattcatggatcaagaagaagattcgcaagccggcggcggccgccgccgcggcgaccacgacgagcccgaacaacccgccgccgtgcagcacggcgacgtcggaccaccaccacctgccgccgccggcgttcggcggcgctgatcaccacctgcagctcgacgccatcatcaaccagaacctgatatcatccctgccgccgaagctcgccaccggcgacgactcgccgccggcggtgcccgggctgccgcaccactgcccgctcttcatgttcgacaccaccaccaccggcgccggcggcgccatcagcccgccgccgccgtcatcactgatcccaacccacctccaccaccaccaccacccgttcatcgccagcttcacggcggcgatggccgccgacacgccgagctacctgcccccgctggtcgacggcatggcagccatgggagcggccatggattgcagcttagaagatggccaaacagccgccgccatggccgccaccaatggctactaccagcatcatcagaagcatcagcagctggagattgagctggaggaggaggagcagaggcagctagggcatcatcatcatcagcatcaccatgagcatgagcatgaaaatcatcagtgggatgaagaagaagcacagcatctgctgatgtgggatcaagaagtactaacatcatccaacttggaggccatgcaaagtggtgctcattccctcctttttatgggaccaaatgaccatgattaa

SEQ ID NO: 12367 - DNA, 1029 bp, Oryza sativa
  Clone ID: TFbOSC401661j.C1.o13.fg
atggcgaagcgggcgggcggcgcgaggaagaagctgaggagagggctgtggtcgccggaggaggacgagaagctgatgaaccacattgccaagtatggccatggctgctggagctccgtccccaagcttgcaggccttgagagatgtgggaagagctgcaggctgaggtggataaactacctcaggccagacctcaagaggggagcattctcacaggaagaagaagacctcatcatccatctccattccatgctaggaaacaagtggtctcagattgcggctcagctgccgggtcggacggacaacgaggtcaagaacttctggaactcttacatcaagaagaagcttcgccagcgcggcatcgatccggccacccacaagccgctcgccgaggtcgtcgccgccgccgcctgcgcccgcacgccggcggtgttcagcgacgccgagctcatcctgtcctccatcggcgcccagccgccgccggagagctatgatggcagccggtacagcacggagtgcggcgccgcgagtgtcggcggcgacgggtcgctgtcgtcgctgtccgggtacagccaagcgacagcggagttcgcggtggacggcgccagcgcgagcgcgctgctgcactgcggcggcggcggccccacctcctccggtggtggcgccccgccggcgcccacggcggcggttatcccgtcggtgtcgagctccagcacgctgaactcgatggttggcctaagccccgccgccaccaccaccaccaccaccaccgacgagcagtacggcaacaccaaccacctcccatggctggagctgggcccaagcaccaccaccccctcctcctccgccgccgccgccacgttcgaccactacggcgccgcgctggacgagctcaagtggtccgattacgtgttcgacggctacaaccaccagctacctccgtacaaccatggcggcatctatggcggcggcgacagcaaggacacggcggtgcacttcgacgcccacgccctcggcaactggtgctag

SEQ ID NO: 12368 - DNA, 1077 bp, Oryza sativa
  Clone ID: TFbOSC401363j.C1.o3.fg
atgcagcgagagtgcatcgtgtcgggaccgatcgacgggtcgatctctgcgacgggcgacggcgcgcgtcgaggcgttggcggcatgcgcggtcatcgctcacgcgtccgcggggatggtggcctgcggatgcacaggagcggcagcgatcctgattctgacaaggcgcactggtatatgagcaatagcgatgacgagtcatttgttgataaagataaagattgcagaaggggcaccgtagccccgctgctgaagaaaggcccatggacatcatgggagaactccatcttagagaagtacattaagaagcatggtgaaaggaattggaagcttgtgcagaagaacactggcctcttgagtttttgcatcacaaggcgtactgataatgaaataaagaactactggaacactcgaataaagaaatgcaagaacaatcgttggcttttatatcctgctaatgtatgcaacgatgctttgaatgaagatcaatatgggtctgttgaccccagtgttagggagaagctaaccaataatcaactagaagatactactagtatgtattctgcaccccagttttcatatgcttccatcagtaatatacttgataggagacttgcatcaaaagattatgactccatagaagatcaaagaaaccgaatagaagttgcagcagaatatgagatttcacttcctgtgttgaaaacaaccaacaatgacatatttccatcagcctctatctttgccaaccatggcatttcaaatggcaatctctctgctttgtccacaactgatgctttgcagatggagctccctttaatccaatttgatccaaacaaccagttcatttactcaagggattatgcgacgcacctaacaaacttagctttattaaatgatcaagcagaagaattactaaatcatattgatgtattgaactatgtggtgatgaaaaaagagctttctggagggagtttgagtcccactattaatatgccatgtaaagcaacggcatattcttcagaactccctttatgcaagggatatcgggaacaagatcttgatttttacacacaatag

SEQ ID NO: 12369 - DNA, 972 bp, Oryza sativa
  Clone ID: TFbOSC401373j.C1.o1.fg
atgtcttataacctaaaacagaggatgcacaggagcggcagcgatcctgattctgacaaggcgcactggtatatgagcaatagcgatgacgagtcatttgttgataaagataaagattgcagaaggggcaccgtagccccgctgctgaagaaaggcccatggacatcatgggagaactccatcttagagaagtacattaagaagcatggtgaaaggaattggaagcttgtgcagaagaacactggcctcttgagtttttgcatcacaaggcgtactgataatgaaataaagaactactggaacactcgaataaagaaatgcaagaacaatcgttggcttttatatcctgctaatgtatgcaacgatgctttgaatgaagatcaatatgggtctgttgaccccagtgttagggagaagctaaccaataatcaactagaagatactactagtatgtattctgcaccccagttttcatatgcttccatcagtaatatacttgataggagacttgcatcaaaagattatgactccatagaagatcaaagaaaccgaatagaagttgcagcagaatatgagatttcacttcctgtgttgaaaacaaccaacaatgacatatttccatcagcctctatctttgccaaccatggcatttcaaatggcaatctctctgctttgtccacaactgatgctttgcagatggagctccctttaatccaatttgatccaaacaaccagttcatttactcaagggattatgcgacgcacctaacaaacttagctttattaaatgatcaagcagaagaattactaaatcatattgatgtattgaactatgtggtgatgaaaaaagagctttctggagggagtttgagtcccactattaatatgccatgtaaagcaacggcatattcttcagaactccctttatgcaagggatatcgggaacaagatcttgatttttacacacaatag

SEQ ID NO: 12370 - DNA, 306 bp, Oryza sativa
  Clone ID: TFbOSC101345j.C1.o9.np
aattgaagttctagactcagtgaggagttgaggtccagacggtcaaggataccgggtgacgaagttggatacgagatggcatacggtggatggataccgtgtgggtgaaatctttgcaacgggcttcacgagcatgcagcggctcggcttggtgatgcaagcagggcgtcggctggcctgggcatgtggcaaggcaagccgagtctgactcggtgaattttctgtggccggctgtggctgcaggtttcggagagtttgtgagaattacaattttttaagcaacttttgtacaaaaatttttttaca

SEQ ID NO: 12371 - DNA, 1077 bp, Oryza sativa
  Clone ID: TFbOSC400850j.C1.o69.fg
atgtcgcagaggagagttgcagggcccatgggagtgatgagcaagcagcagcaggaggccatggcagaggagatgatggagctgaggcgaggaccatggaccctcgaggaagacaacctcctcatgaactacattgcctgccatggcgaaggccgctggaatctcctcgcccgctgctccgggttgaagaggacgggcaagagctgcaggctaagatggctcaactacctcaagcctgacataaagcgcgggaatctgacgccggaggagcagctgctcattcttgagctccattccaggtggggaaacaggtggtcgaggatagcgcagcatctgccggggaggacggacaacgagatcaagaactactggaggacgagggtgcagaagcaggccaggcagctcaaggtcgacgccaacagcaccgtcttccgcgacgccgtccgctgctattggatgcctcgcctcctcgagaagatggccggagcagccaccgaccccactccgccgccgccaccgccactccaccaccacgccgccatggccaccgcctcctcctcgccgttcgacttcgacacccacctgcagcaagcagaagcagcaacggcgtgcgtcgtcccgaacaacgtgtaccaccaccacatcgacccgagcccgagcacgtcgacgtcggccggctcgacggcggccgcggcggcgttccagccgctgccctgcttctccgagctgagatgggaccagcagatgcagtcctccggcgagctcgacgacggcgccgccggcgtgttcgtcgactcggcgtcggcgctgggaagcctcagcctcgacgggctggaccttggtccggccgagtactactccgactcgacgctcctcgactacctcaactccagctgcaccggcagcgccatgatgacgatgatgaccgcctccggcaacgccggcagctacaactactgcggcggcgccatggacggcggcgacacgtggaggtccgacgagctaatggatgagttgttccatcatatcgatcaagatagaagtactagtgatcgatcaagcaaaaatcaaaagtag

SEQ ID NO: 12372 - DNA, 903 bp, Oryza sativa
  Clone ID: TFbOSC900070j.C1.o1.fg
atggcagcatcgcagaggagcaggagcacggcggcgcagctcgacgtcgacgaccaggcggcggccgatcagctgatgacgatgatgcggcggccagcggcggtactacaggatgaggccgccgccgaggaggaggcctccgcggcggcagcggacctgcagctggagctccggcgagggccgtggaccgtcgacgaggacctcaccctcgtcaactacatcgccgaccacggcgagggacgctggaactccctcgcccgcgccgccgggttgaagaggacggggaagagctgcaggctgcggtggctgaactacctccggcccgacgtgaagcgcggcaacttcaccgccgacgagcagctgctcatcctcgacctccactcccgatggggcaaccggtggtcaaagatagcgcagcatttgccagggaggaccgacaacgagatcaagaactactggaggacccgagtgcaaaagcatgccaagcagctgaactgcgatgccaacagtgctaggttcaaggatgctatgagatatctatggatgcctcgcctcgccgatgcaagccagctcggtgatcaccatgggtataatagtaccactgccatgggcgatgctcatgggatgccagtgatgacatcgtcgtcgtcggactcgttcgcgacatcagagtcatacgatgggggcctttatgcaaatgtgcaggacaatgagatggtgaatggtggggactactggatgcagggagcaaataaagggttttgtagtaattatgagtcagagcaacttcatcctcatgagcatagccagtttcaggatccagatcttgttggttgggttcagggcttttctgagggcatttccgagaatttttggagcttggaggacatttggaagatgtag

SEQ ID NO: 12373 - DNA, 489 bp, Oryza sativa
  Clone ID: TFbOSC401693j.C1.o25.gm
atggatcaggaggtgatcatggcgacgccaccgctgacgccgccgcctcgcgcgaggtcgtgccgcgacaggtggcgccaccacctcgcccgcgacgtctaccaccgccccttcaccgcccgcgaagacgatgagctcctacgcctccactaccgcctcggcgaccgctggaaggagatcggccgcgccgtctacggccggacctcgcgcgtcatgaagcaccgctggagggagctccggcgcggcggcttccccgctgctgccaccaggaaggagcaggcgcctgccatggacgcggacgacatggtggaaagcgaaatggaggagtcagatcagtcgctgccgccgctcaccaagaaggcggagctccaattggtctaccgctccttcattggcgagatcagcctcaacctgcgactggggaagtttgacatcacagccaaacctttggcttatcccacgccctaccgctttgatggagctgtttga

SEQ ID NO: 12374 - DNA, 858 bp, Oryza sativa
  Clone ID: TFbOSC102044j.C1.o20.fg
atggggatggaggcggagtgcgataggataaaggggccatggagccctgaggaggacgaggcgctgcggcggctggtggagcggcacggggcgaggaactggacggcgatcgggagggggatcccggggaggtggagcgccgcccgttcacggcggaggaggacgccgcgatactccgggcgcacgcccgcctcggcaaccgctggggccgccatcgcgcgcctcctccccggccgcaccgacaacgccgtcaagaaccactggaactcctccctcaagcgcaagctcgccaccgccacggacggcggcgagatcgaccggccgtgtaagcgcgtgagccccgggccggggagcccgacgggatcggagcgcagcgagctcagccacggcggctgcggaagcggaagcggcggcgggcaggtgttccgccccgtgccgcgccccggcggcttcgacgccatcagcgcggcggacgtcgtgcggccgccgcggcggcgggacgacaacgacgacgacggcgacgacgacccgctcacctcgctgtccctctccctctccctcccggggttccaccacgacagcgcgcggagccacttccaggagctcccctccccctcccgctccccttcgccgccgccgtcgccgccggcagcatctccatccgcatacccgttcaacgccgatctcgtctccgcgatgcaggagatgatccgcacggaagtccgcaactacatggccggcgtcgggctccgcgccggctgcggcccgggcgccgtggccgagtccttcatgccgcagctcgtcgacggcgtcatgcgcgccgccgccgagagggtcggcgtcgtgacccgccaataa

SEQ ID NO: 12375 - DNA, 771 bp, Oryza sativa
  Clone ID: TFbOSC20253j.C1.o1.fg
atggagaacaaagatacaacagaaaaggccagattactcagtggtgctctgagcaaagaaggctcgtctggtacttcaaatgaaggaaagaaaattcaagcaaacggcgtggatggttccaaagcaaaatccacctcttcaggtgagaaggtcacgcaaggcaatacactaagcaactatgagaagaaagaagagaaaccatggggaagggaagagatcgagttgcttaggaaagcaatacaaaagtatccaaagggaacctcccggaggtgggaggttgtctctgagtttattggaactggaagatctgttgaagaaattctgaaggctacaaagactgttcttttgcagaaaccggactctaccaaagcttttgactctttccttgagaaacgcaagccagcaccgtccattgcatcacctctttctgtaagaactgaaacagttggtttgcctactgagaaagcagctggaaatgcatcatccaaagcgcctgcacaacatgcaagcagtaaaacatccgacgagaaagctgctgctcctgctcctgctcctgtatcaaatggaacaccttctggaacagcagatccagaggcttggtcagaggcgcaagtgctggctcttgtacaagctttgaaggcatttcctaaggatgcaagccaaagatgggagcgtgtggctgccgctgtcccaggtaaaaccatggtgcagtgcaagaaaaaggttgcagagatgcaaaagaatttccggagcaagaaaagcgctgagtag

SEQ ID NO: 12376 - DNA, 1350 bp, Oryza sativa
  Clone ID: TFbOSC900266j.C1.o3.fg
atgtccgcgtctgcatccgctgcctgtctccttcctccccgaggaggaagcctggcccgacccgacaccgcactccccccagccagccagccagccactgtcgcggtgaaacaaaatatcccccgcctcgcctcgcctcgcctcgcggtaacatccatcacactcctcccccgccgcggccgccgctgcgcggtagatctcctcctcctccacctccaccgtctcctgctcttcctctctctcttctcggaggaaacccccaatttattccttccccgcaaacccgcagccttcctaaaacgaattaaatctccctcccttatccgccgccgcaatccctccccacaaaatctcgctgcgccgcgcgctgttttagggtttgagctcatggcggtggaggaggcgagcagcagcagtggcggcggtcgtggtgggggtggcggtgggggtggggaggaggggttgtccggttgcggcggtgggtggacgcgcgagcaggagaaggcgttcgagaacgcgctggcgacggtgggggatgacgaggaggaaggggacgggttgtgggagaagctagcggaggccgtggaggggaagacggccgacgaggtgaggcggcactacgagctgctggtggaggacgtcgacggcatcgaggccgggcgggtgccgctcctggtgtacgccggcgacgggggcgtcgaggagggctctgcgggaggtgggaagaagggctctgcgggtggtgggggaggaggtggaggtggaggggggcatggggagaaggggtcggctaagtccgctgagcaggagcgccggaaggggatcgcctggacggaggacgagcacaggctgttccttcttggacttgagaagtacggcaaaggcgactggaggagtatctcaagaaactttgtgatctcaaggacacccacccaagtagctagtcatgcacagaagtattttattcgcctgaactcaatgaacagagagaggcggcgatcaagtatacatgacataaccagcgtgaacaatggagatacatctgctgctcaggggccaatcacaggtcagccaaatggcccatcagcaaatcctggaaaatcctctaagcagtctccacagccagcaaatgcgcctccaggtgtcgatgcttatggtacgacaattggacagccagttggtggtcctcttgtgtccgcagttggcactcctgttacacttcctgttcctgctgcacctcatatagcctatggcatgcatgcccctgtccctggagctgtagtccctggtgccccagtaaacatgcctccaatgccctaccccatgccgccaccaacatctcatggatga

SEQ ID NO: 12377 - DNA, 1152 bp, Oryza sativa
  Clone ID: TFbOSC403211j.C1.o2.fg
atgacgcgtgacggcgcgctgccggcgagcggcggcggcggggcggcggaggggccgaggcggtgctcgcagtgcgggcaccacgggcacaacgcgcggacgtgcacggcgaggggccccgtgaagctgttcggcgtgcggatcggcgacaagccgccgaccgcggccgcgggcggaggaggagggatgaggaagagcgccagtatggggagcctcgcgcagctggcggaggggggcggcggcggcggcgggagggaggaggggtacggctccgatgggaacgacgacaaacggcggaagcgaggtgaggcatggtcagaagaggagcacaaaaagtttctacttgggcttagtaagttaggaaaaggtgattggcgcggcatatcacgcaattatgttggttcaaggacgcctactcaagttgctagccatgctcaaaagtacttcattcgccaaacaaatgtgcacaggagaaaaagaagatcaagccttttcgatatggttatagatgattctgatgaccaaccactgtcccgtacatcttcacaagaagtagaagtagaagagaatctagaagatggacatcctgttactgcaccagtgatcccacctgctcctgtgcctatgctatcatcctctttggttccgccaccagtaccagcaatggcaccagttgctccaggtcctgtgttaacatctgcttcggccacactaccagtgtcagcagtggcaccccaaaccgatgaaaaggaacaagttgcctcaggttcaaatacaacagagacaggggctgcaattccagaagtcatgcccccatatggttatccaatgatgcttcctccatactacccaccggcatttgttccaatgccctactatggttatgtgcctgttttctatgcaccaccaggagcagtgcaagcacaacatgaggttgtcaagcctgtggccgtgcactcaaaacctccagtgcacatcgatgaactctacagcatgtccgaactcagcctgaagggcgaggctggtgtgaaaaacggcactcctaattctctgttgcctccaagaccaattggtagaccagacaggcaatctgcttttcatggaaaaggaccttctgatggctcttcaaatggactgattcctgcaaagtga

SEQ ID NO: 12378 - DNA, 1290 bp, Oryza sativa
  Clone ID: TFbOSC401545j.C1.o8.np
cattcgcaaatacagtaagagtttggttttgttcgtacatacatgcacgtatatacaagttcacaagaacagcagtcaaatgtggaccatgcgcaatggacgatgggttccaacttccaaatcttagtcgggccgttgcttcaccatgtgggctaaagatgccacgcgaccaaagcccaccaccacaagtggaccaaaagcccacataaactaatctcagtcatgtgtatgatggcaactgctgcccagtgccctcaccttcatgcccatagaaatgaattccatgtcagctccttttctgcttgtcccaaagggaggattcatgacaacagtgtcaacaagaaggcctacttcaacaggcagcaaaatggccatcaggagctccatcttgttgatcatccattcaacaatgtcactgacggccatgaatactattctccatctgctggtggatcttttcttccctttgcaacctactatgatcttggccatgagtactaccctcaaggaggagaaaaggatgctgtcgtcgtcgatcgggcttcgccgactattcgtaaagcttcgcctcacctgcctctcttcacacctaaatctgaggtttcggcttcgggtaagtctctgaagaaggctaatgttgtcaaaggccagtggacattggaagaagacaggaagcttgtgaaattagtcgaacagtttggactaaggaagtggtctcacattgctcaaattcttcctggaagagttggcaaacagtgcagagaaagatggcacaaccatttgaggcctaacatcaagaaagatacatggagtgaagaggaagacatagttctaatccaaacacacaaagaagtgggcaacaaatgggcagagatagctaagcacctgcctggtagaacagaaaactccatcaagaatcactggaatgcaacaaagagaaggcaattcgcacggaggaggagccgcgctagctccaagaaccccaaatctggaacccttctgcaaaactacatcaagagccttggaattggtccaatcaagtcaagtgttcgtcaagctccaccagaatctactgcagtgtcatcgtcttcaccagcatccacacaaaagttagcagaggtgaatggtaagatcaggccagattccaacccatccaaccaaatggtcacccagggaatactcaccatggatgagaacagctacatccagaccaactcttgtgaagaactcctggtctctacctatgatgatttatgccttgatatgtgtgatcatttgttcgaaacgaag

SEQ ID NO: 12379 - DNA, 966 bp, Oryza sativa
  Clone ID: TFbOSC19368j.C1.o1.fg
atggggaggccgccgtgctgcgacaaggtcggggtgaagaaggggccatggacgccggaggaggacctgatgctggtctcctacatccaggagcacggcgccggcaactggcgcgccgtgccgacgaacaccgggctgatgcgttgcagcaagagctgccggctccggtggacgaactacctcaggccggggatcaagcgggggaacttcaccgagcaggaggagaagctcatcgtccacctccaggctctcctcggcaaccggtgggcagcgatagcgtcgtacttgccggagaggacggacaacgacatcaagaactactggaacacgcacctcaagaagaagctcaagaagatgcaggccgccgaaggtggggaagacagcggcgccgcctcggagggtggcggcggccgcggcgacggcgacggcggcgggaaaagcgtgaaggccgccgcacctaaggggcagtgggagcggcggctgcagacggacatccacacggcgcggcaggcgctgcgcgacgcgctctcgctcgaccaccccgacccgtcgccggcgacggcggcggcggcggcgacgccagcggggtcgtcggcggcgtacgcgtcgagcgcggacaacatcgcgcggctgctgcagggctggatgcgcccgggcggcggcggcggcggcaacggcaagggccccgaggcgtcggggtcgacctccacgacggcgacgacgcagcagcagccgcagtgctccggcgagggcgcggcatccgcgtccgcgtcggcgagccagagcggcgccgccgccgcggcgactgcccagacgccggagtgctcgacggagacgagcaagatggccaccggcggcggcgccggcggccccgcgccggcgttctcgatgctggagagctggctgctcgacgacggcggcatggggctcatggacgtggtgccattgggggaccccagtttttag

SEQ ID NO: 12380 - DNA, 966 bp, Oryza sativa
  Clone ID: TFbOSC900251j.C1.o1.fg
atggggaggccgccgtgctgcgacaaggtcggggtgaagaaggggccatggacgccggaggaggacctgatgctggtctcctacatccaggagcacggcgccggcaactggcgcgccgtgccgacgaacaccgggctgatgcgttgcagcaagagctgccggctccggtggacgaactacctcaggccggggatcaagcgggggaacttcaccgagcaggaggagaagctcatcgtccacctccaggctctcctcggcaaccggtgggcagcgatagcgtcgtacttgccggagaggacggacaacgacatcaagaactactggaacacgcacctcaagaagaagctcaagaagatgcaggccgccggaggtggggaagacagcggcgccgcctcggagggtggcggcggccgcggcgacggcgacggcggcgggaaaagcgtgaaggccgccgcacctaaggggcagtgggagcggcggctgcagacggacatccacacggcgcggcaggcgctgcgcgacgcgctctcgctcgaccaccccgacccgtcgccggcgacggcggcggcggcggcgacgccagcggggtcgtcggcggcgtacgcgtcgagcgcggacaacatcgcgcggctgctgcagggctggatgcgcccgggcggcggcggcggcggcaacggcaagggccccgaggcgtcggggtcgacctccacgacggcgacgacgcagcagcagccgcagtgctccggcgagggcgcggcatccgcgtccgcgtcggcgagccagagcggcgccgccgccgcggcgactgcccagacgccggagtgctcgacggagacgagcaagatggccaccggcggcggcgccggcggccccgcgccggcgttctcgatgctggagagctggctgctcgacgacggcggcatggggctcatggacgtggtgccattgggggaccccagtttttag

SEQ ID NO: 12381 - DNA, 783 bp, Oryza sativa
  Clone ID: TFbOSC900240j.C1.o12.fg
atggggaggtcgccgtgctgcgagaaggcgcacacgaacaagggggcgtggacgaaggaggaggaccagcggctcatcgcgtacatcagggcgcatggcgaaggctgctggcgctcgctgcccaaggcggcgggcctccttcgctgcggcaagagctgccgcctccggtggatgaactacctccgccccgacctcaagcgcggcaacttcaccgacgacgaggacgagctcatcatccgcctccacagcctcctcggcaacaagtggtctctgatcgccgggcagctgccggggaggacggacaacgagatcaagaactactggaacacgcacatcaagcgcaagctcctcgcccgcggcatcgacccgcagacgcaccgcccgctgctcagcggcggtgacggcatcgcggcgagcaacaaggcggcaccaccgccgccgcatcccatatccgtcccggcgaaggcggcggccgcggcgatcttcgccgtggcgaagccgccgccgccgccgcgcccggtcgactcctcggacgacggctgccgcagcagcagcggcacaacgagcacgggggagccgcggtgccccgacctcaacctcgagctctcggtcgggccgacgccgagctcgccgccggcggagacgcccaccagcgcgcggccggtctgcctctgctaccacctcggcttccgcggcggggaggcgtgcagctgtcaggctgacagcaagggcccacacgagtttagatatttcaggccgttggaacaaggccagtacatatga

SEQ ID NO: 12382 - DNA, 237 bp, Oryza sativa
  Clone ID: TFbOSC401122j.C1.o79.fg
atggatagcagcagtggtagccagggaaagaattccaaaaccagtgatggttgtgaaacaaaagaagttaataacactgcacagaattttgttcatttcacggaagaagaggaagatctcgttttcagaatgcacaggcttgttgggaacaggtgggaacttatagctggaagaatccctggaagaacagcaaaagaggtagaaatgttctgggcagtaaagcaccagaatacataa

SEQ ID NO: 12383 - DNA, 933 bp, Oryza sativa
  Clone ID: TFbOSC900203j.C1.o13.gm
atggggaggagagcttgctgcgcaaaggaagggatgaagagaggggcatggacgagcaaggaggacgacgtgcttgcctcctacatcaagtcccatggcgaaggcaagtggcgcgaggtcccccaacgagctggtttgaggcggtgcggcaagagctgcaggctccggtggctcaactatctccggcctaacatcaagcgcggcaacatcgacgacgacgaggagctcatcgtcaggctccacaccctcctcggcaacaggctgccgggccgaacagacaatgaaatcaagaactactggaacagcacgctcagccgcaagatcggcaccgccgccaccgccgccgccggcagccgcggtggcagcacgccggacaccgccagagcgacggacgcggcgtcgtccagctccgtcgtgccgccgggccagcagcagcagccagcctcccgcgccgacaccgacacagcaacggcagcggcggcggcggcggcgacgacgaccaccgtgtgggcgcccaaggccgtgcggtgcacgcgcgggttcttcttccacgaccgtgaaacggcgccgctcgccgcggcggcgccggcgccggcaggggaattaggagacggcgatgacgtcgactgcgactactactgcagcggcagcagctcggcggcgacgacgacgtcgtcgagctcattaccggcggtcgtcgagccgtgcttctccgccggcgacgactggatggacgacgtgagagccttggcgtcgtttcttgacaccgacgacgcctggaacttgtcgcggggggtggccgccgccgccgtcgcgccgccggatccgcgcgtggggtggccgccgctggatctgccgcagccatcacgcgccacctcgtcgtcgacgccgctgtcgtgccccaccacattttcgtcgccactgtcgccgtag

SEQ ID NO: 12384 - DNA, 684 bp, Oryza sativa
  Clone ID: TFbOSC100886j.C1.o2.fg
atgccggaccagcgccgaggcactaccgcactgctgcccacggccaggcacggtccagccgcctctgaccggcaccacagcgcctccgctgctcgcagggacgccgccgctacccgcccggctacctccgttgccgccgccaacacgctagtctcctcctccctgatcgagatcgagtcgacacatacaccaccaaccaccggccggccgccgcgcaccggcgagcaggatggggaggccgccgtgctgcgacaaggttgggtgaagaaggggccatggacgccggaggaggacctgatgctggcctcctacatccaggagcacggctccggcaactggcgcgccgtgccgaccaacaccggggtgatgcgttgcagcaagagctgccggctccggtggacgaactacctccggccggggatcaagcgggggaacttcactgagcaggaggagaagctcatcgtccacctccaggctctcctcggcaaccggagggatcatatggaggtgatttcaccaatgaaagatggaacatttattgattgggatattgttgacaatatatggaatcatgctttcagcttttatcctgaggagcatcctatgttgatagttgaaccatctacaaacacagggcagcaaagagagaagtatctattgactttaaagatcatgaaggcataa

SEQ ID NO: 12385 - DNA, 1134 bp, Oryza sativa
  Clone ID: TFbOSC900148j.C1.o12.fg
atgggcagggcgccgtgctgcgacaaggcgacggtgaagaagggcccgtgggcgccggaggaggacgccgcgctcaaggcctacgtcgacgcccatggcaccggcggcaactggatcgccctcccccacaagatcgggctgaacaggtgcggcaagagctgccggctgcggtggctcaactacctccggccgaacatccggcacggcggcttcaccgaggacgaggaccgcctcatctgcagcctctacatcgccatcgggagcaggtgggcgaccatcgcggcgcagctgccggggaggacggacaacgacatcaagaactactggaacagcaagctcaagcgccgcctgctcggcggcggccgccggccgcggggcgcgccaccgcggctcgtgctcgccggcccgggccccgctgtaaccgccgccgccacgtcgcgcaacgccatggccgcgtcggcgatcgagcggatgcagctcagcgtgcggctgcgccgcctggaggccgcggcgccgccgccgccgcagcccttcaccttctacggcagcaacaacctcgccgcgccgccgtggcagcagcctatctccccggccgcgggcggcagctcggagatgccacggcggctgcatcaccaccacccctccggcgccgccgctacctcgagctactccggcctgatcagcagctggccgtcgtctcgctcccacatcatccacgacgcctggctcgacgcctcctccaccccgccgctgtcgacgacgagcatgggcgacgccgccacgacgacgacgacggccggcggggagagctcgagctcgacgccgacggtgagcacggccaccacgccgttcatcggcggcagcatcgacatggacgacgagatcgacatgctgctccagcagatcaggtgcttcgatgagaacggcgacgacggcgacgacgacgccgaccagcggctgatcgtcggcgacgaggccgcagccggagcagagaactacctcagggcattgatagacgaggcggcagcgaacggtggcgatgtcggcgttggctcctggagctcttgctctactccaggagtggactccgtgttccatgagtatgctcagctagactacggacagtataattaa

SEQ ID NO: 12386 - DNA, 7080 bp, Oryza sativa
  Clone ID: TFbOSC24631j.C1.o2.fg
atggggaggtccccatgctgcgagaaggcgcacacgaacaagggagcctggacgaaggaggaggaccagcggctcatcgcctacatcaaggccaacggcgagggatgctggaggtcgctccccaaggccgcagggttgctgcggtgcgggaaaagctgccggctgcgatggatcaactacctgagaccggacctcaagcgaggtaatttcaccgaggaggaggacgagttcatcatcaagctccatgagcttctaggcaacaagtggtcactgatcgccgggaggctgccggggaggacggacaacgagatcaagaactactggaacacgcacatcaagcgcaagctcctcgcccgcggcgtcgacccgcagacgcaccgcccgctcaatgccgccgccgaccaccaccagcagcagcagctccaggcgccacggcggttcgccgccgcgccagccggccaccaccaccaccaccctgaccatttcgccgtcctctccaactcgccggaggcctgcagccacagcagcgacgacgagcccagctccgccacgccgccgccgccgccgcgtcacctcggcatcgacctcaacctttccatcagcctagctccttaccagccgcaggatcagaccagcgagccgatgaagcaggaggaggacgacgaagcgtcagcgacggcgaacggcgccggcaatgcagcgatgacgacgacggcgacgacggcggcggtgtgcctgtgcttgaaccgcctcgggctccacggcggcgaggtggagatggatcggcaatggatgtacgctgaccggcggtccaaagagtttattgacggcgtgcactattttttgagagtggccgaagctaacaggcaaaggggttttatttgttgtccatgcaataagtgtaagaatcagaaggagtattctgcatccaggactattcatttccacttgtttgagtcggggttcatgccaagctataattgttggacatcccacggagagcaaggtgttgaaatggaagaagatgaagtggaagacgacaatattccggactttgctcagtatgttggatttgaaggaaatcaaacgggcgaggaggaaatagctgctgatggtaacgacgttgcggatgatcttggtcagatgttgcaggacgccagggaagactgcgaaagtgaaaaggaggcccataaattggacaagatgttggaggaccacagaaattcgttgtacccaggttgcgagcaggggcacaaaaagttggataccactctggagttgttgcaatggaaggcaaaaaatggggttagtgacaaggcatttggcgatttattgaaactcgtcaagaacattcttccggggggaaacaaattgcccgagacaacgtacgaggctaagaagatagtctgcccgttaggactggaagttcataagattcacgcatgtccgaacgattgtatcctatatcgcggtgaggagtatgagaacctagaagcatgccctgtttgcaaagcactacgatacaagattagacgggacgatccaggagaagttaacgggcagctaacaaagaagagaattcctgctaaggtgatgtggtatttccctataataccacggctaaggcgtttgttcaggaacaaggggaatgctagaatgttgcgatggcacgctgaagagcgtcaacaggacgggatgctgagacaccccgccgatggttcgcagtggcgaaacatcgacagaaaatttaaagaatttggaaaggacgcacgaaacatacggtttggccccaagcaacctggtaacgacatcgacgtgtacctaagaccactggtcgaagatcttaaacagttgtggaagaaggaaggtgtccccgtgtgggacgaggacaaacaggaggagtttaacctacgagcgctgctgttcgtaaccatcaacaattggcctgcacttagcaacctatccggacagtccaacaaggggtacaaggcttgcactcactgtatggatgaaacagaaagtacgtatcttaagcactgtaggaaggttgtatacatgggtcatcgtcgattccttgcagcaaaccacccggtacggaagaaaggcaagcacttcgaacataaggccgaccaccgtacgaagcctaaacatcgcagcgggaaaacagtgtttgctatggttaaagatcttaaagtagtgttcggaaaggggcctggaagccagcatatagagagcgaagatggtcacgcggcgatgtggaaaaagaactctatattttgggagttaccatattgggaattcttggacgtacgccatgcaatcgacgtgatgcacctcactaagaacctttgcgtaaaccttcttggcttcctaggtgtatacggaaagtcgaaagatacactggaagcacgtaatgatctgaagcatatggaacaacgcggcgaccttcacccggaaccaaaggagaaaggaagccattacttgagtccagccagctacactcttagcaaggcagagaaggaaagtatgtttgaatgcttggagagcataaaggtaccgtctggatactccacgaatatcaagcgaataataagcacgaaggagaagaagttcacaaacctaaagtctcatgactgtcacgtgttgatgacacaactgctaccagttgtaataaggggtatccttccagacaatgtccgggcaacaataacaaagctatgtgcattcatgaacgcaatttcgcagaaggtcatcgatccggatagattagaagcccttcagaatgaagtggtgcaatgtctcgtcagttttgagttgatatttccaccttcatttttcaatataatgacgcatctgctttgtcaccttgtgaaagagatccgtattctcgggcctatgtacctacacaacatgtttcctttcgagaggtacatgggcgttctgaagaagtatgttcgtaaccgtgctcgtccagaggcaagcatcgccaagggttatggaacagaggaggtcatcgaattttgcgtagaatttatcgaagaccttcgcccaatcggggtacctgaatcacgccatgaagggagactacggggaaagggaactctcggaaggaaagcaataatgacggtagacaacaatttattccgtaaagcccatttcactgttctgcaacactcttcattggtagctccttacatcgaggagcacttggctctagttcgcgccaggaacatcggtaagtccgatgcatggattacacggcatcacattgatactttccccgcgtggctacgacaacatctcatgggtaacgagtcgatcaaccaacaacttgccttcctggcgaggggaccgtctgggtctatcgcgacattccagggatatgagatcaatgggtacacattctacacgagagcccaagacatgaagagcacgaaccaaaacagcgctgttcgtgtcgatgccatgggacacgatggaacaactgccacgtattacggtgccatcgaggacatatgggaacttgactatggtcctctcaaggttcctctgttccggtgccaatgggttaggttgactggtggaggcgtaatgattgatgacagtgggatgacaactgttgaccttaacaaggttggatactcggacgaaccttttgtccttgccaatgatgtaacgcaagtctttttcgtgaaggacatgtctagcaaaggaaagaagggcagagggcctgatgagcctaagcgtcaagtggttctcccaggcaaaagaaaaatcgtcggagttgaggacaagactgacgaggattacgatcagttggatgggcaaccccctttcacggtgacgattgaccctagcatcctcctatcaaatgaagacaccccttactcacgcagcgatcacaaggagggaacaataatggctgaccgcgatgaggaacagatattgtacgatacaatcgcggagggaagcagccagtactggaatgaagaagaggggaacgaggatccaaaccagtacttgaacgaggaagggaacgtggagagggatgcggaggggaaccagcaggggcacgtggaaagggatgtggaggggaaccaggaggaggaggctagtggtagtcaaccctccgttggacagaagagggcacgcgggcaacgaggtgcagcgaagaagcttgagggtcggcacatcataacggaagtggaagaagatggacgtcctagtgccccggccgaagccgccaagaactatgtacgtcacagcggttgggttgtgcgggataacgtgcctgtcagtacggtgtactggcgaagaacaagggcacgcggagatcatgagagctttgtccaagattcggagaaagagatgctgtggaccacaatgctcgagacattcacccttcctgcgggtacagaggacaaagtgaaaaggtggactctgaagaaaatggcagaacagtttcagagcttcaagggagatctgtaccagaagtatatactgaaggggcagacaccgaactttgacacattcccaaagctaagggatcactgggacgagttcgttgcatataagacaggtgaacaagggaaggcgatgatggaaagaaacaaagaaaatgccgccaagaagaagtaccatcaccacttggggtcaggaggctatagcgtcgcgatgccgaagtgggagcagatggaggctagcttgattgagaggggtatcgaaccggcaacagccaattggccggaacgatcgaagttctggtactatgctcacggtggaacgctcaacccagctgatggctcactggtcttcggctatcagatacaagaggctgtgcgacgactaacagatgcagtggaagcctcctctcagggcacgttccgaccagacagagatagggacgagctgacactcgccctgcagactccagagcatccaggacgaactcgagggaaaggggtgattccttggaagattggtttcaaggaggacatccacacgtacaggagtcggatcaggagcaagagagataccgaggcgaagattgcagacctagagttccgggtatcgagctacgaactcaacatgcaagaggaggtggcaaggaaggttgatgaacgcatggccgcacatcggtcccatgatccccagccgaccattcctcctgcaatggtgagcccgtcaggaaaccgtagcagctgcgcctcaacggggcaggtaggatcacagagcatggacgccatgcaaacacaggacgaatcgacctgtcccgttgatgacatcactcagcggacaccatgtgagctgcatattcctttcaagaacttatcaataaaggtggcgtcgggcatggccatcccaacggacccttcaggtacttaccactgcaggccgattccagcaggatactccaaggtcgaagttgagttggtcgaaggcgcgtacgaggacctcgagctggattaccctggaggagacggtgagacgcatctacgagacacatgccatgccattattctatggcgcaggcggtacatcatcctccctgggcgacaagcggcgtctcgtgcaccatctcctccggctccgccatctcctcctcaggatcctgcaccgtctcctcctcatgctccgccagcaccgtctccacctcaggctccagcatcgactcctcaggatcctgcaccgactcctcctcgtgctcctacacctactcccccgcaagctcctgttccggcaccttcaaagtcaagggcccccccagctccaccgcttgcccacacaagggcaacaaagaaggcgaaagttgacgccgccaagaacaaggacccggggtacgattgcacgcaagaggagcttgacgcttacgttgcatcagaagtcaagagacaattcaagcctcgaagtccagaaaagaagattcctatagaccccagtgtcaggaacttcttcaggggtatgtctgcatctgtcaaggaggccatcaagctatcggactatgagcaaacgctgaagaaagcatcttctggaaagtccaaaccagtccctcagcttggagagcaaccaaaccaggagatcgagccgttggtgaccggtaaagaaatgacgatagaacaatttattactgacaccggtctaactacggatcaattgctaggagtcgcaccaatcgaaaaggcggaagtgaaatacatgtacgaactcggtaaaccgcttgtcaagcctgagctgctgcagtccctacccacacaaatgtacaagttccatcagctgtacatggagatgagcgccaccggtagagagatgatcggagcgaggatcagggacacggacttcttgcaaggagatgacattctctggatcaatttcaggggaatctacgaactataccagctggacgccctcgacgtctctattatgagttgctggattttaatggagattcaaagggcccgacggcggagggttttcgatactggattcatcgaccctcggaaagtaaacgtcgcaatgctcgaccaatatccacaagaaacagaggacaatctcgtccatctcctgaaggcgcagcattacaagacgttcatactgttgccatacaacacagaattccactgggtgcttttactcatcgacctggaggcctgcaccgtcaacgtatatgactcaatggataaaaaagagtctacgtttgacaaggttttcgaacttatagacagagcttggtatcggttccgtcatttggtccgcggcaaatggagagaaagacttaggcggaagttcaaatttccttgcgcaaagcaaaagcagggaactaacttgtgcggctattacgtgtgcgagtattgccactgccttgcagaccaaatcatcaccacaagagagctcgattttattcgcatgagggataacctgaccacacacaaggaatttatcgcggcggttcaagaacaactcatgggattcatcaacgaagaaatccttgatcccaagggtgaattctactacgacggaaacacaattcaccggtccttagcttctgagctagcagcgagtactactacgtcgaaatcgtag

SEQ ID NO: 12387 - DNA, 786 bp, Oryza sativa
  Clone ID: TFbOSC26269j.C1.o1.fg
atggggaggtccccatgctgcgagaaggcgcacacgaacaagggagcctggacgaaggaggaggaccagcggctcatcgcctacatcaaggccaacggcgagggatgctggaggtcgctccccaaggccgcagggttgctgcggtgcgggaaaagctgccggctgcgatggatcaactacctgagaccggacctcaagcgaggtaatttcaccgaggaggaggacgagttcatcatcaagctccatgagcttctaggcaacaagtggtcactgatcgccgggaggctgccggggaggacggacaacgagatcaagaactactggaacacgcacatcaagcgcaagctcctcgcccgcggcgtcgacccgcagacgcaccgcccgctcaatgccgccgccgaccaccaccagcagcagcagctccaggcgccacggcggttcgccgccgcgccagccggccaccaccaccaccaccctgaccatttcgccgtcctctccaactcgccggaggcctgcagccacagcagcgacgacgagcccagctccgccacgccgccgccgccgccgcgtcacctcggcatcgacctcaacctttccatcagcctagctccttaccagccgcaggatcagaccagcgagccgatgaagcaggaggaggacgacgaagcgtcagcgacggcgaacggcgccggcaatgcagcgatgacgacgacggcgacgacggcggcggtgtgcctgtgcttgaaccgcctcgggctccacggcggcgagcctcggccagagtga

SEQ ID NO: 12388 - DNA, 7221 bp, Oryza sativa
  Clone ID: TFbOSC900391j.C1.o27.fg
atggggaggtccccatgctgcgagaaggcgcacacgaacaagggagcctggacgaaggaggaggaccagcggctcatcgcctacatcaaggccaacggcgagggatgctggaggtcgctccccaaggccgcagggttgctgcggtgcgggaaaagctgccggctgcgatggatcaactacctgagaccggacctcaagcgaggtaatttcaccgaggaggaggacgagttcatcatcaagctccatgagcttctaggcaacaagtggtcactgatcgccgggaggctgccggggaggacggacaacgagatcaagaactactggaacacgcacatcaagcgcaagctcctcgcccgcggcgtcgacccgcagacgcaccgcccgctcaatgccgccgccgaccaccaccagcagcagcagctccaggcgccacggcggttcgccgccgcgccagccggccaccaccaccaccaccctgaccatttcgccgtcctctccaactcgccggaggcctgcagccacagcagcgacgacgagcccagctccgccacgccgccgccgccgccgcgtcacctcggcatcgacctcaacctttccatcagcctagctccttaccagccgcaggatcagaccagcgagccgatgaagcaggaggaggacgacgaagcgtcagcgacggcgaacggcgccggcaatgcagcgatgacgacgacggcgacgacggcggcggtgtgcctgtgcttgaaccgcctcgggctccacggcggcgaggtggagatggatcggcaatggatgtacgctgaccggcggtccaaagagtttattgacggcgtgcactattttttgagagtggccgaagctaacaggcaaaggggttttatttgttgtccatgcaataagtgtaagaatcagaaggagtattctgcatccaggactattcatttccacttgtttgagtcggggttcatgccaagctataattgttggacatcccacggagagcaaggtgttgaaatggaagaagatgaagtggaagacgacaatattccggactttgctcagtatgttggatttgaaggaaatcaaacgggcgaggaggaaatagctgctgatggtaacgacgttgcggatgatcttggtcagatgttgcaggacgccagggaagactgcgaaagtgaaaaggaggcccataaattggacaagatgttggaggaccacagaaattcgttgtacccaggttgcgagcaggggcacaaaaagttggataccactctggagttgttgcaatggaaggcaaaaaatggggttagtgacaaggcatttggcgatttattgaaactcgtcaagaacattcttccggggggaaacaaattgcccgagacaacgtacgaggctaagaagatagtctgcccgttaggactggaagttcataagattcacgcatgtccgaacgattgtatcctatatcgcggtgaggagtatgagaacctagaagcatgccctgtttgcaaagcactacgatacaagattagacgggacgatccaggagaagttaacgggcagctaacaaagaagagaattcctgctaaggtgatgtggtatttccctataataccacggctaaggcgtttgttcaggaacaaggggaatgctagaatgttgcgatggcacgctgaagagcgtcaacaggacgggatgctgagacaccccgccgatggttcgcagtggcgaaacatcgacagaaaatttaaagaatttggaaaggacgcacgaaacatacggtttggtttgagtacggatggcatgaatccttttggagagatgagcagtggccatagcacttggcccgttacgatgtgtatctacaacctccccccctggctatgcatgaagaggaagtatataatgatgccgattattattcaaggccccaagcaacctggtaacgacatcgacgtgtacctaagaccactggtcgaagatcttaaacagttgtggaagaaggaaggtgtccccgtgtgggacgaggacaaacaggaggagtttaacctacgagcgctgctgttcgtaaccatcaacaattggcctgcacttagcaacctatccggacagtccaacaaggggtacaaggcttgcactcactgtatggatgaaacagaaagtacgtatcttaagcactgtaggaaggttgtatacatgggtcatcgtcgattccttgcagcaaaccacccggtacggaagaaaggcaagcacttcgaacataaggccgaccaccgtacgaagcctaaacatcgcagcgggaaaacagtgtttgctatggttaaagatcttaaagtagtgttcggaaaggggcctggaagccagcatatagagagcgaagatggtcacgcggcgatgtggaaaaagaactctatattttgggagttaccatattgggaattcttggacgtacgccatgcaatcgacgtgatgcacctcactaagaacctttgcgtaaaccttcttggcttcctaggtgtatacggaaagtcgaaagatacactggaagcacgtaatgatctgaagcatatggaacaacgcggcgaccttcacccggaaccaaaggagaaaggaagccattacttgagtccagccagctacactcttagcaaggcagagaaggaaagtatgtttgaatgcttggagagcataaaggtaccgtctggatactccacgaatatcaagcgaataataagcacgaaggagaagaagttcacaaacctaaagtctcatgactgtcacgtgttgatgacacaactgctaccagttgtaataaggggtatccttccagacaatgtccgggcaacaataacaaagctatgtgcattcatgaacgcaatttcgcagaaggtcatcgatccggatagattagaagcccttcagaatgaagtggtgcaatgtctcgtcagttttgagttgatatttccaccttcatttttcaatataatgacgcatctgctttgtcaccttgtgaaagagatccgtattctcgggcctatgtacctacacaacatgtttcctttcgagaggtacatgggcgttctgaagaagtatgttcgtaaccgtgctcgtccagaggcaagcatcgccaagggttatggaacagaggaggtcatcgaattttgcgtagaatttatcgaagaccttcgcccaatcggggtacctgaatcacgccatgaagggagactacggggaaagggaactctcggaaggaaagcaataatgacggtagacaacaatttattccgtaaagcccatttcactgttctgcaacactcttcattggtagctccttacatcgaggagcacttggctctagttcgcgccaggaacatcggtaagtccgatgcatggattacacggcatcacattgatactttccccgcgtggctacgacaacatctcatgggtaacgagtcgatcaaccaacaacttgccttcctggcgaggggaccgtctgggtctatcgcgacattccagggatatgagatcaatgggtacacattctacacgagagcccaagacatgaagagcacgaaccaaaacagcgctgttcgtgtcgatgccatgggacacgatggaacaactgccacgtattacggtgccatcgaggacatatgggaacttgactatggtcctctcaaggttcctctgttccggtgccaatgggttaggttgactggtggaggcgtaatgattgatgacagtgggatgacaactgttgaccttaacaaggttggatactcggacgaaccttttgtccttgccaatgatgtaacgcaagtctttttcgtgaaggacatgtctagcaaaggaaagaagggcagagggcctgatgagcctaagcgtcaagtggttctcccaggcaaaagaaaaatcgtcggagttgaggacaagactgacgaggattacgatcagttggatgggcaaccccctttcacggtgacgattgaccctagcatcctcctatcaaatgaagacaccccttactcacgcagcgatcacaaggagggaacaataatggctgaccgcgatgaggaacagatattgtacgatacaatcgcggagggaagcagccagtactggaatgaagaagaggggaacgaggatccaaaccagtacttgaacgaggaagggaacgtggagagggatgcggaggggaaccagcaggggcacgtggaaagggatgtggaggggaaccaggaggaggaggctagtggtagtcaaccctccgttggacagaagagggcacgcgggcaacgaggtgcagcgaagaagcttgagggtcggcacatcataacggaagtggaagaagatggacgtcctagtgccccggccgaagccgccaagaactatgtacgtcacagcggttgggttgtgcgggataacgtgcctgtcagtacggtgtactggcgaagaacaagggcacgcggagatcatgagagctttgtccaagattcggagaaagagatgctgtggaccacaatgctcgagacattcacccttcctgcgggtacagaggacaaagtgaaaaggtggactctgaagaaaatggcagaacagtttcagagcttcaagggagatctgtaccagaagtatatactgaaggggcagacaccgaactttgacacattcccaaagctaagggatcactgggacgagttcgttgcatataagacaggtgaacaagggaaggcgatgatggaaagaaacaaagaaaatgccgccaagaagaagtaccatcaccacttggggtcaggaggctatagcgtcgcgatgccgaagtgggagcagatggaggctagcttgattgagaggggtatcgaaccggcaacagccaattggccggaacgatcgaagttctggtactatgctcacggtggaacgctcaacccagctgatggctcactggtcttcggctatcagatacaagaggctgtgcgacgactaacagatgcagtggaagcctcctctcagggcacgttccgaccagacagagatagggacgagctgacactcgccctgcagactccagagcatccaggacgaactcgagggaaaggggtgattccttggaagattggtttcaaggaggacatccacacgtacaggagtcggatcaggagcaagagagataccgaggcgaagattgcagacctagagttccgggtatcgagctacgaactcaacatgcaagaggaggtggcaaggaaggttgatgaacgcatggccgcacatcggtcccatgatccccagccgaccattcctcctgcaatggtgagcccgtcaggaaaccgtagcagctgcgcctcaacggggcaggtaggatcacagagcatggacgccatgcaaacacaggacgaatcgacctgtcccgttgatgacatcactcagcggacaccatgtgagctgcatattcctttcaagaacttatcaataaaggtggcgtcgggcatggccatcccaacggacccttcaggtacttaccactgcaggccgattccagcaggatactccaaggtcgaagttgagttggtcgaaggcgcgtacgaggacctcgagctggattaccctggaggagacggtgagacgcatctacgagacacatgccatgccattattctatggcgcaggcggtacatcatcctccctgggcgacaagcggcgtctcgtgcaccatctcctccggctccgccatctcctcctcaggatcctgcaccgtctcctcctcatgctccgccagcaccgtctccacctcaggctccagcatcgactcctcaggatcctgcaccgactcctcctcgtgctcctacacctactcccccgcaagctcctgttccggcaccttcaaagtcaagggcccccccagctccaccgcttgcccacacaagggcaacaaagaaggcgaaagttgacgccgccaagaacaaggacccggggtacgattgcacgcaagaggagcttgacgcttacgttgcatcagaagtcaagagacaattcaagcctcgaagtccagaaaagaagattcctatagaccccagtgtcaggaacttcttcaggggtatgtctgcatctgtcaaggaggccatcaagctatcggactatgagcaaacgctgaagaaagcatcttctggaaagtccaaaccagtccctcagcttggagagcaaccaaaccaggagatcgagccgttggtgaccggtaaagaaatgacgatagaacaatttattactgacaccggtctaactacggatcaattgctaggagtcgcaccaatcgaaaaggcggaagtgaaatacatgtacgaactcggtaaaccgcttgtcaagcctgagctgctgcagtccctacccacacaaatgtacaagttccatcagctgtacatggagatgagcgccaccggtagagagatgatcggagcgaggatcagggacacggacttcttgcaaggagatgacattctctggatcaatttcaggggaatctacgaactataccagctggacgccctcgacgtctctattatgagttgctggattttaatggagattcaaagggcccgacggcggagggttttcgatactggattcatcgaccctcggaaagtaaacgtcgcaatgctcgaccaatatccacaagaaacagaggacaatctcgtccatctcctgaaggcgcagcattacaagacgttcatactgttgccatacaacacagaattccactgggtgcttttactcatcgacctggaggcctgcaccgtcaacgtatatgactcaatggataaaaaagagtctacgtttgacaaggttttcgaacttatagacagagcttggtatcggttccgtcatttggtccgcggcaaatggagagaaagacttaggcggaagttcaaatttccttgcgcaaagcaaaagcagggaactaacttgtgcggctattacgtgtgcgagtattgccactgccttgcagaccaaatcatcaccacaagagagctcgattttattcgcatgagggataacctgaccacacacaaggaatttatcgcggcggttcaagaacaactcatgggattcatcaacgaagaaatccttgatcccaagggtgaattctactacgacggaaacacaattcaccggtccttagcttctgagctagcagcgagtactactacgtcgaaatcgtag

SEQ ID NO: 12389 - DNA, 687 bp, Oryza sativa
  Clone ID: TFbOSC414037j.C1.o7.fg
atggccaccaggatgtgcggccgcgccggcgagccggcggtgcgcaagggcccgtggacgctggaggaggacctcatcctcgtcagctacatctcgcaaaacggcgaaggatcctgggacaacctcgcgcgctctgccgggctgaaccggaacgggaagagctgcaggctgcggtggctcaactacctgaggcccggtgtgcggcggggcagcatcacgccggaggaggacatggtcatccgggagctccactcccggtgggggaacaggtggtccaagatcgccaagcacctccccggccggaccgacaacgagatcaagaactactggaggaccaagatacacaggaagccgcgcggcaggagccagctgctgcaggagccgtgcgaggacgccatgggcatgggcatgtccaccaccaccagcgaggcggcgtcgacgtcggcgtcgagcggccagagccaggccagccccggcgtctgggatgagtacatgcaggcgagcagcttccctcacccggagcttgtctccttcgccgccgaccaccacctcgaaatggccggcgtgggcgaggtcgccgccgccgccgccgcgcagttcgtcccgactgagttcggtttcaatgacggcttctggaacttcgtggacaacttctgggagacgatgccggtttcagacgtggtgtga

SEQ ID NO: 12390 - DNA, 906 bp, Oryza sativa
  Clone ID: TFbOSC400231j.C1.o4.fg
atggcgaggaagtgctcctactgtggcaactacggccacaactcaagaacctgcagcagcagcgccagcgctggacacagggataccaccatgctctgcgacggcggcgacggaggtggcggcagtgggctgaggctgttcggagtgcaggtccatgtcgctgccggcggcggcggtggaggtggaggtggaggtttgccgatgaagaagagctacagcatggactgcctgcagctggcggcggcgggggcggctccgggctcgctcgtgtcgccgtcgtcgtcgtcctcgtcgtcgatgctcctgtcgatcgacgaggggggcttggagagggcgtccaatgggtacctgtctgatggcccccatggcagaattgtccaggagaggaagaaaggagttccgtggagcgaggaggagcaccggctgttcctcgtcgggctcgagaagctgggcaagggcgactggcgaggcatctcccggagctacgtcacgacgaggaccccgacccaggtcgccagccacgcccagaagttcttcctcaggcagagcagcatcggcaagaagaagcgccgctccagcctcttcgacatggtgccgatttgcgagaacggtgcgcgcgtctcggagcagctgagcggcgaaggcgcggcggcggcggcggcggcgtcgacctcactgtcgctgatgaacacgcacgagacctcctcggacagagtggcggcaattgatctgaattccaccgaggaagatgacacggtgggcgcgtcagggaggccgtttttcccggtggttctgatggagcagcagcagcaggcttcccatggacatggtcaccaccaccactgcacgccgctcgacctggagctcggcatgtccgtctcgtcgacgccgtccatcggcacatga

SEQ ID NO: 12391 - DNA, 5001 bp, Oryza sativa
  Clone ID: TFbOSC900286j.C1.o9.fg
atgtcgtcgtctgctgcccgcccctatcagggcgcctctgcctccgcccacgccgccgcagacgcctcgccgacgtggggggctctcggcgccgccgcctgcacctctgactgcctgcctgactcgacgcctcgcatctcctccgccgcctgttcgacgggtggcggtgaagggaaggcttggacgagtacgtctctgagcgacctgcgacgaccgacgagcgccgccgccgccgccaccgactctgccggggacggtagccccgggataggaggagggaggaggcgctgccgagttggcttcttcgccgcgcacggctattaccgacagggcggcggctcctacgaccgctcctaccccgatgaatcgctcggctacacgccgtcgcgctcagaccggtactggctggacgacgacggtggcggcggcggctataagggtttcagccggtacggtggtggtggtggtggtggcagccggagggacggccgtgacatgcggggttcctaccggaggtcgccctttaggggatacgggagcgacttctccagaaaccaccaagaacacccgcctccgccactgaggaggtcgcccctgagatcagttgctgtaccgatgtcttatgaccctcctggtgatagggctgataggggggatagagaccatcatcaccgtgtgactccttggcggccgctgcgccggagggagagcagatctgatgctgcagacgctgctggggctggacctgtgcctgttggacaggccgctgcagcagcggcctcagagaaggacgtttcagctcggtcctcagccgtcgcggctcctcaggtctctgaggaggaggcaccaaggaagaagcctcggcttggatgggggcaaggtttggccaagtatgagaagcagaaggtgcaaggacctgcagagtctgctgaagctgttgccgaaggcagcccaactgccaccgaacaaaagggaatcacccatacaccagcacctgcgccttgtgtgtccccagtggcggcaccatcacccacgccttgtgcgtccccagtggcggcaccatcacccgcgccttgtgtgtccccagtggcggcaccatcacctgcaccgccatgtaaatcaccagtccctgaagataaatcctgtgaactgacagcaaatacagtcactgaatccaataaaaatatcccaggacctgacgttcaggcttgcaataacgaagtccccactaagttagatcagcttgagggtgatcccattgattcgcttgcaaaggtcctttctgaactggtgcaacatgaagattcctgttctggggattcgaaaagactgtccaatgtcagtaagttattgttactgaaggaaagcattagcaaagagctcgaaaagacagaacttgagattgactccttggaaggtgaacttaaatctgttaatgtggaagccagaaatagaacactcaaagatccacctacagctgtaacttatgcacaaaatccttcaccttcacctgtgaaagaacaaggagagctgaccccttctcccaagatttctatggagcaggatgctgatgtaaaaggctcagagctcatggaaatagagacagctcaagctcataatgcaaaagcagtttcttcagaagagagtgttgcttgtcctggagttgctctgggtcaggtccctgccgctgctgatgttatcccatctgatccatgtgggaaaactggttctggaattgatgtcgatattgagcagcgcgaagagaatccatgccaagaaacttttaatgccatgaaagcagatggaagcagtgacttggccacaaggccttgctcttatcgtgaagttaaatataacttaatggatcaaattattgctgcgaacaggagtgaagccaaaaaaaattctcaattactatttaagcctgtgccagctgatcggtccaatcttgatttattggcatcaagctatctttctagccaaatgaagaatgatgtaattatcaagaagaagcatgccatacttaaaaatcgacaaagattcaaagagcagattcttaccttcaagttcagggtgctgcgtcacctctggaaggaggatgtgcgacttctttctgtaagaaagcagcgctctaagtctcataagcgcacagaccagagcaaccgatcatcacagagcggatctcagaggcaacggtcctctaatcgctccagattggctgtaccagctggtaatttaagcacatttcctatcacagaaatgtcaggtgtagcaaggaagctgttttcagaatttcagctcaagcgttgcagaaattacttgaaaatgcctgcactgattgttgacgaaaaagagaaggcaggtgctaagtttgtgagcaagaacggtttagttgaggatcctgtttcagttgagaaggagcgagctttgataaatccatggattcaggaggaaaaggaaatttttatggagaaacttgcaacatttggtaaggatttctccaaaatatccagtttccttcagcacaagacaactgctgattgtattgagttctactacaagcaccataaatctgatagtttccgagaagttaagaaacttcttgatcttcggcagcaacagcaacctgccaacaattacctaggagcagtatctggaaagaaatggaatcctgaggcaaatgcggcatcacttgatatgcttggggtggccacagaggtggcagcccaaggccttgaatatgtgaatgaagtgaagaaaaattctgcgaaatctatcctgaggactgtttgtggtgttgataattctaccaaaggatccgagaaggattgtgttggggatgtttctttgcacgagagagaatctgtagctgctgatgtcttggcaggcatatgtggaactctctccccagaaggcatgggctcatgcattaccagttctgctgatcctggccagaagatagggatcatctcaagaatggagcatcttttaactcctgaagcagataaaaactttgatgatgacggcactctctcagatcaggagtgtgaagttgacatagttgattggaatgatgatgagaagtcaagttttattgaggctatgaatagatatgggaaggatttcgctcgaatttcgtcatacgtgaagagcaagtcatttgaacaatgcaaggtttttttcagcaaggctcggaaatcacttggtttggatctgatccatcaaggtgctgctgatgctggtttccctacaggtgatgccaatggaggaaggagtggtacagatggagcctgtattgctgagatggattcagctatctgtagtgcacagtcatgtcctaaagtggagatagatgcatgtcctgtttctgatggagaaattcaaggacataatcctctttctgatattgcctctaggcagccagaagctgacaaatcaaacatgcctgatgttgtggacataaatgtcgaggaaggtgaaagcaaagcagaaaaagactgcagcattcttgttgatcataaacagttacgtgaagacattaatcaaacatcatgtgctcgtatcgacatcaactgtcctgagagcacagataagctgcaagacatagaggatgtaacaccagtgaacatgcatggagatgatctcatggccacttcagttgaacaggttgcggcagcgcatgtggaaagtagatccagtttacattctgaagggattggcattgatgtttccaggatcgaaggatgttcacatgagagtacaattggtaaaggtggaaaatcaacaccgtctgtttgcttgcctgcagaaaatggggttagtaaggaaaatatcatccacttctcgaacatggatggtgcttcctccattagtcctgcatttacttcaaattatcagcaaagtaagctggcagatccaatccaatcaaaaccgaagccccttaccccaaaggatttaatgcctgtccaatttagttcgtcgctgcctgatcctacctcaatctgttttgagggtatagctgccataactacacccaattttgaggatcatggcaacagagccagcattgcttcaggggcaaaagatgtgaacatgttcccaacatttaaagaccagtccagtaatcgtcatgatgcactgttttctaatgtcgatgggtacatgcaacagagacgaaataatcactttggaactgaagtatgtggcttatctgaaagcacaggcatttcccagtcggaccagttcacagtatcgaaattccagaatggcaggcccagcagcttgggcctttcgaatggaaatcttggggttctatcgactgggagaagagaggaagcacgtgaaggcttgtttaggccttgttctgtcaagacaagtgctgggaatgaggagcagcaaaagcggcctggtgatgtcaagttgtttgggcaaattcttagccatcaatcatccttgcaaagctctggttcatcagttcatggaagcaaaagcaagcccccctcaccaaaggttgataagccagcttcttctaggttgttgagtaatccaagggaacgcctggtttattcttccaggcctccaatcattgctaacttggggctagaggagagagcgatgaggagttttgaccatatggatgggcgaacaatacagcctgagcctatggttatggtggcaaagtgtcagagaccgtcagctggtgtaccagtttactcaaccaaaaatggcgcgctcagcgtgtttgcggaatttcagcaaccttcaatgccgccacatacatcagatcacaaactactagaaaactttgccgatcttcataagaggaatggaatcgaactcctttcggggttccagcagcctgggaggcttgggggtgctggggtcctggttagcggtgtatctgaccctgtggctgctctcaaggcacagtacggctctggttcgaagatgttgagcagcagcaacgacgtggatacatggaaagacataggaagcaggtag

SEQ ID NO: 12392 - DNA, 1074 bp, Oryza sativa
  Clone ID: TFbOSC421430j.C1.o7.fg
atggggcgttcaccatgctgtgagaagattggcctgaagaaaggtccatggacaccagaggaagaccagaagctgcttgcatacattgaggagcatggacatggcagctggcgagcattgccttcaaaagccggtttgcagaggtgcggcaagagttgcaggttgcgatggacaaactacctgagaccagacatcaagagaggaaaattcagcttacaagaagagcagaccatcatccaacttcatgctcttcttggaaacaggtggtctgccattgcaacacatctaccaaagcgcactgacaatgagatcaagaactattggaacacccacctgaaaaagaggttggccaagatgggaattgatcctgtcacccacaaagccatcaacggcactctgaacaacacggcgggagacaaatcagccaaagtcacagccagtctcagccacatggctcagtgggagagtgcccgcctcgaggccgaggcacggcttgctcgagaatccaagatgcgcatagcagcttctacaccaagcaaactccatgcacagtcaaccaacccacctgcttcaacaccttctccatgcttcgatgtgttgaatgcatggcagagtgcaaagatagacctggagtcacccacctccacactgacgttcgcagggagtaatgctagcatgctgccattctcaacaacaaccgccctagaattatccgaaagcaactccaatgtgtggcagcaaagaagcgatgaactggagggtgaagaaagtgagtggaagtttgtcagtaagcaacaactgcagggaatgcatggtaaagagacagaagaacacttcattggctgtgaggagtcatggttcccagggacagccaatatcggagcaggcttcacaggcatgctgcttgatggatccaatatgcatgatacatcagaatgctgggatgagtccagcaatggccaagatgagcaaagaagccaggtgtcagaagatgcagagaataagaactattggaatggcatcttcagtatggtgaattcagagcagccacccctgcagccacctttgctctag

SEQ ID NO: 12393 - DNA, 933 bp, Oryza sativa
  Clone ID: TFbOSC400431j.C1.o29.fg
atggccaggaaatgctccagctgcgggaacaatggccacaactccaggacttgcaccggccaaaggagcctgcaggagagtggcggcggttatggcggcggtggcgccggtggcgtgaggttgttcggggtgcagttgcacgtcggcggtgcgcctctgaagaagtgcttcagcatggagtgcctatcgtcgccgtcgccgtcgccgtcgccggcgtactacgccgcggtcgccgccgccgcctccaactcgtcgccgaccgtgtcgtcgtcgtcgtcgctggtgtcggtggaggaggccggcgagaagatggccaacgggtacctctccgatggcctcatggcgagagctcaggagaggaagaagggtgttccatggactgaagaggagcacaggaaattcctggtagggctcgagaagctcgggaaaggcgactggcgcggcatttcccggcacttcgtcacgacaagaacaccgacgcaggtggccagccatgcccagaagtatttcctcaggcagagcagcctcacgcagaagaagagaagatccagcctctttgacgtgattgaggatgcagaaaaggctccgagtgtgaatgaacgtctgaaactgagacacgagacagcctctgtgcctgctgaaatgggattccctgcactgtcactgggtatcagcagcatggcacagccagaagccatgctgctgcctcctccatccttaaccctgacgccaagctgttcatcaccagcagtgagcagcagcagcagcgaacaaccaagaacaatccatccttctctgatggtggcaaagcctcaggtgcaactgcaactccagccacctgatctggagctcaagatctcgactgtccgtcagaacgatcagcccagttcgtcgccgaggacgccttttttggggacaatcagggtcacttga

SEQ ID NO: 12394 - DNA, 1053 bp, Oryza sativa
  Clone ID: TFbOSC401426j.C1.o6.gm
atggggacggagacggacgtctgggacgatacccttgctctcgctgcaaccaaccacgatcccgaggaggagagacgtccatggctcgcggcggcggcggcggcggcggcggcgaagtgcaggtgctcccgccggcggcggctgcccgagcgggagtggacggcggaggaggacgagcggctgcggcggctcgccaaggagaacctcttccggcaatggtggaaggtcgccagggaaatgcctgggcgctccggtgactcgtgccgcgccaggtggcgccaccacctcgcccgcgacgtctaccaccgccccttcaccgcccgcgacgacgaggagctcgtgcgcctccaccgccacaccggcggcagctggaggaagatcagccgctcggtctacggccgcacctcggccatcatgagggaccgctggatccagctccgccgcagcggcttggtccccgacgccgccaagacggcggaaaacgccggttgcccgccgccggccgccgatgactcggagtacatggggagcgaggcagagttgaagtcgccgccgccgccgccgcagcagcagcaccctctcgccgacgttcttgcctcgagcttggattcttgcaccctagcatccgacgcgacggatccccgggacggcatcctcgcgctagatttcgcgttcatcggtgatgacctcctcctccatccccctcttgcggtggtcgagcagcggcggcgacgacgccctctccaagcggctgtggcggtgccctcccccaccgtgagcagcggcggtggaggtgccctcctgcggcttcccacgggcggatccggcggcgacgtcggcttcccgcgtcggtccagtcgaccaccggctccaccccgtcctcctctcctcattgaggcagcccccttccccggcagcggctacgacctcctcctagttgggcgcaggagtaggcggcggttggagcaggtgttgcggtggcggacacgacagcgacgagctggtggcggtggcgggcacgctagggctcctctctttgtgatgaatttttaa

SEQ ID NO: 12395 - DNA, 846 bp, Oryza sativa
  Clone ID: TFbOSC400282j.C1.o12.fg
atggaccactacgcgtcgagggggaactggttcatggcgcgcaagtggtcgccggaggagaacaagcagttcgagcgggcgctcgccgggctggacctgcggtgcccggactgggaccgggtggcgcgcgccatcccgggcaggtcggcgctcgaggtcatgaaccacttcagggacctcgagctcgacgtccagcagatcgagaatggcatggtgcccttcccggtctacggcgccgccgccgccggcggcgcgttcacactgcagtgggatggcgcccatggcgtcggggacttcaggaacgcgtaccggttcggcggcggcggcggcgggaagcggcacttcggccgtacgccggagcaggagaggaagaaaggcgtgccatggacggaggaggagcacaagttgttcctcttaggactgaagaaatatgggaaaggggattggaggaacatatcccgcaatttcgtgcagacgaggacgccgacgcaggttgccagccatgcgcagaagtatttcatcaggctcaactccggtggcaaggacaagaggagatccagcatccatgacattaccacggttaacctgacggatgaccggcctccctcgccatcacagtcctccttgatcagcaatcagtccaacacatcaactctgaccgcagcggttgcccccttctcatcgacggccgatgtcaagccacagaatgccgcgaatgcgtccttcaattcgccaagccggacacttgggatggcgggttacgggatgggattgcaagatcaaggattgcagtgtggtggtcctctacatgatcagttggccgcgagccgaagcatattgttttag

SEQ ID NO: 12396 - DNA, 837 bp, Oryza sativa
  Clone ID: TFbOSC411316j.C1.o6.fg
atgatgccagtatcatatactccctccgtttcacaatggttgcagcgatgcggcaagagctgcaggctgcggtggatcaactacctcaggccagacctgaagcgcgggagcttctcgcagcaggaggaggacctcatcgtcgcgctgcacgagatcctcgggaacaggtggtcgcagatcgcgtcgcacttgccggggaggacggacaacgagatcaagaacttctggaacagctgcctcaagaagaagctccggcaacgcggcctcgacccggccacgcacaagcccatcgccgccgccgccgcggcggcgacgtcctcggagtcggcggtcacccaggtggatgaggatcacaagccccacggcgccgccgccgccgccgccgccgccgacggcctcgccgcgaacgccaagcagtcggtgttcgacccgttcccggtgaccgacttcggcgccggcttcgacctcggcgcggcgaacatggcggcggcgctgtacggctcccaccccgacgacggcgccgggttcgtcgccgactacagcagcgtgctcgacgtgtcggagaacctgggctacggcgagagctccagcaacagcagcaactggacctgcgccgaggtgagcaatgtgctcgacagcgaggtgctcaactgggccgcctcggccggcgccgacgccgccgccaaggcagagcccttcgccgacatggagcagcagcacagtggctatggcggcgagtatcaggtggaagacgacgccacgctggagcacaagttctcgctaccatgccatgagcagagcttggctcaattcgacttcaacttggaatacttctga

SEQ ID NO: 12397 - DNA, 966 bp, Oryza sativa
  Clone ID: TFbOSC900018j.C1.o15.fg
atggggagagcgccgtgctgcgacaaggcgagcgtgaagaaggggccatggtcaccggaggaggacgcgaagctcaaatcctacatcgagcagaacggcaccggcggcaactggatcgccctgccccagaagatcggtttgaaaaggtgcggcaagagctgccgcctccggtggctgaactacctccggccgaacatcaagcacggcgggttctcggaggaggaagacaggatcatcctcagcctctacatcagcataggaagcaggtggtcgataatagcagcgcagctgccggggcggacggacaatgacatcaagaactattggaacacgaggctcaagaagaagctctttggcaagcagtcgcgcaaggatcagaggcagcagcagcacctggcgcgccaggcggcagcagctgccagcgacttgcagatcaaacaagaagcgagcaggggtgcaaacgaagccgatggcttggctgccggtgccaattacacttggcatcaccaccacgccatggccgtgcctgtgcacccgatgtcggcaccaatggtggtggaaggaggccgtgtgggagacgatgtcgatgagtcgatccggaagcttctgttcaagctcggagggaacccattcgcggcctcgccggcaccgccatgcatacctccaccaccaatgtacgaggaagccccaagcttcgtgccaccattggcgcacggcgtgccgctcaacgaaggcggcatgcagtgctccagcgtgctgccggcgctggagctggacgagaacttccacttcaaccatgtcaagctggacgggctcgagtgcctcttcgggatgggagatcaccaaaacatgagatggaatgaggtgagcccgttggtttgccctaataacgctgtggcgtccagctcccaagggatgcagcagtactgcctagttgaagaaccagctgacctcgggatgcagtag

SEQ ID NO: 12398 - DNA, 1308 bp, Oryza sativa
  Clone ID: TFbOSC400332j.C1.o18.gm
atggggcggccgccgtgttgcgagaaggagggggtgaagaaggggccatggacgccggaggaggacatggtgctggcgtcgtacgtgcaggagcacggcccgggcaactggcgcgccgtgccgcccaggacgggcctcctccgctgcagcaagagctgccgcctccgctggaccaactacctccgcccgggcatccgccgcggcggcttctcccaccacgaggagcgcctcatcctccacctccaggccctcctcggcaaccgctgggccgccatcgcctcctacctcccccaccgcaccgacaacgacgtcaagaacttctggaacacccacctcaagaagaagctcgccctcacctcctcctcctcctcgccgccgacgccgacgacgccgctcgtcgccagggggcagtgggagcgcaagctgcagaccgacatcgacctcgccaggcgcgccctccgcgacgccctctccgtcgacgacgccgcctccccggcgatgatcagcagcgggccgcccgcgccggcggcggcggcggcgtacgccctgagcgagcgcaacatctccgtgatgctgagcggctgggcggcgccgcctccggccaggaaaggattgtcagcctgcaacccggcggcggcgacgacgacgcccggtggcgccgccgcggagagcgcgtccacggccgggacgtcgttggagctcaccgccgactgctgctccggcggcggcgactccagcgcgtccaactgcctgccgtcgtccatgctcctcgcgtgcgacgacggcgacgcgacggcgacggcggccggggtggcgccgctgtcggcgatcgagtcgtggctgctgctcgacgacagcggagagccgcagctggcactggacgagcagctgctggacaagcaagttaaggagattgattgggccgacaccttccagccactggtgccaaaaccccacggcaccatatatgccaacatcgagcagggcttggccgcaacgcgcaggtacccatctattacacaagatcagaatagcacagaatcacgaatcgacaagattcttagaaagaaaaagaagaaaaaacacaaggctgtcggccgctgcgtcgacagccggcgcgccgcccgccgctgcgccgacagccggcgcgccgcccgccacgaggccccgcggtccgccgccgcgccgcagcgccgcccaccgccgcgaggccgccgcccgggcctttgcccgtcggcgtgccgccgcgaggccgccggccgccggccgcccgatgggatgatggagggggaaggagaggagttatag

SEQ ID NO: 12399 - DNA, 1200 bp, Oryza sativa
  Clone ID: TFbOSC402160j.C1.o5.gm
atggggcggccgccgtgttgcgagaaggagggggtgaagaaggggccatggacgccggaggaggacatggtgctggcgtcgtacgtgcaggagcacggcccgggcaactggcgcgccgtgccgcccaggacgggcctcctccgctgcagcaagagctgccgcctccgctggaccaactacctccgcccgggcatccgccgcggcggcttctcccaccacgaggagcgcctcatcctccacctccaggccctcctcggcaaccgctgggccgccatcgcctcctacctcccccaccgcaccgacaacgacgtcaagaacttctggaacacccacctcaagaagaagctcgccctcacctcctcctcctcctcgccgccgacgccgacgacgccgctcgtcgccagggggcagtgggagcgcaagctgcagaccgacatcgacctcgccaggcgcgccctccgcgacgccctctccgtcgacgacgccgcctccccggcgatgatcagcagcgggccgcccgcgccggcggcggcggcggcgtacgccctgagcgagcgcaacatctccgtgatgctgagcggctgggcggcgccgcctccggccaggaaaggattgtcagcctgcaacccggcggcggcgacgacgacgcccggtggcgccgccgcggagagcgcgtccacggccgggacgtcgttggagctcaccgccgactgctgctccggcggcggcgactccagcgcgtccaactgcctgccgtcgtccatgctcctcgcgtgcgacgacggcgacgcgacggcgacggcggccggggtggcgccgctgtcggcgatcgagtcgtggctgctgctcgacgacagcggagagccgcagctggcactggacgagcagctgctggacaagcaagttaaggagattgattgggccgacaccttccagccactggtgccaaaaccccacggcaccatatatgccaacatcgagcagggcttggccgcaacgcgcagccggcgcgccgcccgccgctgcgccgacagccggcgcgccgcccgccacgaggccccgcggtccgccgccgcgccgcagcgccgcccaccgccgcgaggccgccgcccgggcctttgcccgtcggcgtgccgccgcgaggccgccggccgccggccgcccgatgggatgatggagggggaaggagaggagttatag

SEQ ID NO: 12400 - DNA, 2907 bp, Oryza sativa
  Clone ID: TFbOSC26691j.C1.o3.fg
atggatttctactccgacgactccgacccggacatcgacgaggacctgcagagggacctggacgcgctgcgccaatcctgcatcctctccgggaacgaccccgacgcggcggtcgcgcaggtctccgcctgcctcgccgccccgccggcggcggcggcgggagcggaggtgaatggcttgtctgatgacgacgacgaggaggaggacgaggatttggccctcgtccgcagcatacgtgagaatctcctcctcaacaaggcctcgccgtcctcgcccctgccgcgcccgatctgcgcctggccgccctccgactcggaggacgacgaggacgacctcgagacgctccgcgcgatacagcgccggttctcgcactaccactccggtacctccagtgggtcagagatgaacacaaaaactgaggcatcaaaggaagggagtggcaatatttttggaaatgaacttgatgaagaatttgatgcggagaagcacaataaagaggcaactaccagaactgggtttcctaaagctgccttgttgttagtggatgctcttaagaagaacagagcatgccagaagttcattagaaggaagatgattaccattgaagcaaaaattgaagaaaataaggatctcagggatcgtgtaaaatgtcttttggattatcaattaagctgcagaaaagcatttggcaaaattttgtgccaaaaggaggatcctcgtgttagattgatctcctctcgaaagccatgtgcacaatcaacgaagaataaagataagaagacacctgcattatttcttggccctgcagataaccctcatgtttcaaagtacaaaatggtactgaagcaactccctatgtctcttcagaagcaaccgtggtcagatgttgagaaagagaaacttgctaaaggaataaagcagcaataccaagaggcattgattttgaactcgatcaataaaggaagttccaccggtgacttcagtgctgtagatatggcatatgcactgacgaatactgctggcaattttgaggttactcccgaaagtcttagatcggtcctgccattaataaactgggacaaaatagctgctatgtacctgcctggtcgatctggtgctgaatgtgaatcgaggtggctaaactttgatgatccattgattagtcataatgcctggactgctcgggaggaaaaaagacttatactaactgttcaacagcaaggaatgaataactggattaacattgcagttacattgggtactcacaggacacctttccagtgccttgttcgttatcagcgaagtcttaatcactgcatattgaataaggactgggctgaagaagaagatcttcaacttcaagctgctgtcaacacctttggaactaattggcaacttgtatcagctagtatggatggtcgcactggcaatcagtgctctaacaggtggagaaaaaccttaaaccctgaaaggtcaagagtggggagatggtctcttgatgaggataaacgcctcatggtagctgtgaagttgtttgggtctggcagctggaataagattgctcagttcattcctggtcgcacacagagtcagtgcaatgaaaggtggcgcaatgttcttgatcctgatatagatcttggggaatggcgacctgaagaagactccatactattggcatcagtcgatgagtttgggccttgctggtccaagattgctggggcgaagattcctcaccgtactgacaatatgtgcttgagaagatggagaaagttgtgtcaagataaattgccttcagttaaggcagctcaacaaataaagaaatccattcttcaatgcaactttgttgacagagaaacagagcgacctgccattggacccagtgacttaatgccacttgttcgctccaaagttgatggaagtgatgagaacactgtgagtgctaaagtcaggaagccccgaaaacgttctagaataccatgtgaggacaatgtactccctggtgacacatcaaattcttcaccttctatgaatctacctctttctgaatctattgatgctgaggctgctgtaaacacaaccacagcaaattcaaagaagaaaccatctagaagtagatcgaaaaagcaaactgatgaaaatcttgctgtctgtgatgtcaacaactcttctaattgttctagtggagccaggaagagaaagagatctattactgacaaaaatcaagttgtgcaaaagaaaatgaaggggtctatctctggtgataatgaggctgtcgtagagacagtgggcactatcagtgctgataatgaggtagccacgaaacggaagactggctctacatctgttggtgaagaaggcacaaccaagaagacaacgaggggctctctctctggtaaaggagaagtcaacaagagaatgaggggctctatctctggtgttcagaagggagcaaccaaacaaagaatgaggggttcagtctctactgataatcatggtgctgtaatgaaaagcaagagagcaccatcaaggaaatcagccgaagagaactcaaaagctgatagcatggctaatgcagcctttgggtcggaccttccaactgtggcttctgaagatagagatgctaataatggaaatgtgaaaaatgggagactcaagtcaatgccgagacccaagcagataaacatgactgagggatctgcagacaaattttccacatccacgcggcttgctgattgcatgtcattcggccgaatcaatggatccagcagggttgcaagacacttatgtgtgagtgtcaagccgttaagcaacatgatccaatcaaatggaccttctgatgtgtcagctaaggatcccacttctgctgaaacagatcccacttctgttgagaatagcaacaccgcttga

SEQ ID NO: 12401 - DNA, 2142 bp, Oryza sativa
  Clone ID: TFbOSC418457j.C1.o24.fg
aataaagataagaagacacctgcattatttcttggccctgcagataaccctcatgtttcaaagtacaaaatggtactgaagcaactccctatgtctcttcagaagcaaccgtggtcagatgttgagaaagagaaacttgctaaaggaataaagcagcaataccaagaggcattgattttgaactcgatcaataaaggaagttccaccggtgacttcagtgctgtagatatggcatatgcactgacgaatactgctggcaattttgaggttactcccgaaagtcttagatcggtcctgccattaataaactgggacaaaatagctgctatgtacctgcctggtcgatctggtgctgaatgtgaatcgaggtggctaaactttgatgatccattgattagtcataatgcctggactgctcgggaggaaaaaagacttatactaactgttcaacagcaaggaatgaataactggattaacattgcagttacattgggtactcacaggacacctttccagtgccttgttcgttatcagcgaagtcttaatcactgcatattgaataaggactgggctgaagaagaagatcttcaacttcaagctgctgtcaacacctttggaactaattggcaacttgtatcagctagtatggatggtcgcactggcaatcagtgctctaacaggtggagaaaaaccttaaaccctgaaaggtcaagagtggggagatggtctcttgatgaggataaacgcctcatggtagctgtgaagttgtttgggtctggcagctggaataagattgctcagttcattcctggtcgcacacagagtcagtgcaatgaaaggtggcgcaatgttcttgatcctgatatagatcttggggaatggcgacctgaagaagactccatactattggcatcagtcgatgagtttgggccttgctggtccaagattgctggggcgaagattcctcaccgtactgacaatatgtgcttgagaagatggagaaagttgtgtcaagataaattgccttcagttaaggcagctcaacaaataaagaaatccattcttcaatgcaactttgttgacagagaaacagagcgacctgccattggacccagtgacttaatgccacttgttcgctccaaagttgatggaagtgatgagaacactgtgagtgctaaagtcaggaagccccgaaaacgttctagaataccatgtgaggacaatgtactccctggtgacacatcaaattcttcaccttctatgaatctacctctttctgaatctattgatgctgaggctgctgtaaacacaaccacagcaaattcaaagaagaaaccatctagaagtagatcgaaaaagcaaactgatgaaaatcttgctgtctgtgatgtcaacaactcttctaattgttctagtggagccaggaagagaaagagatctattactgacaaaaatcaagttgtgcaaaagaaaatgaaggggtctatctctggtgataatgaggctgtcgtagagacagtgggcactatcagtgctgataatgaggtagccacgaaacggaagactggctctacatctgttggtgaagaaggcacaaccaagaagacaacgaggggctctctctctggtaaaggagaagtcaacaagagaatgaggggctctatctctggtgttcagaagggagcaaccaaacaaagaatgaggggttcagtctctactgataatcatggtgctgtaatgaaaagcaagagagcaccatcaaggaaatcagccgaagagaactcaaaagctgatagcatggctaatgcagcctttgggtcggaccttccaactgtggcttctgaagatagagatgctaataatggaaatgtgaaaaatgggagactcaagtcaatgccgagacccaagcagataaacatgactgagggatctgcagacaaattttccacatccacgcggcttgctgattgcatgtcattcggccgaatcaatggatccagcagggttgcaagacacttatgtgtgagtgtcaagccgttaagcaacatgatccaatcaaatggaccttctgatgtgtcagctaaggatcccacttctgctgaaacagatcccacttctgttgagaatagcaacaccgcttga

SEQ ID NO: 12402 - DNA, 324 bp, Oryza sativa
  Clone ID: TFbOSC401122j.C1.o84.fg
atggaaagtagcggtggaagccagctgggaaagaattccaaaacaagtgatggtcgtgaaacaaaagccacttcatccttgcttctcttaattacggctattcatttcgtagcattatgtccaaaaggggaaaatgaagatgccagaaaagaagttaatagcactgcgcaaaattttgttcatttcacagaagaagaggaagatattgttttcagaatgcacaggcttgtcgggaacaggtgggaacttatagctggaagaataccgggaaggacagcagaagaagtagagaagttctgggcaattaaacatcaagccacatga

SEQ ID NO: 12403 - DNA, 665 bp, Oryza sativa
  Clone ID: TFbOSC411863j.C1.o1.fg
atggggaggtcgccctgctgcgagaaggcgcacacgaacaagggcgcgtggaccaaggaggaggacacagcgccatcattcgcccacattcaacacagcacggcgagggctgctggaggtcgctcccccagggccgccgggttgctgcgttgcgggaagagctgccgcctccggtggatcaactacctccgccccgacctcaagcgcggcaacttcaccgacgaggaagacgagctcatcatcaagctccacgagctcctcggcaacaagtggtcgctgatcgccgggaggctgccggggaggacggacaacgagatcaagaactactggaacacccacatcaagcgcaagctcctcgcccgcggcctcgacccgctcacgcaccgcccgctcaatgccgccgccgccgtcgccggccaccaccacctcgccgccggcggctccagctgctcgcccgacgcaacaagcggccacagcagctgcagcgacggcgacgagtaccgcggcggcatcgacctcaacctgtccataagcccgccgtcgtcgtcgtcccagccgtcttccccgccgccgccgccgcacgaagcagaggcgagacgcgccggagcgacggcgagctacacctaccaccaccactactcggagacgagggagaagatatgcct

SEQ ID NO: 12404 - DNA, 1287 bp, Oryza sativa
  Clone ID: TFbOSC401892j.C1.o28.fg
atggggagacattcctgctgctacaagcagaagctgaggaaggggctctggtcacctgaggaggatgagaagctcatgaaccacataaccaagcatggccatggctgctggagcaccgttccaaaacttgcagggcttcagagatgtggcaaaagctgcaggctgagatggataaactacttgaggcctgacctaaagagaggtgcattctctcaggaggaagaggacctcatcgttgagctccatgctgttctgggaaacaggtggtctcaaattgcaacacggctgcctggaagaactgacaatgagatcaagaatctctggaattcatgcatcaagaagaagctgcggcagaaaggcattgacccaaacacccacaagccccttgccgaggttgatcgaagcaaagcaactcccaccatcagcaatgacaggacctctgaatccagcgatgttgacccatctagtggcgttgctcttcacaacttgagccatcttctgagcgagacggcgcaatcatcagagctgctgccagtgaaggtaactaaacctcgcacacaagctccgggcttggcacgtctgaaggtgccaccgaaggaactatttctagaccagcttacttctggccatgagaacctccctagctgccgttcatctggcccaattcccaatttcccgttccagcagctgttgtgctacaataatgattttaacagcatggacgttggaaacaggaattcactctggtataaccagaatgagtccagtagcagcacaatttccactgtgatgcccccagtttcaccatcaactctctcgacatcaacaggccttaatccatcaccagacaatgcaaactctcgaggcactggcatccacaattcccaattctattgggacaccaacaatcctagcagcagtagcagtacagggagtagtggtaacaacgggttgggattcgagctgcaaagcacaagctcccttttggagaccaacatattcccatggtcagatttagcaccagaaaaggatagccaagcacaactagaggaagaactcaagtggcctgacttgctccatggaacgttctcagagatgccagcgcccatgcagaaccttagccagtcactgtatgaagacgttgtcaaagcagagagccaattcaacatggaggggctctgtgcagcttggtctcaaaacctgctgccacagcaacatcttccagtagtatcagatatgtatgacaaggatttgcaaaggatgtccttgtcttttgagaatatctag

SEQ ID NO: 12405 - DNA, 2430 bp, Oryza sativa
  Clone ID: TFbOSC32697j.C1.o3.fg
atgccgcggaaggcctcgtcgacctcagattcgcgcctgaaatggcggaagtggaagcggaaccccaccgcgtccccgtcgccgtccaaccgctcgtcggccgccgccgccgcggcggaccactccgacgactccgactccgccgccgttaacgaggacgacgactccgcggtccccgaggacgccgacgacgaaaccctagccggggcggaggaccccgtgctcgacctccgcgaggcggaggtgctcccttcggcggagcccgtctcggcgttccccgtcgccacccgacgcgtcgtcaaccggccgcacccgtccgtcctcgccgtcatcgcggccgagcgatccgcgtgcgcgggtgagggttccgccgcggtggcggcggcgccggtgctggagaacatctcgtacgggcagcagcaggtgctctccggggtgctccctgaccacgcttcgctcgcgacggacactgacaagccgtctacctatgtgtgcacgccgccgaatcttatggaggggcatggcgtgaccaagcagttccagggtcgcctacatgtcgtgcccaagcactcaggtccgcctgctctttgcaaccaaaaacctgaatgtctgagctataatgcggcactaacttgtttgcgatttgtagattggttctccccagggatcgtgcacaggctggaaaggcaggtggtgccacagttcttttcagggaagtcgccgggcaacactccagagaagtacatgctattgaggaataaggttattgcaaaatatttagagaacccaagcaagaggcttgcttttgcagagtgccaggggcttgttgcgaacacagctgaattatatgatctcagtaggattgttaggttcttagacacttggggaatcatcaattaccttgcgtctgggtcggtgcaccggggtctaaggatggcaacctcccttctaagggaggagccaaccggggagttgcaactattgactgcgccactgaaatcaattgatggcctaattttgtttgatcgaccgaaatgtaacctccaagcagaggacatttcttcattggcatcaaattcggaggttgtggattttgatgctggacttgcagaattggatggaaagattagggagcgattgtcagagagttcttgcagttattgcttacagcctttgaccagcttgcactatcagtcactaaaggaggcagatatcgctctatgctctgattgcttccatgatgcgagatatattactgggcattcaagcttagattttcagaggattgatggggataacgatagatcagaaaatgatggggatagttggactgatcaagaaacgttattgctgttggagggcatagagaagtacaatgacaactggaataacattgcagagcatgttggaacaaagtcaaaagcacaatgtatttaccattttattcgtcttcctgttgaagatggtttgttagagaatattgaggtgccagatgcatctgtgccatttagagcagaaaccaatggatacccacatttagattgcaatggcagtacttcaggaaatctacctcaaaaaattccacctgataaccagcttccgttcattaattcttctaatccggtgatgtcactggttgggtttttggcttctgctatgggaccaagagttgcagcatcatgtgcaagtgctgctttatcagttttgacagtagatgatgattccagggtgaattcagaaggcatttgctctgattctaggggccaaggtccgcatccgaattttcgtgatcataatggtggtgtatcttcatccatctctccagaaaaggtgaagcatgctgccatgtgtggtttgtcggcagcagctacgaaggctaaactttttgcagatcaagaggaacgtgaaatccaaagactaactgctactgtaataaaccatcagttaaaaaggttggaactgaagctgaagcagtttgccgaagtcgagaccttgcttttgaaagaatgcgagcaagtggagagaataaggcagaggattgcatctgaccgtgtccgaatcgtgtccacccgcttggcctcgcctggaaatagcctacctgggggtagtactagcaccatgtcatccaatccaatgagtatgagccccagaccgatgggcgtgccaggctcgatgcctcaatccagtatgccagcaccatttgccaataacatgcaggggcatggtcacccccagatggcattcttacaacagcagcagcggcagcagatgctgtcatttggacctcgtctgccgctgtcggccatccaaacccagccatccccacagacgtcaaacatcatgttcaacccaggcatgcccaattctgtaacccctaatcatcatcaactgttgaggtcgtcttctggaaacaattcaagtgtaggatag

SEQ ID NO: 12406 - DNA, 1185 bp, Oryza sativa
  Clone ID: TFbOSC400903j.C1.o84.fg
atggagtggacggcggcggagatggacgaggcgaggtcgatcatcgctaggctgaccaacgcttacgactccggcaccctcgttgccggcgccggcaacggcgacacgaggcacgaccgcattgtgagggagctgcaggcgtggctcccatggaggaccatggatcagctaatcgggctgtacattgagctcatggcggaggagcccgcggcggcgcagccgcagtacttcgacgccggcgccgtcgtcgaccctacgttcgacttcttcaacgaccacaacaacttcctcggcatgccgccgccgccggttcaacaagctgatgaccataacatgaacaacgtcgtcgccgacgccggcatgaactactactatggcggcggcggcgccggcggtgccatggtgtttggtggtgcacccatgggggagacggtggagcaggcagctccgccggtgccggtggtgccggtggtgatgaaccgcgacgacgacgaggtgaacaaccagggcggcggccgtcaccgtgctgcaccaacaaatactactaggaggttttggaccactgaagagcacaggcagtttctgagggggctgcgtgtgtacggacgtggtgagtggaagagcatctccatgaacttcgtcagaagcaagacgccggtgcaggtgtccagccacgcccagaagtacttccgccgcgtggagagcgccgccgccgacaagcagcgctacagcatcaacgacgtcggcctcaacgacgacaccgccgccatggacggcaccaacagctacagcaacaataacttcggtggctggcagagtctcgccttcgccggcggccacctcgagcccgtcagcggcggcggcgccgccaggcaagtcatcgctccggcgagctcctccgccgctgccatgaacagcgccgctcagttctgggctcctatgctgttcaacccccagattcagcagcagttcatgcagatgcaggcgcagacgcagcaggcgtggaatgatcagcatatgatgatggctgctgctccaatggagggagcaactgatactaactttgagcctgcaggtgcagttaattattattattatcaacagcagcaggaggaggaggagggaggtgcttatggtgttcctgcggatcagtggatgatgaaccagaacaacaacatgtgctga

SEQ ID NO: 12407 - DNA, 1692 bp, Oryza sativa
  Clone ID: TFbOSC100909j.C1.o10.fg
atggcggcggcggcggctcgcgatgacgacctcggcaacgacgacctcgacgatgaccggtcaaatccacgccgccagtctggaggtcgcacggccggcccaatccggcaggggttgcatggtgacataggcctccaaatgacggcagccatggctggtgacgacgcaaatgacggcggccatggctggcggcggtggctgtcaacggcggcggtcgcggcggtgctcctcagcttaggggatggtggtgacgatgacaaggcaaccgaggggatacgggggagctcagcagggatgtatactgataaaagatcagtttcagaggacacacacctctatccatctactaaacctactataaagccagcccggccacaaccccagatgcacccgctcaccgctgctgccaaacacgccatcaccataccaccaccaccaccaccagccgcagcagctagctacacatcgtcgccgtcgtcaggcactagcgatccatcggttctagatctctcttctgctgagatagacgacgacggcgacggcgacgacgatcgagctgagcagcaagaaatcaagaattcgaaggagttagtgatggggagggcgccgtgctgcgacaaggcgagcgtgaagaaagggccgtggtcgccggaggaggacgccaagctcaaggcctacatcgaggagaacggcaccggcggcaactggatcgcgctgccgcagaagatcgggctgaagagatgtggcaagagttgcaggctcagatggctcaactacctgcggccaaacattaagcatggtgatttcacagaagaagaggagcacatcatttgtagcctctacattagcatcggtagcaggtggtcgatcatcgcggcgcagctgccggggagaacggacaacgacatcaagaactactggaacaccaagctgaagaagaagctcctcggcaagcgcgcgccgtcgcgccgcgcccgcgcaaaccaagaccactgcggtctagcaggcagcgccgccgccgccatgtgcggtggcgtcggcaccgcggcggcggcggcgccgccgcatcaagccctaagctcgtcggccctcgagcggatccagctccacatgcgcctccaaggcctctacaacagcgcgttcggctgcaccaccaccagcagcaacggcggcggcgtcggcgtcgcgccgccgcagtggccgaagctcgaggcgctgctgccgagcagaccgctcccggccgtgcagccgacggacgccgtcgtcgccaccgtgcaacacccccatcatttggtcgtcggcggccataccctcgccaccgccgccgccgccgccgccaccacgtcggaggcgttccaagccgccgagcacctcgaccctgcggcggcgaccggttcgaactacatgccgggagtcgccggtgtagagatgacctcgtcgtcgtcaatggcgggtggtggtgggttcgtcgccggctacggtctccacgacgagctatacgacttcctcttcaagtgcgagtcgatcggcggagcgcaaggcgggatcatcccttcgtcgttgccggagctgcagtgcccggacggcagcgccatcatcggcgccgacgagaagttctcgacgtggacgtcgtcgtcttgcgactacggttcgggcggcgccggcgattacgttctagggtatgatcaataa

SEQ ID NO: 12408 - DNA, 782 bp, Oryza sativa
  Clone ID: TFbOSC4185j.C1.o1.fg
gtacaccttggactgaagaagagcatagaatgtttctaatgggtctgcagaagcttggtaaaggagactggcgtgggatctctcgtaattttgttgtttccaggacaccaactcaggtggctagccatgctcaaaagtacttcattagacagacaaactcatcaagaaggaagaggaggtcaagcttgtttgacatggtcccagaaatgcccatggacgaatccccagtggtcgtagaacagcttatgctccatagtactcaagacgaagccacaagctcaaatcaattgccaatatcacatcttgtgaaacaaaaggaacctgagtttggtacacacctgtcggatttgcagctaaggaaccatgaggaatctgacttcacagaaccttcactagcatcactacacttggagatgaaccatgctgcacctttcaagactaaatttgttctgacaatgccaacattctacccggcattaatacctgttccactaactctttggcctccaaatgttgctaatgtgggtgaatcaggcacaaatcatgaaatcctaaagcccactccagtgaatggaaaggaggtgatcaataaggctgatgaggttgttggcatgtccaagcttaccataggtgacggcagctctaactccatagaaccctctgctctttcccttcagcttactggaccgacaaatacaagacaatcagcttttcatgtgaacccaccaatggctggacctgacctaaataagagaaacaacagcccaattcatgcagtttga

SEQ ID NO: 12409 - DNA, 795 bp, Oryza sativa
  Clone ID: TFbOSC400431j.C1.o25.fg
atggggaggacgccgtgctgcgacagggaggcggtgaagaggggcccgtggtcgccggaggaggacgacgcgctgcgcgactacatcaaccgccacggcaccgccggcaactggatctccctccccaacaaggccgggttgaggaggtgcggcaagagctgcaggctgcggtggctcaactacctccgccccgacatccgccatggcgccttcaccgacgaggaggacgccatcatcacctccctctactccaagctcggcagcaagtggtcgaccatcgcggcgcagctggagaggaggacggacaacgacgtcaagaaccactggaacaccaagctcaagcgccgcctcgccgccgccgccgcctgcacgcccttactgccgctcccggcgccgccgcccctcgccgccacgcacacgtcgccgtcgtcgtcgctgctgctcctcccgccgctcgccgtaccgaccgtcaagaccgaggcgtacacctgcgacgacttcctgcagcagctgctgccgaccgccaccgccgccacggcgctccgggatcccttcgccgacggcgccgccacggacggcggctcgacgtccgcctccgccgcgtcgtcggggtccaactggtcggcggacaccggcgtcgtcgtcgtcggtggcggcggcggcggcgggctgttcccggaattctgcatgagctccgacgacctcgccggcgccgccacggcggaggacgaccacttcatcggcggcggctactactaccctctcgatccgagcttgtcatcatcactagtgtag

SEQ ID NO: 12410 - DNA, 1287 bp, Oryza sativa
  Clone ID: TFbOSC400143j.C1.o23.fg
atggggaggtctccttgctgcgacgagaacggcctcaagaagggcccctggaccacggaggaagatgagaagctcatggagtacatccagaagaacggccatggcagctggagagcgctgcctaagcttgcagggctgaacaggtgtggcaagagctgcaggctaagatggacgaactacctgaggccagacatcaagagaggaaagttcacctctgccgagaaggataccatcctccagcttcacgccgttcttggcaacaagtggtcagccattgccaagcacctcccaggtaggactgacaacgagatcaagaactactggaacacacacctgaagaaggatctgatccagaagggcatcgacccgacgacgcaccggccgaggaccgacttcttcgccgcgctgccgcagctgatcgcgctcgccaacctccgccagctcgtgggccagctgccgtgggacgaccccgccgccgcggccgccgggctgcagcaagccgaggcggcccaggcagcgaagttcggacagtacctgcacctgcaggcgctgctccagcctccgccgccgtccgccgcgactagccccagatcaggctgcatcggcggcgccgccgccgccatgccgggcggcgacatggagcagatgggcgcgggactgcttagcccgccggcgatgtcgtccgcggccttgtcgccgatgtcgacgtcgtccttgtcgccgctgccttcgccgatgtcgtccacggccttgtccccgttgcctccttcgagcttctttggcaatggtggccaaggctcattcctcgctggacaattgcctaacatccaaatgcatggcagctcgttgttcgaccagtcggccgccatcatcaacgacgccaaccacaaccaagattacgctgcaagcactggcgagagggagatcatcaatggcgccacgaagacgacgacgacgacgctgctgccggaaggctctcttccgccgctcgccgactaccccaccatctccaacctcggtgatgtctacagcaccccaagctgcgatggcaacatcactgaattccctctcttgcctgacgccttattcgacgagttgatgagagactatatttccaattgctttctggaagattggaaaaatacagactctaagaatttagatgtatctgatatattacagattcaagttgcagttaagattttgccattagcttctctcagtggcattgggcctgaaccacacctgtcagtgagagagtcagcggctcagtgccaaaaggcataa

SEQ ID NO: 12411 - DNA, 777 bp, Oryza sativa
  Clone ID: TFbOSC407956j.C1.o2.fg
atggggagggcgccgtgctgcgagaagatggggctgaagagggggccgtggacggcggaggaggacaggatcctggtggcgcacatcgagcggcacgggcacagcaactggcgcgcgctgccgaggcaggccggccttctccgctgcggcaagagctgccgcctccggtggatcaactacctccgccccgacatcaagcgcggcaacttcacccgcgaggaggaggacgccatcatccacctccacgaccttctcggcaaccgatggtccgcgattgcagcgaggctgccggggaggacggacaacgagatcaagaatgtgtggcacactcacctcaagaagcggctggagccgaagccgtcgtccggccgggaagccgccgcgcccaagcgaaaggcgaccaagaaggctgcggcggtggcggtggcgatcgacgttccgaccaccgtgccggtgtcgccggagcagtcgctctcgaccacgacgacgtcggccgccaccaccgaggagtactcgtactcgatggcctcctccgcggatcacaacaccacggacagtttcacctcggaggaggagttccagatcgacgacagcttctggtcggagacgctggcaatgacggtggacagcaccgactccgggatggagatgagcggcggcgatcctctcggcgcgggcggtgcctcgccgtcgtcgagcaacgacgacgacatggacgacttctggctcaagctgttcatccaggccggtggcatgcagaatttgccccagatttaa

SEQ ID NO: 12412 - DNA, 2178 bp, Oryza sativa
  Clone ID: TFbOSC414758j.C1.o1.fg
gaagatgacatcattgttcagatggtaaacaaacttggaccaaagaaatggtcaaccattgctcaagctttgcctggacgtataggaaagcaatgtcgggaacggtggcacaaccatcttaaccctggcataaacaaggaggcatggacacaagaagaggaaattaccctcatacatgctcatcgaatgtatggaaataaatgggctgagctgacaaaatttttaccaggaaggacggacaatgcaattaaaaatcactggaacagttcagtaaagaagaaagtcgactcatacatgtcatcaggtttacttacccaagtctcgtgtctccctctaaatgaatactctgcacactgtaattcctcacctgcgttgacccaacaaaacagcgaagacagtggtagctatgctgttcgagaggttgaaaattcatcagtgtgtagtcaatcatcacttgccaaggtttcttgctcccaagtgcacaatgctaatgtggcattgggctgtgatttgcaagtaaatgcgaatgttgacaataatgaagcgcatgattctcaatcttctgtgggtcacgaagcatgctatacttctgtgggggctgttgcaactgctatacctgaggtgcactaccacgtttcttcctctaacttcgatccagatcaacacttgcaagaggagtttgctcaaggattgaatttgcatatgagtatggatgaagtgccaagtaattctagttttgcagacaacccaactatctgtagtatagaaaatcatgaaaggtcattggaaccatatgatgtagcaatggagatgcctctctctatgttaccaagtgattctggagctgagcaaaaactacattttatgtcggaggctgacttcaatagtcctaattgtctgaaatctgaactttggcaggatatttccttgcaaagccttctttctggacctgatgcagttgaaactgattctttttcaagatcaaatcatcaatcggatgtatattcctctcaagcagataatgaatttttagcaccaccctacctattacagacatcaaattcttccagtgtgatggaggctacttatggacagagtccacagatgtcagtaccaccatctcttatctgttcaaatgttatgactgatgtaccttctgataatagatcagaaccaaaagaaatgacagtttctcaggcagaaatggtcacacaatcttccagttcttcaggtgacgctgaaatgtctgctaaccctggtagtagtaatggcagtgatattccttcaatgatggaaaggatacctgaatgtgcggaccaacatgttactaatgcggaagaacctgaagccagtatagagaaagaaccatcggttacaccgagtgctacagcagatgaaaagcaggatgagggagccctattctatgaacctcctcgttttccaagcatggatgttccatttgtcagttgcgaccttgtaacttctggtgatctccaagagtatagtccccttggtattcggcagttaatgcggtcgaccatgaatgtctgcactccaatgagattgtggggctcccctacacatgatgaaagccctgacattttgctgaagagtgctgccaaaagcttcatatgcacaccatcaatactaaagaaacgtcacagagacctcgtgtctcctattccggataaaagaatcgagaagaaatctgggactgaaaaggattgtggggtatcagacacatcctccatcggcattcaaacatgttttattaatgccactaaagatgatgctgttataactaaatcagttttgcgtattgagcgatctgcttcttctaaacctctggaaaagaaacttgagttctctgatgagaacaaggaaaatttggacaacacaattgaacaggcaaaagatggacagagtgcaggaaattacaaacacattgacgagcaggcaaggggggaacggcgtactgcaacaaatataactactacttatgatgatctgccaggcaatttacaacctgcaggtattcttattgagcccaacggtgatgatcttgtttccccagattatgtctgtaaggagggagtgtctgctaaaaagcttgcggaacttattgtggagaaatcttcagcatgcataaatgtggattatgaatatgtgaacatgtaa

SEQ ID NO: 12413 - DNA, 840 bp, Oryza sativa
  Clone ID: TFbOSC400020j.C1.o1.fg
atggggaggcagccgtgctgcgacaaggttgggctgaagaagggtccatggacggcggaggaggaccagaagctcgtcagcttcctcctcggcaacggccaatgctgctggcgtgccgtccccaagctcgccgggttgctccggtgtgggaagagctgccggctccggtggacgaactacctccggccggacctgaagcgtggtctcctgtcggagacggaggagaagacggtgatcgacctgcacgagcagctcggcaacaggtggtccaagatcgcgtcgcacctgccgggcaggacggacaacgagatcaagaaccactggaacacgcacatcaagaagaagctccggaagatggggatcgaccccgtcacacacaagcccctctaccctgctccgccgctggccgacggcggctcgccggagcagaaggtgccggaggaggaggaggaggtggaggagaagtcgtctgctgccgtggaaagctcgacgagcacctgcgccggccacgacgtgttctgcaccgacgaggtgcccatgctgcacctggacgacatcgtcctcccgccgccgtgcgacgtcgtcggcgacaccgccggctcgccggcagagtcgtcgtccacgtcgacgtcgtcgagcggcggcggcggcatcgacgaggagtggctgctgccgatcatggagtggccggagtcgatgtacctgatggggctcgacgacgtcgacatggtcaccacggcggcgccggcgatggcgacgtcgtgggagttcgaggatccgttcaacgcgtaccagaggatcgcgttgtttgatcaccaccacgagctgacgtgggcttga

SEQ ID NO: 12414 - DNA, 1101 bp, Oryza sativa
  Clone ID: TFbOSC400426j.C1.o60.fg
atgacgaggcggtgctcgcactgcagcaacaacggccacaacgcgcggacctgccccgcccgcggcggcggtggaggcggaggcggggtgaggctgttcggcgtgcggctcacgtcgccgccggaggtggcgatgaagaagagcgcgagcatgagctgcatcgcgtcgtcgctcgggagtggcggtgggtcagggggttcgtcgccggcgggaacgggaaggggaggaggaggagggggagagggcgcggccgggtacgcgtccgacgaccccacgcacgcctcctgctcgacgaatggccgcggcgagcggaagaaaggtacaccttggactgaagaagagcatagaatgtttctaatgggtctgcagaagcttggtaaaggagactggcgtgggatctctcgtaattttgttgtttccaggacaccaactcaggtggctagccatgctcaaaagtacttcattagacagacaaactcatcaagaaggaagaggaggtcaagcttgtttgacatggtcccagaaatgcccatggacgaatccccagtggtcgtagaacagcttatgctccatagtactcaagacgaagccacaagctcaaatcaattgccaatatcacatcttgtgaaacagaaggaacctgagtttgctagacacctgtcggatttgcagctaaggaagcatgaggaatctgagttcacagaaccttcactagcagcactagacttggagatgaaccatgctgcacctttcaagactaaatttgttctgacaatgccaacattctacccggcattaatacctgttccactaactctttggcctccaaatgttgctaatgtgggtgaatcaggcacaaatcatgaaatcctaaagcccactccagtgaatggaaaggaggtgatcaataaggctgatgaggttgttggcatgtccaagcttaccataggtgacggcagctctaactccatagaaccctctgctctttcccttcagcttactggaccgacaaatacaagacaatcagcttttcatgtgaacccaccaatggctggacctgacctaaataagagaaacaacagcccaattcatgcagtttga

SEQ ID NO: 12415 - DNA, 1137 bp, Oryza sativa
  Clone ID: TFbOSC411834j.C1.o4.fg
atggatttcagctgcttcaatccccaaccagcaatctctcatggcattccatttgattcctttctgctgcaagatgagctccatcatcatgctgatcttgatcatccatttgaagctgaaggcatcactgttcatgggtctgaacttgaaggtggatctgtgcttccttttgcaactcttcatgatcttgatcatgagttcttcagaagaggaagtaggaaggatttcatcgacaatgcttcgtcgatctttctgttgaaccccaagactgaggtttctcatcttgtaagagatgttcaagttggagcatttggtgcgtatgagatgaatggcaggttgatttcaagaaacaaggcgtcaaggaaaggtatcaagaaggctgatgctgtcaaaggccactggacagtggaagaagacaggaagctggtgaaattagtggaacaatttggactgaagaagtggtctctgataggggggatgctgcctggaagagtaggaaagcaatgcagagaaagatggttcaaccatttgaggcctaacatcaagaaagatacttggagcgaggaggaagacatggttctgatacagatacacaaggaagttggcaacagatgggcagagatagcaaaatgcctacctggaagaactgaaaactccatcaaaaaccactggaatgcaacaaaaagacggcaatttgcgcgacggcgcaaccgttctacctccaaatcaggaagtacagttctgcaaaactacatcaaaagtcttgccatttctccacaagaatcacagatgaacaatgagaggtcagaatctaatccatctgacatgatgatcacccaagggacaccctgctgctttgatgggaacaattgcagccaaagtcacacttctgaagagaatatagttcctagctgtggtgattttgcagctgaaatgtggagtggtttgtttgacacaaaggaagatgaggaggatgaagcacaatacctgctctatgacatggacactcatgttgacatgaactgtattttcagcaatatggattatggtagtaacattgagcctggattagcatcagttgtgaaagcagaatgttcagcagaaagctgggctgtgaatttgaaggagacggattag

SEQ ID NO: 12416 - DNA, 921 bp, Oryza sativa
  Clone ID: TFbOSC400323j.C1.o24.fg
atgacctcccaggcggcgacgacgacgaccacggcggcggcggcggcggcgtggaccagggaggacgacaaggcgttcgagaacgcgctcgcggcgtgcgcggcgccgccgcccgcggacggaggcgcgcccgacgacgactggttcgccgcgctcgccgcgagcgtgcccggggcgaggtcggcggaggaggtgcggaggcactacgaggcgctggtggaggacgtcgcggccatcgacgcgggccgcgtcccgctcccgcgctacgccggggaggagtccgcggcgccgcccgacggagccggagccgccgccgccgcgtccaaggacggcggacaccggcgcgacgagcgcaagggcggcggcggcgggtacgacggcggcaagagctgctccaaggcggagcaggagaggcgcaagggcatcccatggacggaggaagagcacaggctgttcttgctggggctggacaagttcggcaagggggactggcggagcatctcgcgcaacttcgtcatctcgcggacgccaacgcaggtggcgagccacgcgcagaagtacttcatccgcctcaactccatgaaccgcgaccgccgccgctccagcatccacgacatcaccagcgtcaccgccggcgatcaggtcgccgcgcagcagggcgccccgatcaccggccaccaggccacgggcaaccccgcggcggcggcgctgggcccgccgggcatgaagcaccaccaccaccaccacccgggcggcgcgccgccgcccatgcccatgtacagcgccgcgcccatgggccaccccgtcgccggccacatggtgcccgccgccgtcggcacgccggtggtgttcccgccgggccacgcgccgtacgtcgtgcccgtcggctacccggcgccaccggccaagatgcaccaatga

SEQ ID NO: 12417 - DNA, 1197 bp, Oryza sativa
  Clone ID: TFbOSC102162j.C1.o14.fg
atggcgaagcagtcgtgctgccacaagaagaagctgaggagggggctgtggtcgccggaggaggacgagaagctcatgaatcacatcgccaagtatggccacggttgctggagctccgtccccaagcttgcaggactggagagatgcggcaagagctgcaggttgaggtggataaactacctgaggccagacctcaagaggggcaccttctcccaggaggaggaagacctcatcattcagctgcattccatgcttggcaacaagtacgtactgtatagtagtagcacacacatctgtcaatctctctcccgttctgtgccatctctgacaatggcggctgccactgccactgcactggccaggtggtcgcagatcgcggcgcagctgccggggcggaccgacaacgaggtcaagaacttctggaactcgtacatcaagaagaagctcagggaccgcggcatcgaccccgccacccacaagccgctcgctgccgactcctccgcgacgcccacgaacacgacggcggcggcggcgtcgaggtcgacggccacctgccgcgcggtgttcagcgacgccgagctgcagataccgacggcggcggccgtgcagcagcagcagcaggcgccgctcgtcggcgcaatgcagctggtcgacggcatcaagatgccgctcgacgactactggcctgcggcggcggcggcggcggcgccctcgtcgtcgacgacgacgttctcggcctaccaccacgcgctgagcatgcagcagcaggccgcggccggatgcggcgccgccgccgccttcgacatggacgcgctgtcgcactgcggcgtcgtcgtcgccccctcggcgtctagctccagcacgctcacctccatggccggcctcagccccgccgcggccgacgccgccgagcagagcgccaacgtcgccgccgccgccgccgccaccaccaccaacctgccgtggctggacctggggcacgccaaccccatcgcgacgatggaccactacgccggcgtgctggacgagctccggtggtccgactacttcgacggcgcataccaagcagcgacgacggccacccaaggcggcgcccttcaagggcagtgcctctacgacggcggcggcggcggcggcaaggacgtcgacgatgcagtccaattcgtggacgtccatagcctaagcaactggtgctaa

SEQ ID NO: 12418 - DNA, 912 bp, Oryza sativa
  Clone ID: TFbOSC423363j.C1.o16.fg
atgctgattcacggggagggctcgtcgtcgtcggcggcggcggcgggggggaagatcaaggggtcgtggagcccggaggaggacgagcagctgagaggggcggtggcgaggcacgggccgaggaactggacggcgatcagcgaggaggtgcccgggaggtcggggaagtcgtgccggctgcggtggtgcaaccagctcagccccggggtgcaccgccgccccttcacccccgacgaggacgcgctcatcgtcgccgcccacgccaagtacggcaacaagtgggccaccatcgcgcgcctcctcgacggccgcaccgacaactccgtcaagaaccactggaactcctcgctccgccgcaaccgcagggccgccgccgcggccgccgcggcggctgcatccgtgtcgtaccagtccatggatctcaccgaggaggccgacaacgacgacgagggcaccagcgacgactcggtggcgatccctgcgcagtcgtcgccggcggcggtcgtcgctggtgtccctgtgcttccgccgccgccgcccccggccaagaggctgtgcgtggcgccgcccaccggcgtggagcaccgggctccgccgcccgacccgcctacgtcgctgtcgctcagcccgccgggcgccgccgccgccgccatctcagcctccaccgtggtcggcgggtcgtcggcggcgcgcgcggaggaggaggccgtggcgagggagaaggcgaggatggagcaggacccgtggctgatggcgatgatgcggcagatgatcaccgaggaggtgcagcggcaggtgagcgtggtgtactcgctggtggcatcctccgcggcgatggcggcacagacgggcaacgccggcggcgtcggccggaaagggcccgacggccgcccatccaacggtcaggattga

SEQ ID NO: 12419 - DNA, 894 bp, Oryza sativa
  Clone ID: TFbOSC411283j.C1.o2.fg
atggggtgccggtcctgcgacaagccgaagatgaactacaggaaggggctgtggtctcctgaggaggaccagaggctgagggactacattgtcaagcatggccttggctgctggagtgctgtccctgcaaaggctggtttgcagagaaatggcaagagctgccggctgcgttggatcaactaccttcggccaggattgaagcgtggaatgttctctcaggaggaggaggacattgtcatcaatcttcaggccaagctgggcaacaagtggtcacagattgcgatgcatctgcctgggaggacggacaacgaggtgaagaactactggaattcctacctcaagaagagggtgatgcaggcacagggctccatccctaacaatctagcagcagcagcagctgaggtcacctccatgagcaccaccgagccaccatcattgcatcaccatcatcatcaccctcaccatcatcagatcaagaacagcagcggcagcacgaccacctcccatgaccaagacgccaacctgagcagcggcggcagccatggcggcatctctgctcctgcacctgtcgctgagccatttgatcagcagcccaagagcttcgtcttcaccggcgactggatgccgatgtctgcggcggcggcggggcaggagagctactccatctcggcgcagcactggccggcgtccacggcgagctccggcaacgtgacgccgtcgcacggcggcgcgttcggggaccagatgagcggcagctacggcgcattgcagcagcagcatcagagctcagctgctgctgctccaatggcaggaggcggcggctactttgacctgctaaacatgggagacatctatggcggatttgctgccactagtgacgatctgctcttctga

SEQ ID NO: 12420 - DNA, 831 bp, Oryza sativa
  Clone ID: TFbOSC400500j.C1.o30.fg
atggggagggcgccgtgctgcgagaaggaggggctgaggagaggggcgtggagccccgaggaggacgaccgcctcgtcgcctacatccgccgccacggccaccccaactggcgcgcgctccccaagcaagccgggcttctccgctgcgggaagagctgcaggctgcggtggatcaactacctccggccggacatcaagcgggggaacttcaccgccgacgaggaggacctcatcgtccgcctccacaactccctcggcaacaggtggtcagccatcgccgcccagatgccgggtcgcactgacaacgagatcaagaacgtgtggcacactcacctcaagaagaggctggacgacgaacggaagctcgccgccgccggcggtggcggtggccgccggccgcatacgcgcaagcagcccaaggcggcaaagagcgccgccgccgtcaagcgcgaggcgacgccgtccgtcagcgtcgacaccagtagcggcgtgacgtgctccacggtgaccgagtcgtcgccgtcgtcggccgacggcgaccaccggcggcagcagcagcaaacgcagcatgccgctgtcaaggaggagagcttcagctcgggcggcgagctgccggcggcggcggcggcgcccacggcagcggccgacatggacgagagcttctggtcgtcgacggaggtgaccgggatgatggccggcctcggcgacatggacgaggagctggccatcgccggcacgtcgtcggcggcggcggcgaggagcgacgacatggagttctggctcaagatgctcctcgagtccggcgacatgagggatttggccgtcttgtaa

SEQ ID NO: 12421 - DNA, 510 bp, Oryza sativa
  Clone ID: TFbOSC418633j.C1.o10.fg
atggacatggagctctcctcctcctcctcctctaccaccgtcgcttcctcacctgcgtcgtcgccgccgctcgggaggtgcgtcctccgcttcaggctcccgccggcgtggacgcccgaggaggacgccgtcctggagcgcctcgccatggagcacggctcccgccactggcgccgcgtggcggcgcaaatgccgcgccgccgctcgcccgcgcagtgccgcgacaggtggggggaccacctcgcccgcgacgtcttccaccgccccttcaccgccgccgacgacgccgagctcgcccgcctctgcctgcgcctcgacgacgacgctggcttcgccgccggccgccgatggaaggacgtcagcagggccgtctacggccgcagctcgtgcgccgtgaagcgacgctggagggagctgcgcaggagcgacgcgttcctcggcgcgctgtggcgtccgaggacgacgacgacggcgccgccagccaatgccgcgatcacgacgacgtgttga

SEQ ID NO: 12422 - DNA, 828 bp, Oryza sativa
  Clone ID: TFbOSC401948j.C1.o3.fg
atgaagcggaagcggccggcggcgctgcgcggcggggaggaggcggcggcggcggcgctgaagcgtgggccgtggacgcccgaggaggacgaggtgctggcgcggttcgtggcgcgggaggggtgcgaccggtggcgcacgctgccgcggcgcgcgggcctgctgcgctgcggcaagagctgccgcctccggtggatgaactacctccgccccgacatcaagcgctgccccatcgccgacgacgaggaggacctcatcctccgcctccaccgcctcctcggcaaccggtggtcgctgatcgccgggaggttgccggggcgcacggacaacgagatcaagaactactggaactcgcatctcagcaagaagctcatcgcgcagggcatcgacccgcggacgcacaagccgctgacggccgccgccgatcactccaacgccgccgctgccgtcgccgccacttcttacaagaaggcggtgccggccaagccgccgaggacggcatcctcgccggccgctggcattgagtgcagcgacgatcgtgcccgaccggccgacggtggcggtgacttcgcagcgatggtgagcgccgccgatgccgagggattcgaaggaggatttggcgatcagttctgtgccgaggatgcagttcatggtggcttcgacatgggttccgcttccgccatggtgggtgacgacgacttctcctcgtttcttgattctctgatcaacgacgagcagttaggcgatctcttcgtcgtcgagggcaacgatcacgagcatggcaatggtgagattggtcatggagacgtcatggaatccaaacagtaa

SEQ ID NO: 12423 - DNA, 618 bp, Oryza sativa
  Clone ID: TFbOSC401434j.C1.o23.np
tcttttatttccttgaagacttacattaatagaagcataccttcatcatctccatgttctcaatgtaaagagactaaacaagataggttggtcaaaggagggtggacaagggaagaggatgaagttcttaggcaaatggtgagacaccatggagatcgcaagtgggcagagattgcaaagagcctcccaggtcgggttgggaagcagtgccgcgagagatggaccaaccatctgcacccggacatcaagaaagacatctggacagaagaagaggacaggatgctgatcgaagcacaccaaacttatgggaacagctggtcggcgattgccaagcagcttcctggacggtcggagaacaccataaaaaaccattggaatgcgaccaagcgaagcctgaactcaaagcggcgactgagaaagaaaaacagcgagcaaactgtgccagggcagccttccctccttgaaagttacatccgtagctgccagcacatgcttcccacgtcaagaaccactggaacccaaccaagcgaagcctaaactcaaagcagcgactaaggaagaaaaacagcgagaaagcagcgccggggcagccttcccaccttgaagagtgcatctgta

SEQ ID NO: 12424 - DNA, 1104 bp, Oryza sativa
  Clone ID: TFbOSC401196j.C1.o2.fg
atggggagatcaccgtgttgtgagcaggacgccgacgtgaagaaagggccatggacgccggaggaagacaagcttctggtggagtacatcggcaagaacggccatggcagctggcggcgcctcccgaagctcgccggactcaaccgctgcggcaagagctgccgcctccggtggaccaactacctccgccctgacatcaagcgcggcggcttctccgacgacgaggagcgcctcatcatccacctccacgccaccctcggcaacaaatggtcgtccatcgcgacgaagctcaaggggaggacggacaacgagatcaagaactactggaacacgcacctccgcaagaagcttctcagccaggggatagaccccgtcacgcaccgcccgcgcaccgacctcctcgccggcctccccaacctcctggccgccgccaatctcggcggcgccgcccaccagctgcccttggacttgaacgccatcaagctccaggccgacgccgccaagttccagattctgcagggcctcctccgcgtgctcgcctccaccaccgccccgccgcccaccgccgctgtgctacctggcacagacctcatgacgtccatcctcggcgccaccctcgccgccaactccgccggcatactcggacagcagcagcagctcgccggcgttgacctcagccgcctcggccagtacaacggcaactacgacaacctgccgccgttgaccaacgacagctgcacgcagcagacgcagccggccatgtcgagcatgtcccccgacagcctactcaacagaatttccagcggtatttccggggacatgctgggctcgccggagctttgccacggcggggacgggcttagctcgccggagctcggccagggcggcccgagcgcaagcaacatgacgacctcaccgatggcgccgccgccgccaatggtagctgcagatgatcatcagtgcaatactaacacccccagcggcggcggcgacggcatgtcgtgtgagcagacgccggcgtcgagcacgttcgacgggctgaacctggacgacatcgacatggaaggttgttgggcgatgacggacatattgctagcagagtga

SEQ ID NO: 12425 - DNA, 2979 bp, Oryza sativa
  Clone ID: TFbOSC414606j.C1.o3.fg
atggagagccttctggacctccgtcggctcctcaagaaggagaaatcagcaatgaaccaaaaaggcgacgacctctcaatgggtaaaaggctaaaagctcttttgactatcgtaatgaggaccaccggtccgacacggcgttccaccaaaggaaattggacccctgaagaggatgccatattgtccagagctgttcagacatacaacgggaagaactggaaaaaaatagcggaatgctttccggatagaaccgatgtacaatgcttgcacaggtggcaaaaggttctaaaccctgaattagtcaaagggccatggtccaaagaagaagatgaaatcattgttcagatggtaaacaaacttggaccaaagaaatggtcaaccattgctcaagctttgcctggacgtataggaaagcaatgtcgagaacggtggtacaaccatcttaaccctggcataaacaaggaggcatggacacaagaagaggaaattaccctcatacatgctcatcgaatgtatggaaataaatgggccgagctgacaaaatttttaccaggaaggacggacaattcaattaaaaatcactggaacagttcagtaaagaagaaagtcaattcatacatgtcatcaggtttacttacccaagtttcgtgtctccctctaaatgaatattctgcaaattgtaattcctcaccagcgatgacccaacaaaacagtgaagatagtggttgttttgctgtccgagaggttgaaaattcatcagggtgtagtcaatcatcacttgccaaggtttcttgctcccaagtgcatgatactactgtgccattgggctgtgatttgcaagtaaacgcgaattttgacaagaatgaagcacatgattctcaatcttccatgggtccccaagcatgctatacttctgcggaggctgttgcatctgctttgcctgctgtgcattgccatgtttcttcctctaacttggatccagatcaacacttgcaagaggactttgctcaaggactgaatttggacatgactatagatgaaatgccaactgttcctagttttgcagacaaccagactgtttgtagtatagaaaatcatgaaagatctctggagccatatgatgtagcaatggaggtgcctctctctatgttatcaagtgattctggagctgagcaaaaactacatttcatgtctgaggctgacttcaacagtcctaactgtctgaaatctgaactctggcaggatatttccttacagggccttctttctggacctgatgcagttgaagctgattcaatttcaagatcaaatcaccaatcggatgtatattcctctgaagcagatacccattttttagcaccaccctacatgccacagacatcaaattcttcaagtgtgatggggcttgctgatgaccagagtccacagatgtcagtacctccatctcttatttgttcaaatgctatgactgatgatgcacctttcgataatagaccagggcggaaggaaatgccactttctcaggcagaagtggttacccaatcttccagttcttctggtgatgctgaaatgtttgctaaccctggttgtagcaatgacagacatgttccttcttcaacgatggaaagcatacctgaatgtggggaccaacaggttactaatgcggaagaacctgaagccagtctagagaaagaaccatcgcttacacagagtgtgactgcaccagatgaacaggacaagggagccctcttctacgaacctcctcgttttccaagcctggatgttccatttgtcagttgcgatcttgtaacctctggtgatctccaagagtttagtccccttggcattcggcagttaatgcattcaaccatgaatgtctgcacgccaatgagattgtggggctcccctactcatgatgaaagcacgggcgttttgctgaagagtgctgccaaaagcttcatatgcacgccatcaatactgaagaaacgtcacagagatctcttgtctcctattccagataaaagaatcgagaagaaatatgggactgaaaaggatcgtggggtatcagacacatcctccaccggcattcaaacaagttgtatcaatgccactaaagatgatgcacttataactacagttttgcgtattgagcgatctgcttcttctaaatctctggaaaagaaacttgttttctctgatgaaaacaaggaaaatttgggctacacaactgaacagacaaaagatggacagagtgctggaaatgacgaacacatggacgagcagacaacaggggaacgcagttctgcaacaaatgtagctactaatgatgacctgtcaggcaatttacaacctgcaggtattcttattgaacacagcggcgatgatcccatttccccagattatggcaaaaataccatgaatcagaagctgaacacaaatgtgaaatctttatcagtctgtaaggagggagtgtgtgctaaatcaaagcccactgaactcatcgtggagaaatcttcaccatgtataaatgtggattatgaatatgtgaacatattggctgataccccaggtatcaaaagaggactagaatctccttcagcatggaagtccccttggttcgtcgatatgcattttcagggttcatacttcaccagcccagctgatagttacgacgcactaggattgatgaagcagataaatgtgcagactgctgctgctttggtggaagcccgtgaggtactggcaagcggcggccaatgtgacaacataagctctgataaggaaaacacggggaatccagatgccaagaaggaaccagggacaaccaaattgcaaacaaaaatcatggcagagggtagagtcctggatttcgagtgtaccacacctgaaagatcatcagacaaaaatgctggcagcaatctgggaagatatctgagctcacctattccttcgtcccatcttctgaaaagttttagatag

SEQ ID NO: 12426 - DNA, 353 bp, Oryza sativa
  Clone ID: TFbOSC413697j.C1.o1.np
gcgtgcagggaagagctgcaggctgaggtggttcaaccagctggacccgaggatcagcaagaggccgttcagcgacgaggaggaggagaggctgatggcggcgcacaggttctacggcaacaagtgggcgatgatcgcgcgcctcttccccggccggaccgacaacgccgtcaagaaccactggcacgtcatcatggcgcgcaagtacagggagcagtccaccgcctaccgacgccgcaagctcaaccaggccgtccagcgcaagctcgacgccaccaccgcctccgacgccccccaaagaccaggtactggctttggactttcgtcgagcacagtgcgtgctttttttctct

SEQ ID NO: 12427 - DNA, 990 bp, Oryza sativa
  Clone ID: TFbOSC401503j.C1.o8.fg
atggcaaccgacaggatgccggatagtcactttatggcctctagcaatggtggggcctgctaccaaaacactcatggtactccaatcactatgggggtccccaacttaggttgtcttgttgctagcataggcattgctccgtcaagctctcttatgccggagaggggtctggcaaccgctaattacaacttggttgctaactttccagaagatgctgccgtggtgcctcaacaacagcagttgcaagctgcatctagtaacagcaactcagggttgatcaaaggagggtggacaagagaagaggatgaagttcttagacagatggtgcgacaccatggagatcgcaagtgggcagagattgcaaagagcctccccggtcggatagggaagcagtgccgcgagagatggaccaaccatctgcacccggacattaagaaaggcatctggacagaggaagaggacaggaagctgatcaaagctcatcaaacttatgggaaccgttggtcagcgattgccaggtcgctccccggccggtcggagaacaccgtcaagaaccgctggaacgcgaccaagcgaagcctaaactcaaagcgccgactgaggaagaaaaacaatgagcaagcagtgccaaggcagccttccctcctcgaagagtacatccgtagctgccagcacccactgcccaatgagacagcaccacccgcatcattcgatatcggtgggtacggtaccggtgggacgatcggtgcaagtccaaccccacccacagtgcatgcgttgggtggatctactccactagggttggtgatgttccttgacctacttaaccaggctacaccgcacccaccacagccagacttgaacttgttgaacataacaccggtggtgccacatctcaacactagtgaatactgcctacagctcgatgcgaggggcaactgtagtatggccagctgccggtgcaaccccacgggatcagcgcccaggtag

SEQ ID NO: 12428 - DNA, 882 bp, Oryza sativa
  Clone ID: TFbOSC401478j.C1.o97.fg
atggacgcgccgtgtggatggacgacgtcggcggcggcggcggtggcggaggaggaggatgttcggagagggccgtggacggtggaggaggacgcggtgctggccgggtacgtggcggcgaacggcgaggggcggtggaacgagctggcgcgggcggcggggctgaggcgcacggggaagagctgccgcctccggtggctcaactacctccgccccgacgtgcgccgcggcgacttcaccccgcaggagcagctgctcatcctcgagctccacttccggtgggggaaccgctggtccaggatcgcgcagcacatgccggggaggacggacaacgagatcaagaactactggcggaccagggtgcagaagcacgccaagcagctcggctgcgacgtcaatagccgccagttcaaggacgtcatgaggcacctctggatgccgcgcctcgtcgagaggatccacgccgccgccgcctcgtcggaacgcgccgcgccgccgccgtgtgccgccgcgccggctagtcacagcggcatgtgccactcacctgacccgtcaaccacgacgtcgagcatggcagggtcgtcggtgacgcacggcgagcagttcccgtcgtcgacgaaccaccacctgatgaccatggccagcgtcaccaccgcagcggcagattggtccagcgagcaatgcggcagcggcagcgccaccagcacgagcgttgggatcagttatgacatgttcgaggggagctggtcggagctcctcgcccgcgcctacgacgacgacggcgccgattcttcgctgctgccggacttccaaatggcagacaccggagacaactgctggtggagtaatttggaggacatctggtcacagcagccgtactga

SEQ ID NO: 12429 - DNA, 933 bp, Oryza sativa
  Clone ID: TFbOSC400554j.C1.o1.fg
atggagatgatgaggatggcgatgagcccggcgatgtcgtcggcgacggcggcggcggcgagcgaggacgagggcgacctgaggagggggccatggacggtggaggaggacatgctgctcgtcgactacatcgccaaccacggcgagggtcgctggaactcgcttgctcgctgtgcagggctgaggcgcaccggcaagagctgccgtctccggtggctgaactacctccgccccgacgtccgccgcggcaacatcaccgccgacgagcagctcctcatcctcgacctccactctcgctggggcaaccggtggtctaagatcgcgcagtatttgccggggaggactgataacgaaataaagaattattggaggaccagagtgcaaaagcacgcgaagcagctgaggtgcgacgtcaacagcaaggagttccgcgacgtcgtccgccacgtctggatgccgcgcctcatcgagcggatccaggccgacgccgccgccgccggcgaagttgcggcaccggcgccggtgtcggcggcggcgacgaggtcgatgagctcgccggctggcgcgatgtacctccaccaccagcagattccgctcgccgccggcgccatggtggtggcgccggcggtgagtagcgaagcgtaccaccaccacggctgcggcggcggcggcgacacgagctgcagcgagccgagccaggcggcggtgaccatgagccccgacgacgcatccagcacgctccggtcgtcgtcggcggcggcggagaacgacacgatccacggcgacgtgcttagcggcagctggtcggagcttcttgccaccaccaccaccaccatcgccgccaccgccggcttgccggacttcgatgagctcggagatttcgaggacaacttatggagccttgaggacatttggctgcaccagcagtgttga

SEQ ID NO: 12430 - DNA, 801 bp, Oryza sativa
  Clone ID: TFbOSC401138j.C1.o13.fg
atggagttcatcgacgacgactgggactaccagccacgcgcgcgagtcatccactcccgcagcaacgctaactccaacggtgccaccaccgcctcgtcgtcccaaccgacccgctccctcccccacaccgccgcctgcgccgccgcggccgtggcgctcctcgccgcggcgtactacctcctcccggactaccagagctcgagctcgaacccgacgcctccgcccccgaagccctcagatccgatcgcgcctccgccgccgcgacacgcggcggctgcggctgcggctgcggcgacggccgtgtcggatggcggcgaggcggtggaggacgccggcgagtggaccgaccaagagatggacatcctccgccgccagatggtgaagcacccggcgggtgagccgcagcggtgggagaagattgccgcggcgttcggcggccgccgcacgccggagagcgtaatccgcgcggcgaagtccggcggcggcgctgctgccgcgggggcctcgttcgaccagttcctccgcaagcgcaagccgctcgacccgaggtccgaggcgaccgacgcaggaagtggcaatgccggaggaggaggaggggagagtggtgatgggtcttggagcgccggcgatgaccgggcattgctcaacgcgctcaaggagttccccaaggacacggcgatgaggtgggagaaggtggcggtggcggtgcccgggaagacgaaggcagcttgcatgaagagggtcaccgagctcaagcgcgatttccggagcagcaaggcagcatcggaggcagctccatag

SEQ ID NO: 12431 - DNA, 837 bp, Oryza sativa
  Clone ID: TFbOSC416144j.C1.o8.fg
atggcggaggcggaagcggaggaggagatgatgatgaggatgatgtgtggttcaggaggcaacgagatgatgaagacgaagatgaagaagaagaatagagaaggggaagaagaagaagaagtaagtggaggaggtaggatgaggaaggggccatggacggagcaggaggacgtccaactggtatggttcgtgcgcttgttcggggaacgtcgttgggatttcttagcaaaggtctcaggtttgaagcgcacaggcaagagctgccgtctccggtgggtgaactacctccaccccggcctcaagcgcggccgcatcaccgccgacgaggagcgcctcatcctccacctccactcccagtggggcagccgctggtcccgcatcgcccgcagcctccccggccgcaccgacaacgagatcaagaacttctggcgaacccacatgcgcaagatcgcccaccacgccaagaagaagaccaattcaccatcgccggcgccgacgacctcctccggttccttgtcctcctcgctcaccacggcgacgacgacgatggcgacggctgcggcgctgcaagaaagcagcagctgcggcggcgacgacgaggccgtcgaccagctggtggcggcggccaccacgccggcgagccagctgctgacgatggactacaccatggaccagctctggaacgacatcgcggcggcggaagccgatacgagctgctacgacgcggcggcgatggcctcgccgccgtcgccggtctgggaattctgcaccgactactcgctgtggaggatcgacgacgaggagtactacaagaagatgctcgatgcctcgcaatag

SEQ ID NO: 12432 - DNA, 930 bp, Oryza sativa
  Clone ID: TFbOSC900101j.C1.o12.fg
atggggaggcagccgtgctgcgacaaggtggggctgaagaaggggccatggacggcggaggaggaccagaagctcatcaccttcctcctcaccaacggccagtgctgctggcgcgccgtccccaagctcgccgggcttctccggtgcgggaagagctgcaggctacggtggacgaactacctccggccggatctcaagagggggctgctctccgacgccgaggagaagatcgtcgtcgacctacatgcccaattgggcaataggtggtctaagattgcgtctcatttgcctgggaggacggacaacgagatcaagaaccactggaacactcacatcaagaagaagctcaagaaaatggggatcgatcccctcacccacaggcccctccagccgccgccgtcgccgtcgccagagaagaagcacgcagagagaaagaacacggcggcggcggcggcggtggccgagcagcatcagcacgacgaactctgggaggaggagtccccgggattctgcaccgacgaggtgccgatgatccacccggacgagatcatggtgccattgcgcgaccacccgccgccggtttgcacggccgccggtgcctcgacgccgacgacatcgtcgtcgtcgtcgtcctcgtcggtggcctcctcgacgacgagctgcgacgaggtcgacgccgcggcgctgctcccggtcctggagtggcccgacgacgccatgtgcctgatggagctcgacgagctgatcgccgcggcggcgccgccgtccctgctgtgggacgacgactaccgcctcccgctgccgccgccgccgctatcgccgccggcgatgtacgaggagctagacgcctttcagtgctacgaccagcagaggagcgcgtttgagcaggaggcagcagcttcagcgtggaacaagcttgagctcttctaa

SEQ ID NO: 12433 - DNA, 1686 bp, Oryza sativa
  Clone ID: TFbOSC30916j.C1.o2.fg
atgcgtgtggggaaggcaaagaggcggctggatctatcgacgagaagggggacagatgagggcgggcgcaccaactgctggaagacggccacgtcagcaccgtcgttggcgcgcgctacggcggtgcgggtgctggccacggacccagatccaagcggcgtggcgtgtgtgcgatgtgatgtgaacggggaacgagtgcgggcgtggtcgtgtggggcaaaaacatgtggtatgggagctgggcgcaagctcaagacccaccgcaggaaccaaagatgggccgacaaggcatacaagaagagccactttggcaatgagtggaagaaaccctttgctggatcatctcatgccaagggcattgttttggagaagattggtattgaggccaagcagccaaactctgccatctgtaagtgtgctcgtgttcagctggtgaagaatgggaagaagattgctgcctttgtgccgaatgacggttgcttgaacttcatcaaggaaaatgaagttgcgtatgtcgatggcatttatgggattaaagtgcttgtcgatgctctcagctcgagcagattgagaggtcgcgatggatcaggaggtgatcatggcgacgccaccgctgccgccgccgcctcgcgcgaggtggcgccaccacctcgcccgcgcgacgtctaccaccgccccttcaccgcccgcgacgacgacgagctcctgcgcctccactaccgcctcggcgaccgctggaaggagattggccgggccgtttacggccgcacatcgcgcgtcatgaagcaccgctggagggagctccggcgcggcggcttcctcgctgctgccgcaaggaaggagctggcggcgctcgacatggcggacgacatggtggaaactagcgaagtggaggagccagctgatcagtcgctgccgtcgctagagttgcagcgcagtacccttgcggacactcttgcctcgagcttcggttcttgcagccttgccactgaccacgtgatggatcccctggccggcagcctcgcgctaggaaaataccaattctttactattataaaaattgaagatgtttttaccggtactttggtacgtcatccttggttgcctcgcctcgtcaaggagaacggcttccgccactggagtagggtcgccaggatcatgccacgccgctctgcaaggttgtgccgtgacaggtggtgccaccacctcgcccgcgacgtctaccaccgccccttcactgcccgtgacgacgacgagctcctacgcctccactaccgcctgggcgactgctggaagaagattggccacgctgtctacggccggacctcgcgagtcatgaatcaccgctggagggagctccggcgcagcggcttcctcgctgctgctgcaaggacggagcagaagctcgacatggcggacgatatggtggaaagcgaagtggaggaatcagatcagtcgctgcccactactaggaaaagcattatcgcaaccggccgaaaagggtctttgcaggcggggcagccgtccgcctgtaagccaacgactgtgaagatcgccgatcttcgcaggcggggcggccgtccgcctgcgaagataattttcgcaggcggacgttggctagtccggtccgcttgcgaaaagaagaatcggccgcctacaaaaaaaaacttccgcctgcgaagatag

SEQ ID NO: 12434 - DNA, 864 bp, Oryza sativa
  Clone ID: TFbOSC400258j.C1.o35.fg
atggggaggtcgccatgctgcgagaaggcgcacacgaacaagggggcgtggacgaaggaggaggaccagcggctgatcgcctacatcaaggcgcacggcgagggttgctggcggtcgctgcccaaggcggcggggctcctccgctgcggcaagagctgccgcctccgctggatgaactacctccgccccgacctcaagcgcggcaacttcaccgacgacgacgacgagctcatcatcaagctccacgcccttctcggcaacaagtggtcgttgattgcggggcagctgccggggaggacggacaacgagatcaagaactactggaacacgcacatcaagcgcaagctcctgagccggggcatcgacccgcagacgcaccggccggtcagcgccgggagcagcgccgccgcggcgagcgggctgaccacgacggccagcaccgccgcctttccgtcccttgcgccggcgccgccgccgcagcagcacaggctacacaacccggtgcacgccgcggcgccgagcaatgcgagcttcgccaggtccgcggcgtccccgccgtcggaggacggccacagcagcagcggcggcagctcggacgcgccgcggtgccccgacctcaacctcgacctcgacctcgacctgtccatgagcctgccgagctcgccgcccaagacgccggccgccgcgtcgtccacgaccgcgtcgcgccaccatcaccaccagcagcagaagaccatctgcctctgctaccacctcggcgtccgcaacggcgacgtctgcagctgcaaggcggccgcgccatcgccggccggcccacgcgcgttccggtttctcaggccactggaggagggccagtacatatag

SEQ ID NO: 12435 - DNA, 2574 bp, Oryza sativa
  Clone ID: TFbOSC401213j.C1.o25.fg
atgtcgccgccggtggccggcgccgcctcctccggcgacgggccgccggggcgcccgccgcgcgagctctacaccatccctgcctcctcgggttggttccagtgggatgagatccacgagacggagcggcgggcgctgccggagttcttcggcggcgccggggggagcgggttcgggacggcgtcgcggaacccgcggatctacagggagtaccgcgactacatcatcagcaggtaccgcgaggacacctcccgccgcctcaccttcaccgaggtccgcaaggcgctcgtcggcgacgtcacgctcctccggaagctcttcgccttcctcgactcctcgggcctcatcaacttctccgcctccccctcccgccccgaggcgcagcagcagcagcggcagacggaggcggaggccgtcgtggaggcgcccgtggggctgcaggtgacgccacggccgccgccgtcgtacttcgcggaggagaagggaggagggggcaacgagaacggattccgtttgccgccgctgacctcgtatagtgatgtatttggagagtgggcgcctgggatggcgcctatatgtgggctctgtggcatggagtgcagagacgggaatgcccaaatattgaaggatggttttaaagtatgctcaaaatgttatgccaataatgataataagggtgaagcaaatatacatccaggtgacaaaaaggagcggatcgacaatcattcttctagtgcatggacagatgcagaaactctccttctcttggaaggtgtactaaaacatggagatgactgggatctcatcgcccagcatgtccgcacaaagaataaatcagaatgcattgcaaggctaattcagttgccttttggtgaacatatgctgggcacagtaaatggtaaattggataacagactccataaaatccaaacaaccgatggaaaagtgaacaagtccactgtgaaggagtcttcaagtcaaccaactgaaacagttgatgacatgcagattgatggaaatgaagatggcgctgataaatctgttgaagaacatcctacaaaacatagacggttgttttcttcaatagatatcactgtctcattaatggagcagttagcgcatcttaccacatcgacaagcccagatgttgttgctgcagctgctgatgccgcaattaaagcactgggtaatgaaaacccccaagcaaggagagcttttcaactcagtgagaaagagtaccaaaccagggcattctcttctaaccatgcccggcagagggattattgcagtgatgatgttggtggtggtgatcgggatgtagaaatgcacgggcacccagaccaggaagaacgggaaatggagctcctaatggcgtccataatagaaactcagctaaaaaagatccaatacaagatcaaacactttgaggagctagagttgatcatggatcaggaatacgctactctacagcaaatgaagtcttcccttgtcgatgaatggcaaaagcaaagccagcaattcggtgtttggagaattggagccatcctgaaccgtttagggtttgatcggacggctggtatggaatctcacagaagggcaccaccatttttccccaacgcggagcggcggaggcggcagccaaaaacccctccctcctcccctcctggactctcggtttcccctaacctcgcgcgccacctctcctctcctcgtcctccgcctccggacgcgcagttcacgggcgccctaatggcgaaaaagggcaaggcggcggcggcggaggccgcggcgcccgacgcgggggtatcgagcccgcagggcggcggcggggagaaggagggcagcttcctgctgggctcgccgacctgggaggacgccgggggcgggcggtggcggtgcaaggagacggggcacgagctgccggagcgggagaaggaggcgtacgggcggtcccgcgcgtgcaggctcgcgctcatcgaccaagccgtcgcgcgcaagaagccgccgctcaacgccttcaagcctcaccccgagcacaagtcgaagcttatatgcaatattactggggacattataaacaagtcggaggaacacatctggaagcacatcaatgggaagaggttcctcaacaaactagaaaaactagaagaaaagatggcatcaggtgaaatggccgaaggtgaagctgaacagtcaaatgaaggggaaaataaaaccaagtcaaggaagaagaaggacaagaagaaagctgctgttgttaacccttctttgccacgagaacctaaaccagagattgatgattcagataattctgatgatccagatttctgggtgcctcctgttggaagtcgttgggatgatgatgatggaaaagaccgatggacctcctctccagtgaaggataaggatgatgcagcagaggatgaagatggtgatgacgatggtgatgacatggctgacaaggatgacaaggagacaagagaaattgcttcaaggacaaagcgactgtcagtagaagcagttggcccaagtagcttcgcttcaaggaagaaaaaaaccaaaaaggagcagtaa

SEQ ID NO: 12436 - DNA, 921 bp, Oryza sativa
  Clone ID: TFbOSC7723j.C1.o2.np
gactcacgctttggttgtagattttgctgagactatgcgcaaggaatttgagatgagcatgatgggtgagttatcgtactttttgggattgcaaattaagcaaacacctcaggtacttttgtgcatcaaacgaagtatacgaaggatcttttgagagggttcaagatagagaattgcaagccaatttcaacaccaattggttctacagttgtgttggatcctgatgaagatggtgaagctgttgatgaaaaggaatatagaagtatgattggatctttgttgtatctaactgcttctaggccagacatacaatttgttgtgtgtttgtgtgcacgttttcaagcttctccttgtgcttcacatcgtcaagtggtcaagcgaataataaggtatttgaatcatacacttgggtttggaatttggtattctacttcatcttctgtatgcttaagtggatattccaatgctgattttggaggttgtagaattgatatgaaaagtactagtggaacatgtcattttcttggtacatcattgattgcatggtcgtctaggaaacaatctagtgttgctcaatcaacttctgaatctgaatatgttgctgctgctagttgttgttcacagattctttggcttttatctactttgaaagattatggtcttacttttgagaaagtacctctcttttgtgataatactagtgctattaacattgctaagaatcatgttcaacactcacgcacaaagcacattgatattcgttttcactttttaagggatcatgttgagaagggagatgttgaattgcagcttttggacacaaagttgcgaattgctgatattttcactaaacctttggattctaatcgctttgcttttcttcgtggtgaattgggcataattcatccttttggcatggtt

SEQ ID NO: 12437 - DNA, 1212 bp, Oryza sativa
  Clone ID: TFbOSC401780j.C1.o7.fg
atggggagggcgccgtgttgcgacaagaaggggctcaagaaggggccgtggacgccggaggaggacaagctcctcgtcgactacatccaggccaacggccacggcagctggcgcctcctccccaagctcgcagggctgaaccggtgcggcaagagctgccggctgcggtggacgaactacctccggccggacatcaagcgcgggcccttcaccgccgaggagcagaagtccatcgtccagctccacggcatcgtcggcaacaagtggtccatgatcgcggcgcagctgcccggccggaccgacaacgagatcaagaactattggaacactcacctcaagaagcagctgcgccggatgggcctcgacgatccgccgcccgggccggcggcgggctgcccggcggcgcgtcacatggcgcagtgggagaccgcgcggctcgaggccgaggcgcgcctctccctcctctcctcctccggcgccgcggcgacgacgacgatcaccgccgccaccaccaccacctccgcctcgtcgtcctccaccaccgcggggcccgtcgccgccgccgcgacgtcacccgcggacgtgttcctccgcctctggaactccagcatcggggactccttccgcaagctagccgtggtggcggcggggtcgtcgtccccttcgcgggcggacgtcacgaaggacgctgtgaagcaggaggaggaggcggcgccggccggggacgactcgtcggcggcgtccaacgaggtggaggcggcgaccatggcggtggacgagtaccagatgttcctcgacttcgccggcgaggagctgggcctgttccacggccgtttacttttactgtcttatgagcatgtcgtgactatcccgacgtacggtggagtcatagaagatgggtatgttggtgttgcagtgcacgttcttgaagaccgtgaggcaggcaaagaaaaaggagtaaatgcaccggatagccggtggggccagcccgacgagaaaacgaatttattgccacgctcagataaaaggccaaaccagagcagcgaaaggtttgccacgacacctgcagcacaggagcagcctgttgcctgtggtggcttcatcgccaggaaagaacagaaatgggcagggcaagctcgtcgcccctacgctaatgattctcttctgggagatactattaaatgccgtgccattgtggtcctttggatatga

SEQ ID NO: 12438 - DNA, 1230 bp, Oryza sativa
  Clone ID: TFbOSC401601j.C1.o8.fg
atggccgggggaggcggtagcctggcggtgggcggcggattgaacgggtggcgaggcgtcagcggcagcgtcggagctgcggggctagaggagggtagtgggccggcttggtggcgggggcatctaaccgccaacggctcgaggatgaagaagggggggggttctcgccggcacgctattccaactggcgaggcgggtagcggcgcggtcagtagagtcgccgtggccgtggccgtgtatgtggactcgtcgatcgagcaggagcagttggaggaggtggtgccgtggtggggattgatggggaggccgccgtgctgcgtgaaggcggaggtgaagaaggggccgtggacgccggaggaggacctcatgctcgtcgcctacgtccaggagcacggcccgggcaactggcgcgccgtgcccaccaacaccgggctgatgcggtgcagcaagagctgccggctccggtggaccaactacctccggccggggatcaagcgggggaacttcaccgaccaggaggagaagctcatcgtccacctccaggccctcctcggcaacaggtgggcggcgatcgcgtcctacttgccggagaggacggacaacgacatcaagaactactggaacacgcacctcaagaagaagctcaagaagatgagcgccaccggcggcggcggcgacgacggcgagggaggtggcgccggcgaggtgaagaccagggcggctgcgccgaaggggcagtgggagcggcgcctgcagacggacatccacaccgcgcgccaggcgctccgcgacgcgctctcgctggacccctcgccgccggccaagccgctggactcgtcgtcgggcgccacggcgccgccgtcgtcgcaggcggcgacgtcgtacgcatccagcgccgagaacatcgcgcggctcctggagggctggatgcgccccggcggcggcggcggcaagacgacgacgacgccgtcctccgggtcgaggtcgtcggcggcgtcggtgctgtccggggaggccagccacagcggcggcgccacggcgccgacgcccgacggctcgacggtcaccagcaagacgaaggacgaggagaccgccggcgcgccgccgccgccgccgccgccggcgttctccatgctggagagctggctgctcgacgacggcatgggccacggcgaggtggggctcatggacgtggtggtgccattgggggacccgagtgagttcttttag

SEQ ID NO: 12439 - DNA, 1800 bp, Oryza sativa
  Clone ID: TFbOSC401616j.C1.o67.fg
atggcgaccggacccgatctgaccccacccgccgccgccgcctccgccgaagcgccgtcggcgtcggcggccaagaaggaccgccacatcgtgagttggagcaccgaggaggatgatgtgcttcgtactcaaattgcgcttcatggaactgataagtatgaattcttcccacttcccatctcaattgactttttttttctagatttaatcaccatattttacactgtttttccttttcctttcggtagctggacaattatagcggcacaattcaaggacaagacggccagacagtgcaggagaagatggtacaattatttgaactcggagtgcaagaaaggagggtggtccagagaagaggacttgctattgtgtgagatttctgaattggcaaatatgcggtcggttacttcctcagtgagacaacaggccaggcatattgctatgcccatggaattgagcatgtacgctcaaaaagttcttgggaacaaatggactgaaatagcaaaggttgtctcaggcagaactgataatgcagtgaagaatcggttttctactctatgcaaaaggcgggccaaggatgacgagctattcaaggaaaatggatcattatgttccagtacaagttcaaagagggcattggtacaaactgggtgtctcacatctggtgcaagtggctctgcaccacctattaagcagatgaggccatgtaattctgatttcaaagagaatatgacaccaaatatgagattagttggacaagacaagagcacacaagattctcgacagcctcttgcaattgtttatcaaaacaatcaagataatatgaatacaatggatacccaaaatcttgttgctaaaactgcagcaaaacaattatttgcgggggaacagaattgcgttaagcatgagggtaattttttgaacaaggatgatccaaaaattgctactttattgcagcgagccgacttgctttgctccctagcaacgaaaataaatactgaaaatacaagccaaagcatggacgaagcctggcagcaactacagcatcatttggataagaaagatgataatgacatgtcagagagcagtatgtcgggaatggcttcactcctagaggatcttgacgatttaattgtagacccctatgagaatgaagaggaagaagaccaggatttaagggagcagaccgaacagattgatgtggagaacaagcaaaattcttcacaaactagcatggaagttacatcacaaatggttcctgacaataaaatggaggactgcccaaatgataagagcacagaagacaataatatggaaccgtgccctggtgaagacataccaacatctgaaaacttgactgaggctgctatcgaagatagcttgcttcaatgtgtggaatacagctctcctgtacacacagttattcaagctaaaacagatgcagaaatagcagcatcggagaatcttagcgaggttctcgaacataacaggcttcagtgtattcaattagcctcccctgctcagacaactaccccagttgaagcaaatgcagaaacaccagcttctgagaagttacgcgaggttgtcaaatgtaacaatccttcatgtatcgaattcacttcgcctgctcatacagtcccaacattcctgccgtacgcagatgacatgccgactccaaaatttactgctagtgagaggaattttttgctgtctgtgcttgagttgacctcgccagggtcgaggccagacacttctcagcagccttcttgcaaaagggctctccttaatagcctatga

SEQ ID NO: 12440 - DNA, 1731 bp, Oryza sativa
  Clone ID: TFbOSC401093j.C1.o58.gm
atgaagaagggaaaatggtccaaggaagaggacgatttgatcaaaaaccacatggagaagtatggcattggccgtagctggcaggcactgtctgatgctttagggctgcagaggtgtggccggagctgccgttcccggtggctgaactaccttcggccggggctgaagcacggcgacttctcgccggcggaggagaggatcatctgcaagatgtacagcaagaagggaagcagctggtcggccatcgccgcgcagctgccggggaggacggacctcgccgtcaagaactactggaacagcacgctcaagaagaggttcccggcggcggcggcggcgaggagcaccgccgccgcgcgccgcaggcaccgccccgccgccagcgccaccacatcgtccgacgacgacgacgacgtcgacgtcgacgacgcgaccccgcccggcctcgcgctggtcgtctacagcgaggggagcaccgccgccgcggcggcggccggcgagctcgctccgtactccatctcatccccggccgccactgccgacgcggcggaagaagaagagccgatcgcggccgttccgatcagcacctgcatcctggcactgccgccgccaccaccaccgccaccgccgccgccgagcgatgccaccggcggcgaggtgagcatcccctgcttccccttctcgccgctgccattcatcgagccggacttgccggagctgacctggacgaccgacctcgacgacattaccgccaccttcgatgccgccgcctgccgctacccgaagcggccgcatccaatcacaccggattcgcctcgccttccgaagcttcccgccattgccggcttcgacgacgtgcagagcttcttgtcttgcatatgcctacggtataatacgtcgccgtttctgcttgctcgtgccaccgcagcgcctcccgccgccgccgccgaccgatgcctcgccggtcgccgctgcctctactctactcctcctcctcctcccctttcaccgcttcattggcggtgctcgcggcgtgaccccgagctcggagctgacgtctcagcgctgctgctccgcggacggctcggcgcgcgccaactgttcgacgaattgccccaccgagtccggtggcgccgcggctaccttcgcgccgccttcgctgcctccgtctccaacctcaacgcgcgagacggccacaggggagcctcctccatcatcagccatgatcatgtggagcagctcaagagcttcttggcttctgttctcatcacacagccccctgagaagaatattgtaggagaagacattgaggcccttgagaagaggattaatggtgatggcttccactctaaatcccttcttgacgacattgcccaaggccgcgaaaccgaggtccaagcggcccgcacggcagcagcagccgatgaggatgccataggtgtgcacggtgggaggagttaccttgccggcgccggctcgggccatgcggttgaagcgggacacagcggccgcggggatgtagcgcgcgacgtcggcgagagcgagcgccgttcaagctgtacatcgaggcgccgctgccttgccggagcaattcgtcgaacacgtggcgtgcgtcctcggcgccaccgccacagactgcaccctccgagcgaggggtcgcgcccacggagcgagggccgccggcggagcgcgctcggctcgagtgggtacgcggcgtgccatggcgcagcctga

SEQ ID NO: 12441 - DNA, 924 bp, Oryza sativa
  Clone ID: TFbOSC400044j.C1.o38.fg
atggggcaccactcctgctgcaacaagcagaaggtcaggaggggcctgtggtcaccagaggaagacgagaagctcgtcaagtacatctccacgcacggccatggctgctggagctccgtccccaggctagccgggttgcagagatgtggcaagagctgcaggctgaggtggatcaactacctgaggcctgacctgaagaggggaagcttctcgcagcaggaggagtccctcatcattgagctccacagggtgctgggcaacaggtgggctcagattgccaagcacctacctggtagaacagacaatgaggtcaagaacttctggaactccaccatcaagaagaagctcatctcccaggccgtgggtagtctgcacccttcctctgcagatttgtactacaacattctggacggagcaggacagagcatcgcagctgcgtcactgaacgcggtggagaatgcagctcacggtgtcactcaatcgccgccgtcttccgtgtacaactccgcggcatgggccagcttcagctcccaccagccaatctttctccccggccacggcgtccacggctgcggcggcggcgaccttcagtacgccgccgccgtcgacggggagttcatcaggctgtgccgagcagcggaggcgtaccagctggagaacggcgccgctggcatcgtcgggggtcagtgcaagccaagtgatcatctcttggctccagagggcgtcgtggcccggagttgcctcccggcgtttgtcgaacagaagggcggcggcggcggcgctttcttggccgatccggccatgggtccggtgatggacttcatggacgccatcctggggtcgtcgacgacgtcggcggccagtgcttcatccgtcgacagcttctcggcgaacaccgccatgcaacctcactggattccctga

SEQ ID NO: 12442 - DNA, 5685 bp, Oryza sativa
  Clone ID: TFbOSC401228j.C1.o4.fg
atggacggggcgcacgggcagaggcagccgatgtctccggcgatctctgcttcggcggtgctcccgcagcagcggcagatgcagctccaccaccaccaccaccacccggcgcggtcgtccatcgccgatctcttcaccctatacctcggcatgaactcgaagcagcgggtcgaggatccaactagggagacctcgaacaagttgcagaagagagtaactgctatgaacagagatctgcctccccgagatgagcaattcatttcggattttgagcagttgcacatgcagttcccagaccaagagcagctgcaggcagttacggaatcagttctcatctcatttgtcctgcagtgtagtagccacgccccacaatctgagttcttgctctttgccacacgttgcctgtgtgctcgaggccaccttcgatgggacagtctccttccttctctacttaatgtagtttcctccgtggaggtaccaatggggcaaggggtttctgtgactactggtggcccggcaacatcttcttcatcagctattgcagtgccaaatgccccaagctttcacccttcaaatcccacatctccattgtcagcaatgaacactataggatctcccactcaatctggtatcgaccaacccataggtgcaaatgtctcacccattaagggagcagaattctctagccctggacagcttggtctgacagctagaggtgaccagtctcgcaggggagcagaaattagttatctgcatcacttatcctgtagaattattctagcagggctggagtctgatttgaagccagccacccatgctgtgatattccagcatatggtaaattggcttgttaattgggaccagcgaccgcatggtgtggaccaagctgatgcattgcaattgcaaaccttgaggcttgaaagacctttgcatgaatggatgcacctatgcttagatgtgatatggattctagttaatgaagataaatgtcgtgttccattctacgagcttgttcgcagcaacttgcagtttctcgaaaatattcctgacgatgaagcactagttagtattattatggagatccataggaggagggacatggatcttgcaaactccattcctaaagggggtttagactgggaacgtgctttgcgttgcttgaggcatgcactccgcacaactccgtcaccagactggtggaggcgtgttcttcttgttgctccttgttatagacaacatcctcaacaatcatcaacgccaggagctgttttctcacctgatatgatcggtgaggcagttgctgacaggacaattgaactactgaggctcacgaactcagagactcagtgctggcaagattggcttttatttgctgacatttttttctttctgatgaaaagtggctgtattgattttcttgatttcgtggacaagcttgcatctcgagtaacaaatagtgatcaacagattcttcgcagtaatcatgtcacttggttactcgcacagattatccgcattgagattgtgatgaacacccttagttcggacccaagaagagagcatttgaacagtgatcagcttcagaaaggcaaacagatagatgagtggtggagacaaatgacaaaagcttctggggagaggatgatagattttacgagcttggatgagcgggcgatgggcatgttttgggttctctccttcaccatggcacaaccagcatgtgaagcagtcatgaactggtttacatcagtaggagtagcagatttaattcagggacccaatttgcagccaaatgaaagaatgacaatgatgcgtgaaacttatccactgtctatgtcattgctttctgggttgtctatcaatctatgtttgaaacttgctttccagcttgaagagaccatatttcttggccagaatgttcctagcattgctatagtggaaacctatgttagactgctgcttataacccctcattcattgttccgcccgcattttacgacattaacacaaagatctccatctatcctgagcaaatctggtgtgtctctgctcctacttgagatactgaattacaggctacttcctctatacaggtatcatgggaaaagcaaggcattgatgtatgatgttacaaagataatatcaatgattaaagtcaaacgtggagagcatcgtctttttagattagcagaaaatttgtgcatgaatttgattctctcactaagagacttctttttggtgaaaaaagaattgaagggtccaactgagtttactgaaacacttaaccgcataacgataataagccttgctatcaccatgaagacacgtggaattgctgaggtcgaacatataattcatcttcaaccattattagagcaaattatggcaacgagccagcatacatggtcagagaagactctaagatattttcctccccttattcgagattttttaatggggaggatggataagagaggccaagctatccaagcatggcagcaggctgagacaactgttattaatcaatgtaatcagctactctcaccatctgctgagccaacctatgttatgacatatttaagtcacagtttccctcagcatcgtcaatatctttgtgctggtgcttggatgctgatgaacggacatctagagatcaacagtgcaaatcttgcccgtgttttgagagagttttcacccgaagaagttacagcaaatatttatacaatggttgatgttcttctgcatcatatccaacttgagctgcaaagagggcatcaaattcaggacttactctctaaagcaattacgaatcttgctttctttatctggacacatgagttacttccattggacattcttctgttagctcttattgatagagatgatgatccttatgctttacgccttgtgataaatctccttgaaagaccggaacttcagcaaagaattaaagcattctgcacttcgcgttctccagagcattggctaaaaaatcagcctccaaaaagagtagaacttcagaaagccctcggtaaccatctctcagggaaagaacgttacccccccttttttgatgacattgctgctcgtctgcttctagtcatcccgttgataatttataggcttattgagaacgatgccacagatatcgcagatagagtccttgcagtttattctacctttctggccttccatcctctaaggtttacatttgtgcgtgatattcttgcatatttctatggtcatcttccatccaagttaattgttaggatcctcaacgtgctgggtgttagcactaagacacctttctcagaatcatttgcccagtatctagcgtcatcaaattcatctatttgtccaccaccggaatacttcgccaaccttttgtttggccttgttaataatgtcatacctcctttgagttgcaagtccaaatcaaacccatcggatgctgctggcagtacagcacgcacaacttataacaagccttatacatcttccgctggaggaatcagtaactctgatggtcagagggcattttatcaaaatcaggatcctggatcatatacacagcttgttttggaaacagcagccattgaaattctctcactttgtgtgccagcttctcaaatagtatcctctctagttcaaataatagcacatgtacaagcaatgctcatacagtcaaatagtggtcatggaatgtcaggtggtttgggccaaaactctggggtgccgacttcttcaggtgggggagttgaacctgttggtgccaaccgaccaaacaccacagcaagtggaatcaatgcatctaactttgtttctagaagtggctattcctgccaacaattgtctgttctgatgattcaagcttgtggtctgttgctggcacaactcccaccagaattccacacacttctatatgcagaagcagcccggatcataaaagattgttggtggcttgctgatagttcaaggcctgttaaagagcttgattctgctgttgggtatgcactgttggatcctacttgggcttctcaagacaatacatctacagccataggtaacatcgttgcccttcttcactcgtttttcagcaatcttccacatgaatggcttgaatctacccataccgtcatcaagcatcttcggccagtcaactcagttgccatgttaagaattgctttccgcatattgggtcccttgttgcctcgtctagcctttgctcgacctctgttcatgaagaccttggctttgctgttcaatgtgttgggggatgtatttgggaagaattctcaggcttcacctcctgtggaggcatcggaaattgctgacataattgacttcttgcaccatgcagtcatgtatgagggtcaaggaggtcccgttcagagcactagcaagcccaaactagagatattgacgttatgtgggaaagaatgcgcggcaatcagtggagtgatgctattagacaagcagttggttgatggtcagagtcaggcctcgccatccatgttactacctccgcattcttgcactgcagactactgtagacagtactacatcgagggtgagcgagctgtgacacaactgctcaaggacgtggatcctctgcagactgcagtggtactgacactacgcagacaacgcccccgtcgagagctcagtccagattacacgtgtacgcgtaacagcattttggaggcctggagggccaggaggctcgcagccgatgtcagtgacggcctgacgccgtcacgcctacgactcgcctcggcctttccacttctggccgcatctattaatccccgagcagcgccggaacctctccaaattaagactcgggtgagctcatcaggctcagttcatccctctcgtgagatacagatagcctcgcaaatcagggatcagcgtgtgatgggcaggcagccgtgctgcgagaaggttggcctgaagaaggggccatggacggccgacgaggaccagaagctggtcaccttcctcctctccaatggccactgctgctggaggctcgtccccaagctcgcagggctgctcaggtgtgggaagagctgccggctgaggtggacgaactacctgcggcccgacctcaagaggggcctcctttccgaagaggaggagaagctggtcattgacctccacgagcagctcggcaacagatggtccaagattgcggcacggctccccgggaggacggacaacgagatcaagaaccactggaacacccacatcaagaagaagctcaagaagatgggccttgatcccgtcactcaccggccggtgatgtcactcgctcagcctgatcccctgaagcagcagcagcagcagcatgaaccgtccgtctccggcggcaccggtgccgacgacaaggaggaggaggaggaggagacgccgacgagcgcccagccacagggcgtcgcttgcgctgcttcatccgcctccgccgtgtcgtcgtcatgctcctcgtccgcctcggcctccgccgcgacacccggcgcggacgtggactggcccggcctcttcgaggtggatgccattcttgacattgactgggctggcttattgtctgcctgcggcgacgatggcggctgcagcgccattggcgtcgatatgttgttcgaccaatgctctgacgttggctttgatcaagatgtgtggatgtga

SEQ ID NO: 12443 - DNA, 639 bp, Oryza sativa
  Clone ID: TFbOSC404183j.C1.o3.fg
atgggtgacctcgtcggcgacggggccgcgccggcggcggcggagccagcaccggcagcggcagcttgtagatggacgaggcagaaggacaagttactggagacgctggtggcgcgatgcgccatgaaccggcagtgcgtgggcggctgggacgccatcgccgccgccttcggggacgacaggacggcggcgcaggtggagcagcggtacggggagatagccgcggaggtgagacgcgtcatggaggagccctgggatgcggaagaccctgcaattgcagcagcagccgccgccgtgccggcggcgccggtgaagcatgcagcggcggggccggggagcgatggcggcggcgaggaggggaaggtggtcgtggagaagaagtcagggatatggagtgaggaagagcaccggcagtgcctacgagggattgaagagatcgggcacggtcgttggacacagatatcgatagagtatgttccatcaaggacaccgatacaaattgccagccatacccagaagtattttctccggatggccaagcccaaggaggatcgcaagaggaagagcatacacgacaccccctatcatcttcatctgcctaatgctgctgatgctcacgctcaccaacaacaacaataa

SEQ ID NO: 12444 - DNA, 780 bp, Oryza sativa
  Clone ID: TFbOSC100215j.C1.o3.np
atcacattctttgtggaggctagaaattcccacattaatcggaaaaaaagaaaaaaaaagaaaatgagagtccaagtagaagtacaatctaagaatagctatctaaaaatagctgaaattcggaattaaaaataagcaatattgaaagaagtttctatataagaacctaatacgagattaattaaaatttgaaataaaaataaaataaaatctaaaattagaaaagaaaagaagagaaaaaaaagcgagaaaaaaaaaataaaaaaggagaaaataaaacttctatcgtaaagaaaacgtccgactcctccggtggaaaaaaaaaaggagagacgacggaaaaaaaatcgatacaaaaaataaaaaaaggagagaaaaatttataccgtaaaaaaaagtccgactctgactcctccggtggaaaaaaaaaagagagacgacggaaaaaaaatcaagaaaaaacaaagaaaggagaaaaagaaaacttctataaaaaaaaagaccgactgactcctaaaagaagtccgactcctccggtggaaaaaaaacagaaaaaaataagagaaaaagaacttctatgtaaaaaaagtccgactccataaaaaaagtccgactatctgtggagaaaaaaaaggcaagaaaaagtaaaaaaaaaaaaagagaaaaaaaaacttctaccgtataaaaaaaataaaaacgttcgattccttaaaaaaaagtacgactccctcgaaaaaggacttttttgtccgtaatcttctcttctacttctactatttt

SEQ ID NO: 12445 - DNA, 444 bp, Oryza sativa
  Clone ID: TFbOSC414560j.C1.o1.fg
atggggagactgaggccgccgtgctgcgacgagagcagcgtgaagaaggggccgtggacgcgggaggaggacgagaagctcgtcgcctacgtcgaccagcacggcggccatggcagctggaggtctctccccaagcgagccgggctcaacaggtgctgcaagagctgccgtctgcgatggattaactatctcaggcctgacatcaagagaggcaacttcactcctgaggaagaacaggccatcattaccctccactccgtcctcggcaataagtggtcgaccatcgcgacacgccttcctgggcgcacggacaacgagatcaagaactactggaacacgcgcctcaagaagaggctcatcggcgccggcatcgacccggccacgcaccgcgcgcggccgcggccgccggcgcctggggacctcgccaccgcgctcccgcagctg

SEQ ID NO: 12446 - DNA, 897 bp, Oryza sativa
  Clone ID: TFbOSC400524j.C1.o28.fg
atggggaggactccctgctgcgacagcaaggtgctcaagaaagggccgtggacgcccgacgaggacaagctcctcgtcgactacgtccaggccaacggctccggcaactggcgcctgctccccaagctcgccgggctgaaccggtgcggcaagagctgccggctgcggtggacgaactacctgcggccggacatcaagcgcgggcctttcaccccggaggagcacaagtccatcctccagctccacgccatcgtcggcaacaagtggtccatgatcgccgcgcagctgcctggtcggacggacaacgagatcaagaattactggaacaccaacgtcaagaagcagctccgccagggccaggcggccgccgtcggcgagcaggccgcgctggcgagcctcggcggcggcgcggccagctgccccgcggcgcgccacatggcgcagtgggagaccgcgcgcctcgaggcagaggcgcgcctctccctcctctccggcaccacctcggtcgcgaccgccagcgtcgctgcctcctcgtcctcgtcgtccacagccgcggccggcggcgccgaggcgccgccggacatctacctgcgcctctggaactccgaggtcggtgactcgttccgcaagtccgcgcgctcggcggcgcgcgaggatcaagagccggcgaacgcatcagacgaagcggcgccggtctcggcgacattcgcacgacccggcgacgactcctcggcggcgtccaacgtgaccgcggccgcggcggcggacgagtaccaggtgttcctggacctggcggccgaggacttcgagctgttccacggccgccacggcgggttcccgctgttcccggcggtggacatgctcggcgagacatccctctacaccgcgttcgactaa

SEQ ID NO: 12447 - DNA, 813 bp, Oryza sativa
  Clone ID: TFbOSC414118j.C1.o7.gm
atggggaggcctccttgttgtgatgagaatggcctcaagaagggcccctggactcctgaagaagatgagaagctcatgagctacattcagaaacatggccatgcaagctggagagtcttacctgaacttgctggcttgaacagatgtggtaagagctgcaggctaagatggaccaactatctgaaaccagacatcaagagagggaacttctcgcgtgaggaagagcaaactatcctccagctgcattccatccttggcaacaagtggtcagctattgcaaagcatctccctggacggacagataacgagatcaagaacttctggaacacccacctcaggaagaaactgatcaagatgggcattgatccaatgacccactgcccaagaacagacttctttcagtccctcccgcagctcattgcacttgccaacctccgccagattatcgagcgacaaccgtgggatggccacattgagggcctgcagactgtggcagttcaggctgccaagctcgaatacatgcaatcactgctacattctgcagtgtgccattgtgaccagccccaccaccaccaccaccaccagcagcttaaacaccttcaccaccgaactggagcagaccaaccacctatgccctccacaggtgccttcttcaacaacattgccctagtttcgggatggatcacattgaaacttgaggacggcgttatacctaccggcaactcaccggtgctcgaccacctcgccggcgaagcgctcgagggggctctcggcattcgggatttcgggtccaccacagcttcctccgcctga

SEQ ID NO: 12448 - DNA, 1107 bp, Oryza sativa
  Clone ID: TFbOSC414185j.C1.o2.fg
atggggcgggcgccgtgctgcgagaagagcgggctgaagaaggggccgtggacgcccgaggaggacgagaagctcatcgcctacatcaaggagcacggccagggcaactggcgcacgctccccaagaatgccgggctctcgaggtgcgggaagagctgccggctgcggtggacgaactaccttaggccggacatcaagcgtggtcgcttctccttcgaggaggaggaggccatcatccagctccacagcatcctcggcaacaagtggtcagcgatcgcggcgcggctgccgggccggacggacaacgagatcaagaactactggaacacgcacatccgcaagcgcctcctccgcatgggcatagaccccgtgacccacgcgccgcgtctcgacctcctcgatctcacctccctcctcaagcccgccgccgccgccgcgtactaccccacgcaggccgacctcgacacgctccgcgcgctcgagccgctcgccggctacccggacctgctccgcctcgcctccgccatcctccccgccgccacgacgaccggcgcagccgccgccgccgccgccgagcaggcgcagcttctcctgccgtggctgcttcaggcgcagatggcgcagcagcaacagcaggtgacgccgccgccgccgccgccgccgcaggccgcggcgaccgaacagttcttgcaggccaccagcaccgcctgccaccaaatgccaggcctggttcacgccagcccgacgcagcagctggcgcagcaaccgcaggatcacatggcggcggcgacctgccaccgccgcggcgccgtgcagcacccgagctacgacaaccagctcgactacgtgccggcgctgatgcagatggcgtccgacgcgtccaacctgcagcagtggagcagcacggtctcgagtagcaacaaccacaacgtcaactccggcgtgtccacgccgtcgtcgagcccagcagccgccggacagatcaactcatcctctacgacgacgacgacgacgtatggcttgaacgcgagcggtgacgtcgacgacgctgggctgctcatcaacatgcacctatccgagctcctcgacgtgagcgactacatgtaa

SEQ ID NO: 12449 - DNA, 228 bp, Oryza sativa
  Clone ID: TFbOSC421637j.C1.o1.fg
atggcgtcagagtggagcaaagaggagaacaagctgttcgagcaggccattgcctactacggcgagggcgcgcctgatctctggcacaaggtgtcccgcgccatggggggcaccaagacagccgacgaggtgcgcctccacttcgagatcctcgtggacgatatcaagctgattgaggcaaggcgagtcccgttccccaagtacaatacacagggagcatggaactga

SEQ ID NO: 12450 - DNA, 652 bp, Oryza sativa
  Clone ID: TFbOSC3910j.C1.o1.np
ctggcgggctcgcagggggagtcgccggcgatgctgcacccgaacggagacggagacggcgacggcggcgatgatgagggtgacgccagcggcggcgaagaggagcagggcggtgggattccgctgaagaaggggccgtggacgcccgacgaggacaagcggctgcgggagtacgtggaggcgcacggcgaggggaactggaaccgggtgcagaggaacgcggggctgaaccgctgcggcaagagctgccgcctccgctgggcgaaccacctcaagcccgacctcaagaaggggcccttcagcaaggaagaggaggagatgatcatcaagctccatttatggctggggaccaagtgggctaagatggcaaactctttgccaggccgcacagataatgaaatcaagaacttctggaacactagatgtaagagaattcagagaactggtgaacctctatatccgaaggagtttaatcattttaagttgacagatctggaagtgatgaactgtgaaagccctgatgaatcacgtgccaagaaacgaacaaatgaggttttacagggaaatggtcaaagttacaaagaggtttttttcgataatttcgccgctgacgggcgggcccgctccgccaccctcgctgacgggtggggcc

SEQ ID NO: 12451 - DNA, 563 bp, Oryza sativa
  Clone ID: TFbOSC400259j.C1.o20.np
cgtgggcgcgagaaacgagggggcgaggtagaaaccctggcgaaaggccttgccaaccaaggtgcgtgaggcggagtgggctccacactcgccttcatggacatcggcgagaagctcgacgcttttcaaaggagcatggacaaggcaagaagatgaagttctcaaacaaatggtgatactccatggagatcgtaagtgggcaacgattgcaaagagcctcccaggtcggatcgggaagcagtgtcgcgaaagatggaccaatcatttgcgcccagacatcaagaaggacgtctggactgaggaggacgacaggatgctgatcgaagcacacaagacttatgggaaccgttggtcagtaatcgcaagatgcctccctggccggtcggagaatgctgtcaagaaccattggaacgcgactaagcggagcctgaagtcgaagcgtcggatgaagaagaagagcacgaggcccatcatgtgcgatgcccagctcggccatatgctgcgagggggcatcggtcatcggtgcgcgccggctgagatgaccaagccgacgagctggcaac

SEQ ID NO: 12452 - DNA, 2115 bp, Oryza sativa
  Clone ID: TFbOSC418226j.C1.o7.fg
atggcgagagcacctggtggcgttcgccgaaggagcgggaggaggggcgcgggcggcggcggcgccggaggcggaggcgaggcgctgcggaagggcccgtggatggcggaggaggacgaggttctgctggagcacgtccgcacccacggccccatggactggagctccattcgatccaaaggcctcttgccgcgcaccggcaagtcctgccgcctccgctgggtgaacaagctcaggccaaacctcaagagcggttgcaagtttactgccgaggaagagagggtggtgatcgagttgcaggcgcagttcgggaacaagtgggcgaggatcgcgacctacttgcagggcaggacggacaacgacgtgaagaatttctggagcactcggcagaagcggctcgccaggctcctccgcgggcctctccctgctgcacggcccaacaagcacaacagcggcaagggcaaagcgccctcgtcatcttctctcgactcccaaacagccacgttccaccagagctcggcctccctggatcaagcttcattggagggcaactccctcggctggcaatgccgcgaggctgcaccgttcatgggatatgatcaggcatgctccgggttcttcgctttcgaggggccactgccgctgcagctactaccacccgccgacggcgaggcgagctcgtccaatgcagctcagtcggcgccaccaccgctgctgttcgaccagcctccgtaccctctgatcaacttccctggatggccggagagatacgtcgacgtcggccacgggttcgtggacgccggcgccatggatggcctcgcctaccaggagctgcttccgatggtgcagtcggttccgatgatcatgccgttctttggcatggagagtaacaacaccaagtactatgaggttcttggagttcctaaaactgcaagcaaggatgagctaaagaaggcataccggaaggctgccataaaaaaccatcctgacaagggaggggatccagaaaagtttaaagaattatcacaagcgtatgaggttctcactgatcctgagaagagagacatatatgaccaatatggggaggatgctcttaaggatggaatgggaggaggcagtgacttccataatccatttgacatatttgagcagtttttcgggggtggtgcctttggggggagtagctcaagagtacgcagacagagacgtggtgaagatgtggcgcatactttgaaggtgtctttagaagatgtgtataatggatctatgaagaaactatcattatcacgaaatattctgtgcccaaagtgcaaaggaaaagggaccaaatctgaggctccagcaacatgctatggttgtcatggtgtaggaatgaggaatataatgcgacagataggactaggcatgattcaacatatgcagactgtctgtcctgaatgcagaggatcaggtgagatcataagtgacagggataaatgcacaaactgcagagctagcaaagttattcaggagaaaaaggtgcttgaggttcatattgagaagggaatgcaacatggccaaaaaattgtattccaaggtgaagctgatgaagctcctgatacagtgacaggagatatagtatttatcttgcaagttaaggtacatccaagatttaagaggaaatatgatgacctgttcattgagcgcacaatctctttaactgaggcattgtgtgggttccaattcatcctcactcatctggacagtaggcagctcctaatcaaggcaaatcctggcgaaattattaaacctggtcaacacaaggccataaatgatgagggaatgccacaccatggccggcctttcatgaagggccgtctctttgtggaattcaatgttgagttccctgaatctggtgtactctcccgtgaccaatgccgggcacttgagatgatcctaccacctaaacctgggcaccaattatcagatatggacctggatcaatgtgaggaaactaccatgcatgatgtgaacatagaagaggagatgaggcgcaagcagtatcaaaggaagcaggaagcgtacgacgaagatgaggaggaggatgctccaagagtacagtgtgctcaacagtaa

SEQ ID NO: 12453 - DNA, 750 bp, Oryza sativa
  Clone ID: TFbOSC413566j.C1.o15.fg
atgcagtatacggtggaagggagcggcggcggcggcgtgcagacggtggaggcggcggtgcgcaaggggccctggacgatggaggaggacctcagcctcgtcaactacatcgccgccaacggcgagggcgcgtggaacaccctcgcccgcgccgccgggcttaaccgtaccgggaagagctgccggctgcggtggctgaactacctgcgacccgacgtgcggcgcggcaacatcacgccggaggagcacacgctcatcgtcgagctacaggccagatggggcaacaggtggtccaagattgcaaggtaccttcctggccggaccgacaacgaggtcaagaacttctggaggaccaagatacagaagaagcacaggaaaagcactgacggaatttacgcgacgacgacgagcgaaagcatcatgcctgcggctacagtgcaccagaacacggtggccgaggaccaaggcagcagcagcgtctccggccggaccaccaccgccaccgtcgccgtcacgcaggagtacgccactgaggcgccgccgccgagcggcatgagtagtggtagctacttggaccagctgcagccaggctacgcgagctcaatccatggaggacaagatggcggtgctgctgccgccgccgctggtgacgtcgtcgtctccgacgagttcttggcagcgtcgagcgacaacttctgggccctcgaggatttgtggcccacggtgcagtctctccacggcaattgctga

SEQ ID NO: 12454 - DNA, 1074 bp, Oryza sativa
  Clone ID: TFbOSC401058j.C1.o76.fg
atgggaagagagtcggcggcggcgtgctcgccgaagccgaagctgaggagggggctgtggtcgccggaggaggacgagaagctgttcaaccacatcagccgctatggcgtcggctgctggagctccgtcccaaagctcgccggattggagaggtgtggcaagagttgcaggctgagatggatcaactacctgaggcctgatctcaagagaggcagcttctcccagcaggaggaggagctcatcatcagcctccataaaatccttggcaacaggtggtcccagattgcggcgcagctgcccggccggacggacaacgagatcaagaacttctggaactcgtgcctcaagaagaagctccggcagcgcggcatcgatccggccacccacaagccgctcaacgacggcggcgccggcgccggagaagagcaccacgacgacggcgacaagcagcagctaatggacgacgtcgacgactgcttcgccatcggcggcggcgggagcagcgactccctggcgccgccgcactcgccggccgtcagcttcgacccgctgtccgtgaccaacgtgccgacgacgatgatgcagtcgtcgtcgtctccctacggcgccgccggcggcgagcactcgtcgttccggtcggacaccctctgcgactacggcgggagcggcggcggcgtcgacgtcgtgtccgacgccggcacgtacagcgcctacaccggcgacagctccagcaacagcaacagcacggcgtggacatgcggcagcgtcgtcgtcggcggcgcgggcgagctgccgccgccgccgctgctgccgcacatggacatgttcggccgggtcgacgccgagccgccgccgtacccgccgttcgacgtccaggccaggttcagcccctggcaccaccaccaccaccaccaccacgagccgacgctgccgacgccgccgcaaaggctggacggcggcggcggcgccgcggcgagcttcccgatccggtcgctgtcgcgggacatgccggagtcctgcttcgacctcggccgcggcgcgctcgacgacgagttcggcgtcgacttcctctga

SEQ ID NO: 12455 - DNA, 1023 bp, Oryza sativa
  Clone ID: TFbOSC408625j.C1.o2.fg
atggggaggggacgagcgccgtgctgcgccaaggtggggctgaacaggggttcgtggacgccgcaggaggacatgcggctcatcgcctacatccagaagcacggccacgccaactggcgagccctccccaagcaggccggattgctgcggtgcggcaagagctgccgcctccggtggatcaactacctgcgccccgacctgaagcgcggcaacttcaccgccgacgaggaggacaccatcatcaagctgcacggcctactcgggaacaagtggtccaagatcgcgtcgtgcctgcccgggaggacggacaacgagatcaagaacgtgtggaacacccacctgaagaagagggtgtcgcagagagagaagccaggtgacaccaagaagaagggcaaggccgcggacgccagcgacgacgccgacgcgcattccccgtcgtcgtcggcgtcctcctcgacgacgacggcggccaataacaacaacagcggcgacacggccggcgagcagtgcggcacgagcaaggagcccgagaacgtcgacgtgtccttcttcgagcaagacatcgacatctcggacatgctggtggacgcgcccacggaggcgccgctggtcgcggcgccaatgccgccgtccccgtgctcgtcgtcctccctgacgacgacgacgtgcgtcggcgccgtgtcggacgagctgctcgacctgccggagatcgacatcgagccggatatatggagcatcatcgacggctacggcggcgatgagcccggcgacggcgatgcaacagtgccatgtaccgccagcccgggagaggagggagcagagtggtgggtagagaatttggagaaggagctcggcctgtgggggcccatggacgagtccctggcccatccggacccacccggacaggtttgttacccgggcccactcacggaaacagagggggacccagtctccacctacttccagtccgggcccaccgcctctccgctccaggagatcgcatcacccgccgttctctcatga

SEQ ID NO: 12456 - DNA, 1230 bp, Oryza sativa
  Clone ID: TFbOSC401044j.C1.o2.fg
atgaggaagccggattgcggcggcgggggaggggcggcgaagggcggcggcgttctgggtgtggcgggagggaacaatgcggcggtggtgggggggaaggttcggaaggggctgtggtcgccggaggaggacgagaagctggtggcgtacatgctgcggagcgggcaggggtcgtggagcgacgtggcgaggaacgccgggctgcagcgctgcggcaagagctgccgcctccggtggatcaactacctccgccccgacctcaagcgcggcgccttctcgccgcaggaggaggacctcatcgtcaacctccacgccatcctcggcaacaggtggtctcagatcgctgcccggctaccggggcgcaccgacaacgagatcaagaacttctggaactccaccatcaagaagcgcctcaagatctcctcctcctcggcgtctccggccaccaccaccgactgcgcctccccgccggagcacaagctcggcgccgtcgtcgacctcgccggcggcggcggcgccacggacgacgtcgttgtcgggacagctaatgctgccatgaagagcatgtgggtggattcctcgtcgtcgtcgtcgtcgtcttcctcgtcgatgcagagccggccgtcgataatggcggcggcggcggcggggaggagctacggcggcctcctcccactccccgaccaggtctgcggcgtcgacacctcgccgccaccgccgttcttccacgaccactccatctccatcaagcaagcatactacggatcaaccggcgcccaccaccaccaccacgcgatcgccaccatggacggatcaagcttaataggagatcatcaccatcacagcagcagcatcctctttggcggcgcatcagtgccacctctcctagaccaccaaaccattctcgacgacgacgacgaccaccctaacaaaaccggcagcaacacgaccgcggccacactgagcagcaacatcacagacaacagcaacagcaacaagaacaacagtgataataacaacaacatcagcagcagctgctgcattagcctaatgaacagcagcagcaacatgatctattgggagggtcaccaccaacaacagcagcagcagcatcagatgctgcagcagcagcagcagcacatgagcaggaatgtcatgggagagtgggacttggaggagctgatgaaagatgtgtcatccttgcctttccttgatttccaagttgaatga

SEQ ID NO: 12457 - DNA, 329 bp, Oryza sativa
  Clone ID: TFbOSC21831j.C1.o2.np
aagacaaggaagaaggggtcgtggagggcggaagaggacgcgctgctgacgaggctggtggcgcagcatggcccccaccggtggagcatcatcagcggcgccatcccggggcgctccggcaagtcgtgccggctgcggtggtgcaaccagctgagcccggccgtgcagcaccgccccttcaccccgcaagaggatgccctcctcgccgccgcccatgcccgccacgggaacaagtgggccaccatcgcccgcctcctccccggccgcaccgacaactccgtcaagaaccactggaactccaacctccggagaagctgcagcaatttctc

SEQ ID NO: 12458 - DNA, 729 bp, Oryza sativa
  Clone ID: TFbOSC7037j.C1.o6.fg
atggcgttggagggagccgcgggcggcggcggcgtcggcggcggtggcggaccaccggggcaggaggcggggaagaaggtggggtggagcaaggaggaggacaagctgctgcgggagctggtgcggaagcaaggcgggaaggactggggcgtcatcgccaccgcgttccccggccgcaccgacaagtcgtgccgcctccggtggaggcagcacctggaccccagcgtcgacgtcgcgctgcccttctccgccggcgaggacaggaagatcgtggagctgcaccgcgtccacggcaaccgctgggccaccatcgcggccttcctccccggccgcagcgacaacgccatcaagaaccgctggaacacccacctccgcaagcgccacgcccaggacgtgcagcagcgcccgtcaggtggcctcgccctcggcctcggcggcggtggcggcgctgggcaggctgcgggcgggaaactgacgccggtgtgcctccaattgttccctccgacgcaggcaccgccgatcggggagaacttaccggggccggcaagaagcgctgtgccggagctcctcaagctcttccccctggctcccggtgatctcaaggacaatgcgagcgcggcggcggcgatggatgtgggtaacgaggccgtccgcgcgctccccgagttgaggctttccccggcggcggtggtgttcgacgcaatgccgctgcaggctatccggatgtag

SEQ ID NO: 12459 - DNA, 741 bp, Oryza sativa
  Clone ID: TFbOSC421348j.C1.o3.fg
atggcggcaatggcggcggcggcggcggggacgaagaagaaggcgaggaagccgtacacgatcacgaggccgcgggagaggtggtccgccgaggagcacgagcgcttccttgacgccctgattctgttcggccgtgactggaagaggatcgaagcgttcgtcgccaccaagacggccatccagattcgcagccatgcccagaagcattttctgaaggcccgcaagttcggcctcgccggtgggctcccgccgccgcttcaccctcgccgtgccacgctgctccgggccaacgccgcggcggcggacatgatgccgcccccgtggctgccatcggccggcggcggctccatcggttgctcggcgccaccgtccggcgtgcagcagagcatggccggcaggtcgccggcgtgctactcaactgatgaagcttctttccggccattgattcatagcaatgacaatgactgttcattcatcgagacaccaagctgcatcggatcaggtggcgaatcatggatcggtgatgatgccttcttcatgcaggatgaaacaattcggctcccaatttctccagatgacctgggattcgctcaggtgtacaagttcgtcggcgacatgttcggctccggcgagcggcggccggtggaggctcacctgcggaggctgcagggcatggaccctgccatctcggagacgatcttgctggtgcttaagaatctcgaagctaatctatctgcttaa

SEQ ID NO: 12460 - DNA, 1119 bp, Oryza sativa
  Clone ID: TFbOSC1073j.C1.o10.gm
atgggccggccgccgtgctgcgacaaggaggggatcaagaaggggccatggacgcccgaggaggacatcatcctcgtctcctacatccaagaacacggccccggcaactggagatcggttcccatcaacactgggctgatgaggtgcagcaagagctgcaggctgcggtggacgaactacctgcggccggggataaagcgcggcaacttcacggcgcacgaggaggggatcatcgtccacctccagtcgcttctcggcaaccgctgggccgccatcgcctcctacctcccccagcgcaccgacaacgacatcaagaactactggaacacccacctcaagaagaagctcgccgccgccgccaactccacttcatcctccaaccgccaccccatcttcgccgacgccaccttcccctccgccgccggcggtagctacacggtgagcagcaactccgatgtcacccagatggcagccattgctaggcgctcccccttcgccgactgcccatcctcctcatacgcctccagcatggacaacatctccaagctgctcgacggcttcatgaagaccaactccccgtcgccgccgccgccaccgctgcagcactatgacagcggctattacgacgacgtcaagcccgccgtcgatgtcggcggcaaccccttgctgtcgtccttcgactgcatgtccggcgccgacctggactgctgcttcgacgttcatcagcagcaccagcagcagcagccggcgtcgttcatggagtacggcggctatggcggcggctacggcgacgagagcaagcagcagctgatgaaccaggcagcgccgccgctgtcatcgatcgagaagtggctgttcgacgaggcggcggcggagcaggtcgccgacctcatggacctctccgacgcaatgttagatggtaattggactactctcataatgtataaagttcactttagaggtttaattaagactcacgtttatgtctgcattgtggctgccctaaggaagtgccagaagccccagatcaggcaggctttggaccagcggggtgaggccgaccaggttacatttttcctggcccaaccacatccaaccatgctggcattgctgccatag

SEQ ID NO: 12461 - DNA, 897 bp, Oryza sativa
  Clone ID: TFbOSC400505j.C1.o28.fg
atggcgcgagaggtgagcagcgaggaggaggctggcggcggcgacgagctccggcgagggccgtggacggtggaggaggacctgctcctcgtcaactacatcgccgcccatggcgagggccgctggaacgcgctcgcgcgctgcgccgggctgaagcggacggggaagagctgccggctgcggtggctgaactacctgaggccggacgtgaggagggggaacatgacggcggaggagcagctgctgatactggagctccatgggcggtgggggaatcggtggagcaagatcgcgcagcatctccccggccgcaccgacaacgagatcaagaactactggcgcacccgcgtccagaagcacgccaagcacctcaactgcgacgtcaactcccagcagttcaaggacctcatgcgctacctctggatgccccgcctcctcgaacgcatccaccgctcctcccaatcccaatcccacgacgccgacgacgccgacctctccgtctccgccgccaccagctgcatcacctccgacctcgtcgtcgacgcgcatcacccgccgctcgccatggccgacagcaacgactctgcagccatgtggcagcaacatcaagcaccacagatgagcgtcgccggcgcgccgccgccgacgacgacgatggcccaacatgtagtactgccgaccgcggcggcgtcgtgccaccagatgcaggatcagttcgtctgcgcgcgcgcggcggagacgacgacgtgctgctggtccgagtcggagtcgctgccgggtctcgcggggctgtactacgacgacgcggcggcggcgctgccggagtttgacgtggagaccatggccatgtggggccctgaggacgacccatggtacacgcaaatgcttggcttgtga

SEQ ID NO: 12462 - DNA, 927 bp, Oryza sativa
  Clone ID: TFbOSC400651j.C1.o15.fg
atgggacggccgccgtgctgcgacaaggaggggatcaagaaggggccatggacgcccgaggaggacatcatcctcgtctcctacatccaagaacacggccccggcaactggagatcggttcccatcaacacagggctgatgaggtgcagcaagagctgcaggctgcggtggacgaactacctgcggccggggataaagcgcggcaacttcacggcgcacgaggaggggatcatcgtccacctccagtcgctgctcggcaaccgctgggccgccatcgcctcctacctcccccagcgcaccgacaacgacatcaagaactactggaacacccacctcaagaagaagctcgccgccgccgccaactccacttcagcagcctccaaccgccaccccatcttcgccgacgccaccttcccctccgccgccggcagccacacggtgagcagcaactccgatgtcaaccagatggcagccattgctaggcgctcccccttcgccgactgcccatcctcctcctacgcctccagcatggacaacatctccaagctgctcgacggcttcatgaagaccaactcgccgtcgccgccgccgccgccgctgcagcactatgacggcggctattacgacgacgtcaagcccgccgtcgatgtcgtcggcaaccccttgctgtcgtccttcgactgcatgtccggcgccgacctggactgctgcttcgacgttcatcagcagcagccggcgtcgtcgttcatggagtacggcggctatggcggcggctacggcgacgagagcaagcagcagctgatgaaccaggcggcggcgccgctgtcttcgattgagaagtggctgttcgacgaggcggcggcggagcaggttgccgacctcatggacctctccgatggttgctgctccgtcccaatgatgttttaa

SEQ ID NO: 12463 - DNA, 801 bp, Oryza sativa
  Clone ID: TFbOSC414191j.C1.o1.fg
atggggaggtcgccgtgctgcgagaaggcgcacacgaacaagggcgcgtggaccaaggaggaggaccagcgcctcatcgcccacatcaaccagcacggcgagggctgctggaggtcgctccccaaggccgccgggttgctgcgttgcgggaagagctgccgcctccggtggatcaactacctccgccccgacctcaagcgcggcaacttcaccgacgaggaagacgagctcatcatcaagctccacgagctcctcggcaacaagtggtcgctgatcgccgggaggctgccggggaggacggacaacgagatcaagaactactggaacacccacatcaagcgcaagctcctcgcccgcggcctcgacccgctcacgcaccgcccgctcaatgccgccgccgccgtcgccggccaccaccacctcgccgccggcggctccagctgctcgcccgacgcaacaagcggccacagcagctgcagcgacggcgacgagtaccgcggcggcatcgacctcaacctgtccataagcccgccgtcgtcgtcgtcccagccgtcttccccgccgccgccgccgcacgaagcagaggcgagacgcgccggagcgacggcgagctacacctaccaccaccactactcggagacgagggagaagatatgcctgtgcttgaaccacctcgggctgcacggcggcgacgagtgcagctgcggcggctcgtcggcctcttcctcctcctcgccgccgccggcgacggcgagctcgcgagcgttcacattcgccaatgcatcgtcgtcaacagtgtaa

SEQ ID NO: 12464 - DNA, 1446 bp, Oryza sativa
  Clone ID: TFbOSC100839j.C1.o7.fg
atggcaaccgacgaaaacggtgccgacgatcgcgccggcggcgagagcaccgtggatcatctcaggagccatatgaactacggcgacatggatttgtcaggggaagagcacgtgccaaaggcgcgaaagccgtacacgatcacgaagcagcgcgagaagtggacggacgaggagcacaggctgttcttggaagccctgcagctgcacggccgcgcatggcgccgtatacaagagcacataggtaccaagactgccgtgcaaatccgtagccacgcgcagaagttcttctctaaggtcgtcagagaatcttcggggagtaacaccggctcgggcggcgcgtccgccgcggcggcggcggcggccatccagatccctccgccgcggccgaagaggaagccggcgcacccgtacccgcgcaaggtggacggcgcggccaagaagcacgtcccggcgctcaggcagctggagaagccgccgttgtggatgcagtccctgtccgagcaggaggagggctcgccgacgtcggtgctgacggcggcgcagataggcaccgaggccctgggcggtgggttctcgaataactcgagcggcagcgggtcgctggctccgtcagccgccggtacggatgagcatgtcgacggtggcggctcgccggcgtcgtcggtggacagagaggacgggtgcctctcaccgagcatcccgactgctgagttggctatgcaggcgccaaatactaagatgtcaattgcaaccacggatgccaaagaagcatcctcagaagcatcagtcttcaggctattcggaaagagcgtagtggttaaggattcagaccagctgcacctgcttaatggcagtaacattgcaacgagtggttcagttgagagagcaaccagaaacatactagtaccttcttttgctgctgccccagaagggagctcgtcgaatccatggccgagcagcatgcaacagtttctctacttccttcctcgatcggatggtttcgccgcgcaacctgtcatgccatggttgagctacaacgggagccttccatgcgcgctgttctacccggcggcggcggcggctgcgaaccagcagtgccaccgtgattcagagggcgtagagttcagagtctcgcagagggaaggatcgctgacgggctcgaacacggcctccagcgtcgtgcttggatcgtcggcggcggtaccggcggcggcggcggcggctcagaattcggacgtcgcggagtcccgtggccaagggaacagcagggaggcggcggcctcgccacggctgaccaagtgcgagagctcggcgtccgtcaccctgctgcagaggggcttcatgccgtacaagaggtgcgcggcggagagcgagctgctgcgatcggaggccgccggaggagaggaggccgtcgccgacggtgagctgacaaggctgtgcttgtga

SEQ ID NO: 12465 - DNA, 660 bp, Oryza sativa
  Clone ID: TFbOSC400726j.C1.o24.fg
atggggttgctccgctgccgaaagagctgctgcctccactggatgaactacctcagccccgacctcaagtgcagcaacttcaccgacgacgacgacgagctcaccatcaacctccacgcccttctcggcaacaagtggaacacgcacatcaagcgcaagctcatgagccagggcatcgatccgcagacgcatcagccggtaacaaacacctttggcaatgtggtgttcgcaggattggcctatctcacttcctatctcaaagcgaagaagcacaattcctgcatattctctaaaaacatcctgttagaagctcttcttgctagtttattctgcttgactgcttcaaaaatgccaaaaggggtaggagctctaactattgcattgaaggagggagctgtttttgctgcttgtgcaggacaaattctccaggctttccctttttggtggaaatggaattcaatgtgtcacaggaaggctgaaattgtaaggtcaatacttgctatcattgttgttatttatcagcctatccagtcaagcaaccgtgcacttgctgacctcccgagccttcttcagaaatctccttcaccatctgtagcgtttgttaattttttcctggctaaaaaggttgtgaagcacacctcccaacatgacatcaactag

SEQ ID NO: 12466 - DNA, 1782 bp, Oryza sativa
  Clone ID: TFbOSC401760j.C1.o2.fg
atgccggcggtgaaggtggaggaggaggaggaggagcggaatccggtggcgtcgagcccttcggtctcggaggggagcgcgcacgccgccgcgctggcgtcgcccaccgcggcggattccatcttcggtcgcaggcgaaaaagtggcccggtaaggagagctaagggtggctggacaccagaagaggatgaaaaattgcggaaggcagttgatatttataatggcaaaaactggaagaagatagccgaatctttctctgataggacagaagtacaatgtctgcatagatggcagaaagttcttgatcctgaacttataaaaggtccatggacccaagaggaagatgatgtcatcatcaatatggtaaagaagcatggaccaaaaaaatggtctgttatagcaaggtcactaaatggtcgaattggtaaacaatgccgagagaggtggcataatcatttggacccacaaataaggaaagaagcttggactgttgaagaggagcgtgtgcttgcccgtgctcattgtatgtatgggaataaatgggcagaaattgctaaacttcttcctggaaggacagacaattctataaaaaaccattggaacagttcattaagaaaaaaaatagatgactacaataccagagatattctgccagttcatccaccagttgttggtgatggtttgaaacagttaccaaagcggccacctgctgacaaccattttgacttaaacaaagagccaattatctgttcaagagaccgcttaggagtagttcattctgaccctacctctcatcaacgggcatccaatttgaaagactttaagggctgtgcagattacctctcacttggtcagccagtaacttcatgtgaggcttctgcagctgatgattctgcttttgatctagcaacacagggaatgagaatggattctgttcatgacaagggtactgggaacaattttgtttgtgggaaggttcagggaatcaattttcttggtgacaagggacttaaaattaatcagatatcagataaaatgggctgttcaagacaagctaagagagaaggtgaagcagccattaatggcggcggatcatccttgcagagtgaggctcactctgttggttctctttgttatcagatacctaagatggaagacattgctcctgcccaatccccagtgtttacagcaaattatgtaccggaacactctaggaacgtaatgcactcacccaatggctatactactccacccactcatggaaaaggatcagatcagcttagtgttgaatccatattgagaagtgctgctgaaaaattccatggtactccctcaatactaagaagaagaaaaagagataaaccgacgcctgctgaagataatgatttgaagattggcagattaagcagtgatgacttccacactcccataggaaagtgtactacagatagcccacagtcattcaaaactgcagcacttttgtccttgggtcctatggatgagcaagggagtcttgatgtttcccctccatatcgactaaggtcaaaaagattggctgtcctgaaaactgttcaaaatcatctggatttttcatctgatgaaatgagcatttgtgatactacaatgaaatctgcctgcgggaattctgattgtgctaatgccagtagtggtgtttcaagcattcaagggaagaaactggatgagcatatgattggattggaaactttaaccatgaactttgcgcatacgacaaagttggatgctacccaacctaatttgtag

SEQ ID NO: 12467 - DNA, 804 bp, Oryza sativa
  Clone ID: TFbOSC900293j.C1.o1.fg
atggggaggcagccgtgctgcgacaaggtggggctgaagaaggggccgtggacggcggaggaggaccagaagctcgtcgccttcctcctcacccacggccactgctgctggcgcgtcgtccccaagctcgcagggttgctgaggtgcgggaagagctgcaggctgaggtggaccaactacctgaggcccgacctcaagaggggcctcctctccgacgacgaggagcggctcgtcatcgacctgcacgcgcagctcggcaacaggtggtccaagatcgcggcgcggctccccgggaggacggacaacgagatcaagaaccactggaacacacacatcaagaagaagctccgcaagatgggcatcgaccccgtcacccaccagccgctggagccgcctcgtcctccgccgcgcgagcaggatgccacgccgccgccgccgccgccgccgcctcaggagatcgaggagagcgaggaggaggagcaggagccttcgccgttgatcgagccgcacgagatcaccgcgccaccgccggcggccgcggccgaggccgccacgagcaactgctctgtttcccctgcttcggtgctctccccgtcctgctcctcgtcggcgtcggctgcctcggcggtggacgtggcggagtggccggagcccatgtacatgttcggcatggatggcatcatggacgtcggctggaacggcctcatctccggcgccggcgtggacgtcgacgtcgacgtcgacccgttcgaccattactaccacgacgccagcttcgacgatcaagacgtctggatcatctga

SEQ ID NO: 12468 - DNA, 870 bp, Oryza sativa
  Clone ID: TFbOSC401237j.C1.o40.fg
atggaagggcagcagttcgcttggggaagggaggagggagggtggaggaaagggccatggacagcgcaggaagacaagctgctggttgagtacgtgaggcagcacggcgaagggaggtggaattctgtcgccaagatcacaggtctgaagagaagtggcaagagctgcaggcttcgttgggtgaactacctgagacctgacctcaagcgaggcaagatcacgccacaggaggagagcgtcatactcgagcttcatgccttgtggggaaacaggtggtcgacgatcgcgcgtagcctgcctggcaggacggacaacgagatcaagaactactggaggacgcacttcaagaagggcaagccgtccaagaacatcgagcgcgcgagggctcggttcctgaagcagcgccgcgagatgcagcagcagagccagctgatgcaaaccggccagcagcagcagctcggccaagacgacgacgccaccagcgcggtggtggacgacaaccttgcggaggtcgcgccaccagccgccacctcgctgacccacgacggcgagctccagataatgcaggagatggcgccggacatggacgacctgctgtactaccacccgggagacatgtcgccctattcctacgacgacctcctcggcagcggcggcggcgagtgcggcgccgtggcggccagcgctggcgctgccgcctcgacgagcgagggctcaagcgaggagctcgacggcggcgccgccacgtggggcagcctgtggaacctcgacgacgtggtgcacgacatgatgatcgactgcgccgccggcgccggctgctgctggggtagcttccctccgctacaggataaaggcctcgctttctactag

SEQ ID NO: 12469 - DNA, 207 bp, Oryza sativa
  Clone ID: TFbOSC33250j.C1.o1.gm
ctgcaggcttaggtggttcaaccagctcgacccaagaatcaaccggagccccttcaccgaggaggaggaggagctcctcctcgcgtcgcaccgcgcccacggcaaccggtgggcggtgatcgcgaggctcttcccgggccgcacggacaacgccgtcaagaaccactggcatgtgatcatggcgcggcggtgcagggagcggatggg

SEQ ID NO: 12470 - DNA, 1191 bp, Oryza sativa
  Clone ID: TFbOSC400225j.C1.o51.gm
atggggaggtcgccgtgctgcgacaaggcgagcgtgaagcgggggccgtggtcggaggaggaggacgccatactcaggagcttcgtcgagaggttcggcaatgccggcaactggatcgcgctgccccacaaagcagggcttaaacggtgcggcaagagctgccgcctccggtggctcaactacctccgcccggcgatccggcacggcggcttcaccgacgaggaggacaacctcatcctgtcgctctacggcgaaatgggaagcaagtggtcggtgatcgcgtccaagctccccggccggacggacaacgacgtcaagaactactggaacaccaagctcaagaagaggtacttggccgcggccgcaacagaagcaaccactcctcctcctcctgccgccggcgacgatgacaacaacccaacgacacaagcctccagccaacccgctcctcctactcctccggcgcccctcgtcaacctcgacgcggccggcctcgacggcgccgtgggcgacaacgacgagctcctgctgcacaagtcggagcagctgtacgccgagctgatgggcctcatcgagcagcagcagtactccacgatcaccgccgccgccgtcgacgcggcgacgacgacgacgtcgtggtcgtcgccgtcgacgggaacgacaagtccgaccgctagcagcagtactgacggcagcagcagcagcagcaacctgccgtggccggccgtggacgtgcacgacagtacgatgatgccgccgttgtcggagtccagcggcagcagcagcggcttgttcttcggctctcacgcgttcggtagtggctcgttccaagacctgctcggctctgcagcttccttcgacgatgtcatgctgtcgcaagagatgcttgataatttcaaaaatggcgcaacgcctggcggagatggtgatctctccccgacggacgcctgcctcacggtgatggagctggtgaacatgatctccgtccttatggcgctcaccgctgccatccgccttgacgtcccagccaagctctgggctagaggtgccaatgccccgttccccacgggacaccctaacccctttgtcctcgagcgcctcctccgcctgctcacctcctgcagtgtcttctgcgagcacaagggctccccgcgccacttcgcgctcaccaccggcgatgatgaatcctag

SEQ ID NO: 12471 - DNA, 511 bp, Oryza sativa
  Clone ID: TFbOSC3478j.C1.o1.fg
cggaaaaggattcatccgatttggcaatcaacaaaggcccgtcgctggatcttgtcaaatctcccttgatgatgaatgatgcatctgcaactgtaactgcaatgcagcccaacgaggggatggaggagttccctgtcaaggttcggaagccttacacgatcaccaagcagcgggagaagtggacggaagaagagcacgacaagttccttgaggcattgaagctgtatggtcgctcttggcgtcagatacaagagcacattggcacaaagactgctgtccaaattcggagccatgcccagaagtttttctcaaaggtggtgcgtgagcccggttccaataatgcgattgagatccctccacctaggccaaagagaaaaccacttcatccgtaccctcgaaagtgtgcgaattctggatcggacgcaaatccagcaacagcgcaattgaagcttgcatgcctgcaggtcgactctagaggatccccgggtaccgagctcgaattcgccctata

SEQ ID NO: 12472 - DNA, 1317 bp, Oryza sativa
  Clone ID: TFbOSC900059j.C1.o19.fg
atggcttccatgccgcagctggaggaaaaggattcatccgatttggcaatcaacaaaggcccgtcgctggatcttgtcaaatctcccttgatgatgaatgatgcatctgcaactgtaactgcaatgcagcccaacgaggggatggaggagttccctgtcaaggttcggaagccttacacgatcaccaagcagcgggagaagtggacggaagaagagcacgacaagttccttgaggcattgaagctgtatggtcgctcttggcgtcagatacaagagcacattggcacaaagactgctgtccaaattcggagccatgcccagaagtttttctcaaaggtggtgcgtgagcccggttccaataatgcgattgagatccctccacctaggccaaagagaaaaccacttcatccgtaccctcgaaagtgtgcgaattctggatcggacgcaaatccagcaacagcgcaattgaagcttgctcctggctcatcttcatctggctctgatcaagagaatggttctcctatatcggtgctatctgcgatgcagtcagatgcttttggatcgtcagtatccaatccatcaaccagatgtacctccccagcgtcatctgacgatggaaataacattcccacattcacgagtggggaagataataatgtgccttgtgaaccaacagtgatagatccgtcccagtcccacaaggaaatagaccaagatagaaaagacgtgaataatatgtctgaagaggattcttcagaagaagaggtgcaagaaacaagcttgaagctatttgggaggacagttgtcatcccagatccaaggaagagaagctcctcagatccgaagcatgaaagtgaggagcagatatcacagccttccaatgaagaaatgttgcaggcttcttcatcggttggggagattccagcggcatattgtgcaccaaatggttggtttatgtcatacaattctttcccattccaattcggtgaatcagcggcagatgctagaattccccctttacacgtgtggtggccttactacggttttgctcccattagccatcctagaggactaagcacagtgatgcagcagactgaaggtagtgacgagagtgacggtgtgaagagccactcatccgaatcaagttcggactccggggaaaatgtgcagatgaccgctccccagagctcgagaatagtggaatcacttggagcgatttacgtccgagactcaggttcaagttttgagctaaaaccgagcgcaaattcagcgtttgtaagagtgaagccaagcaacagcggagatgaagagatttga

SEQ ID NO: 12473 - DNA, 3015 bp, Oryza sativa
  Clone ID: TFbOSC405568j.C1.o6.fg
atgaggatcatgataaagggcggggtgtggaagaacacggaggacgagatcctcaaggccgccgtgatgaagtacggcaagaaccagtgggcgcgcatctcgtccctcctcgtccgcaagtccgccaagcagtgcaaggcccgctggtacgagtggctcgacccctccatcaagaagttatgttctcctcatgccatattgctgcaagcatacactgcttttgaagggctgatgactgaatggacaagggaagaggatgagaagttactgcatcttgctaaactcatgcctacgcagtggaggacaattgcacctattgttggtcgaacaccatctcagtgccttgagcgttatgagaaacttcttgatgctgcctgtgcaaaggatgagaattatgagcctaatgatgatccaaggaagttacggcctggtgagattgacccgaaccccgagtcaaaacctgcacgtcctgatcctgttgatatggatgaagatgaaaaggagatgctttctgaggcaagggctcgcttagctaacaccaggggtaaaaaggcaaagcggaaggcaagagagaaacaacttgaagaggcaaggcgacttgcctcactgcagaaaaggagagaattaaaggcggctggtattgatacacggcagaggaagagaaagagaaagggtatcgattataatgctgagattccttttgaaaagaggccgcctccaggtttttatgatactgttggtgaggacaggccacttgagcatgtacagttcccaaccactattgaggagcttgaaggtaagagaagagtagacatagaggcacaattaagaaaacaagacattgccaggaacaagattctccagaggcaggatgctcctgctgcaattatgcaggcaaatagactcaacgatccagaagctgtcacaaagaggtccaaattaatgcttccaccaccccaaatctctgatcatgagctagaagagatagcaaagatgggtaatgctggtgatccttctttagttgaggaacttggcgaaggtagtactgccacaagagcattgctttctagttattcccaaactccaagacttggaatgacaccattgcggacgccacaacgaactccagctgggaagggtgatgctattatgatggaggcagaaaatctagcgcgtctaagggagtctcagacccctcttttaggaggggataacccggagcttcacccatcagatttctctggtgttacaccacgtaagaaggaaatgcagactccaaatccaatggcaacacctttggcaagccctggccctggtgctactccaagaattggaatgacaccctccagagatggaagttcttttggtttaactccaaaaagtactcctttccgagatgagcttcgcataaatgaagaggtggatatgcaagatactgctaaacttgagcttcgtaggcaagctgaattgagaaaaagcctacgatctgggtttgcttctattccacagcctaagaatgagtaccagatagttatgccacctatcacggaggaggagaaggaagaagctgaagagaaaattgaggatatgtcagacaggcttgcacgagagagggctgaggaacaagcaaggcaggaagccttgctcagaaagagatccaaagttttgcagaggagcttgccaaggccaccggcagcttctatagaaattctccgacaaactctaattaagggtggtgaaagcagaagcaggagcaccttcgtgcctcctacatcacttgaacaagctgacgaactaataaatgaggagcttcttcggctccttgagcatgataatgctaaatatcctctagatgagaaaactcaaaaggataaaaagaaaggaagcaagcgccaggcgaatgggactccttctgtacctgagattgaagattttgatgaagacgaattaaaagaggccaattctatgcttgaggaggaggttcaataccttcgtgtcgccatgggacatgaaagtgaatctttggaagattttgtgaaagcacatgatgcatgccaagaggaccttatgttttttccaaataacaacagctatggtcttgccagcgttgctggaaattctgataagatagctgctttgcaatatgagtttgaaattgtgaagaagagaatggatgatgaagctaagaaggcttcgcggcttgagcagaaaatcaagcttctgacaccaaggataccaggtaggcttgggatgatgcaccataagcattgcaacatgtaccgagctggtaaactctggtcacaggttcaagatacattcaagcagatggacacttcagcaacagagcttgaatgctttcaagagctgcagaagcaggaacagatggctgcatcttatcgtataagaaatttgactgaagaagtaaacaaacagaaagcattagaacggactctccaaagccgctatggtgatctgttaactagttacaagaggatccaagagcagcttgaggagcataagaggcaactgatgatacaggaggaaatggaagcacagaagcgtgctcaggaggaggaggaaatggaagcacagaagcgtacgcaggcagaggaagaaaaagaagcggcgaaagctgaagaggaagcaagaaagatggatagggctgctgatgaagaagcggcaggaagcaaacaagtcaatgaggatcagatggatgttgacaactctaatgctgatggtgatgaattcgtaggtccgattcccccaggaccaggtactcaaggtgacgacaatgtggtggcggtcgaagagaactctagctcgcagagcggtgatactgctaccacggaagatggatcttgtggcatgatcgacgcatcaaaatcaggaggtcaggatcacatcgacagcaaggatgaacttcccactgttggtgccagtctagatgatggaagtgctgctgcatcttctgatcaagatgtctcaactgaggtgaatgccactgtccctgaatag

SEQ ID NO: 12474 - DNA, 870 bp, Oryza sativa
  Clone ID: TFbOSC900289j.C1.o24.fg
atggggcgcgcgccgtgctgcgacaaggcgagcgtgaagcgggggccgtggtcgccggaggaggacgagcagctgcggagctacgtccagagccacggcatcggcggcaactggatcgcgctcccgcagaaagcagggctcaaccgctgcggcaagagctgcaggctccggtggctcaactacctgaggccggacatcaagcacggcggctacaccgagcaggaggaccacatcatctgctcgctctacaactcgattggaagcaggtggtccatcatcgcgtcgaagctccccggccggactgacaacgacgtcaagaactactggaacaccaagctcaagaagaaagccatgggcgccgtgcagccgcgcgccgccgcctcggcgccgagccaatgcacgtcgtcagcgatggcgccggcgctctcgccggcctcctcgtccgtcaccagctcgagcggcgacgcctgcttcgccgccgccgccaccaccaccaccaccatgtacccgccaccgacgacgccgccgcagcagcagttcatccgcttcgacgcaccacccgcggcggcggcggcggcatccccgaccgacctcgcgcccgtgccaccaccggccaccgtcacggcggacggcgacggcggctgggcgtccgacgccttgtccctcgacgacgtgttcctcggcgagctcacggccggcgagccgctgttcccttacgccgagctgttcagcggcttcgccggcgcggcgccggacagcaaggccaccttggagctctcggcgtgctacttcccgaacatggcggagatgtgggcggcctccgaccacgcctacgccaagccacagggtctctgcaacaccctgacatag

SEQ ID NO: 12475 - DNA, 744 bp, Oryza sativa
  Clone ID: TFbOSC400014j.C1.o33.fg
atggacgagatcagaagcctgatgctgcagcaagggtggaggaagggcccgtggactgcgctggaggacaggctcctgaccgagtacgtgcagcagcacggcgaaggcagctggaactccgtggccaagctcacagggctgaggcgcagcgggaagagctgccggctgcggtgggtgaactatctcaggccggacctgaagcgggggaagatcacccccgacgaggagaccgtcatcctccagctgcacgccatgctcggcaacagatggtcggcgatcgcgcggtgcctgccggggaggacggacaacgagatcaagaactactggaggacgcacttcaagaaggcgaggccgtcgcggcgtgcgcgggcgcagctgctgcaccagtaccagctccagcagcagcagcagcatcgccagtatctccatagcctgaaccttctgcagcagcagcagcagcagcttcagcaacagcaacagcaacagcaacagcagatgatgttgctgcaggagcaggagcagcagagcccgcaggaggaggcagctgacgattccatggtgatgatgatgatgaacgatctccagagcaaggagcgttgctgcacggcggtctcggtggtgcccgacgactgcgtgctccccgccgatgatgatgcgatctgggacagcctctggaggctcgtcgacggcgatggcagctgcggcgaaggctcgagcgggggcgagtactgggctactagctaa

SEQ ID NO: 12476 - DNA, 246 bp, Oryza sativa
  unsure (1)..(246): unsure at all n locations
  Clone ID: TFbOSC26666j.C1.o1.hg
ctgtcgtcggctgagctccggcgagggccgtggaccgtcgatgaggacctcaccctcatcaattacatctctgatcacggcgagggccgctggaacgcactcgcacgcgccgccggtctgaagaggactgggaagagctgccggctccggtggctgaactatctccggccggatgtgaagcgcggcaacttcaccgcagaggagcagctgctcatcctcgacctccactcccgatggggcanaccg

SEQ ID NO: 12477 - DNA, 783 bp, Oryza sativa
  Clone ID: TFbOSC401685j.C1.o176.fg
atggggagagcagtggagcagcagcagggtggatgctgctcggagaagaagaagaagctgaggaaagggctatggtcgccggaggaggacgagcggctggcgacgcacatcgcgcggttcggcgtcagctgctggagctcggtgcccgacctcgccgggctgcagcgctgcggcaagagctgccgcctccggtggatgaactacctccgccccgacctcaagcgcggccgcttctcccaccacgaggaggagctcatcttggctctccatgacaagctcggcaacagctggtcacagatcgcggcgaggctgccggggaggtcggacaacgagatcaagaacttctggaacgcgcggctgcgcaagaagctccggcagacggagtcgtcgtcgtcggcgacgacggcggcgggggcggcggcgaccggacaccgccgcggcgaggctgaccggagtcgaccgccgccgcctgcatcgttcaacaccttctctcacgacgaccggacgactcctgctcctgccgcccacattgccgccgccgccgccgtcgaagcacccgcagcgatgacgacgacgggcggcgccgtcggcggcggtgttctcgtggacaacagtggtggtcaccgtgatgcggtggcggaggcggcgcggggacacgtcggcagcggcgacgacgatggcttcttggccgtgctgcttggggagtactacctcgacgccggcggccacggcgacggattcagcttcttgggcggcggcggcggcggccacgtgttcagctaa

SEQ ID NO: 12478 - DNA, 720 bp, Oryza sativa
  Clone ID: TFbOSC400792j.C1.o8.fg
atggcggcggcggaagtgcagtcggctgccgggtgggggaggcagctgcagcaggacggcggcgggtggaggaaagggccgtggacgagccaggaggacgcgctgctcgtcgagcatgtcaggcagcacggcgaaggccggtggaattctgtctccaagcttacaggtctgaagagaagcggcaagagctgcaggctacgatgggttaactacctgaggcctgatctgaagagaggcaagatcactccccaggaggagagcatcatcgtccagctccatgccttgtggggcaacaggtggtcgacgatcgcgcgtagcctcccgggcaggacggacaacgagatcaagaactactggaggacgcacttcaagaagggcaagccgtccaagaacatcgagcgcgccagggccaggttcctgaagcagcgccgcgagatgcagcagagccagcagctgcagcagccgacgctaatgccgacgccgacgccgcagagcaaggacatcatcgttgccgagaccggtgacgcgcgcaccgacgacgacgcgggcggcgccgcagcggctgtggcgccgtcgtcgtcgtcggcgtctttgtcgatggcgggccgagaggcggaggacttgatcatgcaccaggacgcgatggacgacctcatgatgtgccccgccatgtctaccacctcatcctccacggcgccgccgtcgccggccatcagctga

SEQ ID NO: 12479 - DNA, 1536 bp, Oryza sativa
  Clone ID: TFbOSC101298j.C1.o8.fg
atggccacgccgtcgatgccagcgccggcggccgaggcggcggcggcggcgactacggcgacggcgaactccatgcctctcgctccgccgcagccgccgtcctcgggggcgccgttctcccagcccccctcgacggcaggcaccgtcaagacggaggcccctccgccgccatccacctcggcttcctcagccgcctccgccgccgcccccgcccctgccgccgccgccgccgccgccgcggccgaggagtcgccctgcaccatcaccatcccgagctattcagcgtggttctcctacgactccatccacgagaccgagcgccgcctcatgccggagttcttcgaaggggaggcggcggcggcgtccgggtccaggggcccggaggcttacaagtactaccgtgacaccctcgtgaggaggttccgggcgcggccggggcggcggctgacgctcaccgaggccaggcgtgggctcgtcggagatgtcggctccgtgcgtcgcgtgttcgacttccttgaggaatgggggctgataaactatggagcttcgccgtcgggagcgaagcaggggagagataagaaagaggaggcagcgttatcgcagtcctctttgccgattggggcaacaatgcccagtaagctttgcaccgggtgccgcaccgtgtgcgggcttgcttatttctcttgtgagaaggcagatataagcctctgtgctagatgctatgtccgtgccaattaccggccaggtcttacttcggcagacttcaagcgaattgaaattactgaggacgcaaaatcagattggacagataaagaaactcttcaccttcttgaggccgtcctgcattatggggaagactggaaaaaggtttctcatcatgttggtagtcgatcagaaaaggactgcattgctagattcacccgattaccttttggggaacagttcatgggacccaaggaggacaaaattcagtttgggaatgattgtgatctcaatgaagaatctggatcacatatctcaaaacgactacgcctcacgccactggctgatgctagcaatccaatcatggcccaggttgcgttcttgtcagccattgttggttcagatgttgctgtagctgcagggcaagcagctatttctgcacagtcccaggttgatataagtgccagcgagactgattcttctatcaacatcagcaaggaagaagaatcttcttgcacaaatggtctttcagccaatgatttgctcaaagaggcgtctgccaacgcacaagtacaacttgaaaaggaacggaaggctatagagcagtctttatctgacatagtgggtgttcagatgaaggaaatccaggataaaatacgtcgtttcgagcagaaggagctgctgatggagaaagagaggaagcaactccactgcttgaaggaattgctcttttctgatcagctagctgttgtgcagcaccaacgcaggcccccggctgtcaccacagagagcaaggacgatgagaaaccgaagcccgttatcagcataagttga

SEQ ID NO: 12480 - DNA, 891 bp, Oryza sativa
  Clone ID: TFbOSC401685j.C1.o194.gm
atggcggccttctcctccaactccggcgacctcctcttcttctccggcattggcgacaccctagactctaacagaggaccctacgggtttttggggagcgcaacgcgcgactactcactgttcgtcaacatctacttcaccttcaccaatatgtcgaacactggagacaacggcaacactggatacaagaagaaggaggctcccgtcaacaccaacggaggcaatactacctcaaactccagcggaggaccattcttggggctgaggtggatgaactacctgaggcctgacctgaagaaggagcccatctccgatcgagaggcggagaccatcctctccctgcagaaactcctcggcaacaggtggtcggtgatcgcggcgaagatgccgggcaggacggacaacgagatcaagaactactggaattcccgcatcaggaagcgtcagtccgccgccgccggagctaaaggcgagccggcgccggccacggtcatggagaaagaaccgacggccaatgcggccaccgtggcggcggcgccggaggcggcatctcctcctcctcctcctatcccggcgcggctcccgatgttctcctgccaactgctcgacggaggcggcagcggcggcgccaccgccaccacacagtcgccgccgaacgccggttcatcggatatcagcgaggtgagcgcctgcggcggcaacggcggcggcgaggactcctcccgtgactactgcttctccggcggcgacgtcgacggcgacggcgacatggtccacctcctcgcgctcgatgacctcgacttgctcgtcgatgtccccggattgctcgacgttgatgcgtgggattgcgagctgtaccgtgcagattattcgacgagtagagctcgatga

SEQ ID NO: 12481 - DNA, 921 bp, Oryza sativa
  Clone ID: TFbOSC29542j.C1.o5.gm
atggtcggcgcagtgacagagggggagagaggtggccggcagcgggagagggagagagagacggtcgacgtgatagcggcggcgggagaggaggagaggtggcggccggcgcgacggcgagctcggtggtggagatgttctaacgcgccgggtgctcgaccacgggccccgccgccgcctgccgacaagcggcgcgctctccccatcgaccctctctccctccccaaggcggtggggctgctccgctgccgaaagagctgctgcctccactggatgaactacctcagccccgacctcaagcgcggcaacttcaccgacgacgacgacgagctcaccatcaagctccacgcccttcttggcaacaagtggaacacgcacatcaagcgcaagctcttgagccagggcatcgatccgcagacgcatcagccggttagcgccgggaccagcgttgccgcggcaagcgagctgactacgacggccatcactgtcggcttcccgtccctggcgtcgtcgctagtggcggaggggtctctggcggaggccgagtcagcgacggaggtgagctcgagctccgtgtcgaggagcgccgcgaagtcgtcgttgccggtcgatggcgacggggaggacagcgacttggcggtgaggcttacggccgagggcaaagggcgtgctttggttggctggggtggggtggatgcgcctccgtgctcgcccaccaccgctctgctgctccacccgtcgccgcgctcgcccatcgcctcttcgctgccgcactcgccctctgcttctctgcccgcggccgctctcgcccgtcgccgcgctcgcgctcacacccgccgctccgctaccgcgctcgccctctgctgcgccacccgcatctgcgcgctgctccgcctgccgccggcctccctcactgaataa

SEQ ID NO: 12482 - DNA, 921 bp, Oryza sativa; identical to SEQ ID NO: 12481
  Clone ID: TFbOSC404645j.C1.o7.gm

SEQ ID NO: 12483 - DNA, 4104 bp, Oryza sativa
  Clone ID: TFbOSC401001j.C1.o59.gm
atgtatcgggtgaagagcgagagcgactgcgatatgatccatcaggagcagatggactcgccggtggccgacgacggcagcagcggggggtcgccgcaccgcggcggcgggcccccgctgaagaaggggccatggacgtcggcggaggacgccatcctggtggactacgtgaagaagcacggcgaggggaactggaacgcggtgcagaagaacaccgggctgttccggtgcggcaagagctgccgcctccggtgggcgaaccacctgaggcccaacctcaagaagggggccttcaccgccgaggaggagaggctcatcatccagctccactccaagatggggaacaagtgggctcggatggccgctcatttgccagggcgcactgataatgaaataaagaattactggaatactcgaataaagagatgccagcgagctggcctacccatctatcctaccagcgtatgcaatcaatcctcaaatgaagatcagcagtgctccagtgattttgactgtggcgagaatttgtcaaacgatcttctgaatgcaaatggtctttacctaccagattttacctgtgacaatttcattgctaattcagaggctttaccttatgcaccacatctttcagccgtttctataagcaatctccttggccagagctttgcatcaaaaagctgtagcttcatggatcaggtaaaccagacagggatgctaaaacagtctgatggtgtgcttcctggattgagcgataccatcaacggtgtgatttcctcggtggatcaattctcaaatgactctgagaagctcaagcaggctgtgggttttgactatctccatgaagccaactctaccagcaagattattgcacctttcgggggtgcacttaatggcagccatgcctttttaaatggcaatttctctgcttctaggcccacaagtggtcctttgaagatggagctcccttcactccaagatactgaatctgatccaaacagctggctcaagtacactgtagctcctgcgttgcagcctactgagttagttgatccctacctgcagtctccagcagcaaccccttcagtgaaatcagagtgcgcgtcgccaaggaatagtggccttttggaagagttgattcatgaagctcagaccctaagatccgggaagaaccaacagacatctgtgataagttctagttcttctgtcggtacgccatgtaatactacggttcttagcccagagtttgatatgtgtcaggaatactgggaagaacaacatcctggtccattcctcaatgactgtgctcctttcagtggcaattcattcactgaatccacccctcctgttagcgctgcatcgcctgacatctttcagctctccaaagtttccccagcacaaagcacttcaatgggatctggagagcaagtaatggggcctaaatatgaacctggggacacttcacctcatcctgaaaacttcaggccagatgcattgttttctgggaatacagctgatccatcagttttcaacaatgccatagcaatgcttctgggcaatgacttgagtatcgattgcagacctgttcttggcgacggtatcatgttcaattcttcctcgtggagcaacatgccacacgcctgtgaaatcctgcaaacctgtgtcaccagcggcagcgatgacgcaaggatcggccaggtgtcaggccatacagagataggagttgtgatactgcaacaggctgagagttcttctcctgatgcttccatgactgacattgcacctattcttgatgagattgacccgctcttgggtgcaagctctactcatcctgatacaattccaaaggatgattcggacactgattcacatgtttcctcacaggatcatcaaactgatgatgatagtaatgatgaaactgacaataatgatgctaaagagaatggtgaggaaaagaataaagaacaaggaaaggaagctgcatttatttggacagcagatgatgaaaaaaatctgatggatcttggatattctgagatggaaagaaaccgcaggttggagcttttgatggccagacgaagatccaggaagaacataagaagaagcggcaattctggctcagcaccctcagttctgcatacaaggaaaaacccattcgatcttcctcttgatcagtccaatgatggtgatgtttctgcagataataatgaggaccacaaggacctcgatgaaaaagatttgcccaatgagcatgggtctccagctctgcagagacaggatagcgaccttgcggatgttggaagtgaatgctcggatggcatcaactccgtggatgttgaattagacaacagtgacattgatgatcgtgagattgctctacaacactttgtctttgaaagatcacaggaaagagaagcatatctttcctcaacaaaaggaaagggtcctgaagatgattacctgctcagttcagttgggaactccaagacacttcatccagtagctgacctgtttagctgggaagatggaaatggtgaaagcagccttggtgttaactcttcccataacatgtcagttgaattctcggactgggtttcatcccccaagccaattgcagagcatgattcaggaccagagaaccttcaggagtttcttaatactgaagttgcatcaagttcaaagacaattgttctaggcgcaagaaatccagctgaaaataatggaaatgttgattccatatcctattcaaacaatgaaatgccttcagataacttgggtcatgggtccatggagttcccatctgaattttgtaatgaatcactgccagtaatatctagggacttgcaccctatccctgaagagagggttgtcgagaacttcaatgtgcaagaaaagcatgaagcagaagaaacagctgcaggatatccacttgattctgatgatgatgctgataaaatctatcctgagcccatggaggacaatgtaattgatgaaagtttcctatcagaactggatgcggtaggagatttccgggtagaagcaacaagatcggaccagcagatgcctgatgttgactcccatattgataataacacttccaatggtgttgcagagagctccttgattagccctcagatttcaagtaacatattttcaaatatgaaatatgccagtatgctcgaacatgaggagaattctccattggttgatgacctaaatggcaccggtcctgaatttggttggtcattaggagcatcttatgatgaccctgagcagactgtctacaatccgaggcgacggattcttggagcaagtcgttttgaagaaactaacacagagatgaagccactatttgatgagacagaagcatcttttgtcaatgcaccaatagaagcaaacttggtagttggaccaagtaaagtggatgttgctaatgagtctgagttaactaaaactgatacaaacatgatcgttcttgatgccaattctctggaggatatagagacggcctttaaacaagcaagcaatggcgttgttgagtccaccgtggacaatgaaaccccacaggagcacacaactgctgctatgaacagttccttcgaagaaaacgaagacaagcatggatgcggtgatactgtaaaattcaccatgcatgatgagcttccagaaggaacacatattgaaggtaacacagttggagatggtaaagagcctgaaccaatggggattacaagcagcatggatgtcattgatgcaaaatccatcgatgacatatatgctgctttgaagaagcagtcaagtgctgctgcgaatagttccttcgaacaaaacgaaggcaagaacggatgtggtgatactgtaacattcaccacgcacgatgagcttccggaaggaacacacattgaagatagggataatacagttgaagatggtaaagagcctgaaccgattgggactacaagcagcatggacactattgaggtgaaaacaattgatgacatagacgcagtgttcaagaagctctctgatggcggtaccaagagtgctgcccaggcagtggattgcgagaatacttgtgaagcaagtgatgaaagtgaacagcactga

SEQ ID NO: 12484 - DNA, 1524 bp, Oryza sativa
  Clone ID: TFbOSC401161j.C1.o11.np
atgatggcagaggcgcttcgggaggtgctaccgctgccctacttccccgggcagccgtgctggtacttgcaggagcggcgaggtgcggaggcgtggtcggcagaggagaacaaggtgttcgagagggccctcgcacaggtcgacctggactcgccgaacaggtgggagatggtcgccgcgatgctgcccaggaagacggtcatagacgtgatgaaccactacagggacctcgagaacgacgtcggctccatcgaggcagggctggtgccgttccctcactacagcagcagcttgtccccggcgtcctccgggttcaccctgcaggactgggacggcagcgacggcgggttcaggcgcggctgctacctcaaacgcggccgcgccccggaccaggagaggaagaaaggcgtcccgtggacggaggaggagcacaagtcgttcttgatggggctgaagaagtacgggaggggagactggaggaacatctcgcgctacttcgtgacgagccggacgccgacgcaggtggccagccacgcgcagaagtacttcatccgcctcaactccggcggcaaggacaagcgccggtctagcatccacgacatcaccacggtcaacctgccagaagaagacaccagcaacccctccccatcgccgccgtccgtgctcaccaccgcctcagaccagctcggctccctcgtggacacgaaacccgttcccccgccaccgtcactcggcgcgcaacggcacttcatgtcgccgctgccgggagcgctcggcgtcagccaccacccctacggcaacgtgaagctagagcccaatgcctcgttcttggccggcggcgatgcaatgcggacacttgtgacggcggttctcagcggcggagaaccgcacaaggaggaacacagagcaccgcctccgatcatatctacgggaacgacgaggctccggccaagtcgcagtcccgtgtcagtgtgtgattggctagccagttggttgcagagttgcttcatgcgtctcaggatcgcaaagtactggacggaagggccactaaccggttactgttttgatcaggaacaccagggctttccgagaaagagaaagcgaaaggctctgcttgatcgatgcgactatacaattcactgcatgaatctttcacttgattgtttgttcggcaagccgcaccgaccagcctcagccggaggtcagtgtatctcaacgccgacgccgtcggcgatcccgattcccgaccgaatgcatggtgaaataggagatcacagaccggagataaagtggcaccggtgctactgccgctttgtgttgtgctccagcgacttttgttcgtgcgaggtggaggaaagtgccagtactggcggtggtgcgctcctttccagcatttgctctgccattgggcacggcagggagagtgaaagcatcatcgacgccatcgcgcttttggggcgtcatgtccgccctcgccttcgtgcaaatattcagattctgcaaatggacgatataattgaggaa

SEQ ID NO: 12485 - DNA, 1023 bp, Oryza sativa
  Clone ID: TFbOSC400944j.C1.o23.fg
atggggaggtcgccgtgctgctgccacgacgccggggtgaagaaagggccgtggacggaggaggaggacagggcgctggtggagcacatcaagaagcagggcgggcacgtcggaagctggcgcggccttccccgggcggcggggctcaaccgctgcggcaagagctgccgcctccgctggaccaactacctccgccccgacatccgccgcggcaacttctccgacgacgaggagcgcctcatcatccgcctgcacgccgccctcggcaacaagtggtcgacgatcgcgacgcacctggacgggaggacggacaacgagatcaagaactactggaacacgcacatcaagaagaagctgctgcgaatgggcatcgaccccgtcacccaccagcgcctgccacccgacctcctcgccgacggcggcggcctcggcgccgcctcccctctcctctcgccgccggggccggcggcggcggcggcgctccagcctctcctctcggcggtggcgagcctcgggagcctcgacaccgcgctgaggcagttccagctgctgcagcacctgctgaattccatcacctcctctagcagcgacgtcgctgcgactgctggtctcatggccaccaacctagctgcaacaaacaccatggtgaactcgagcagcaacgtcgcaagcttccaggagcagatgaacgcattggcacatgcaaactaccagccaggttatctccgtgatgtcgtcccaagctttccagggcaagacatggcgccgcaactgaacagtactagcagtacacctagtacggctccagtgctcagatcaagcgctgaaccggctgatcagtgctgcaacgatgctgcattggtgcctgaaacttatccacgggaagtggcagcatctgttgatcactggaaggtgcaggattttcccagcttggagcccctggagctaccaaatctatcaactctggagagtgatcttgatccgttctggaaagagatactagaaagcagcttccgttcataa

SEQ ID NO: 12486 - DNA, 791 bp, Oryza sativa
  unsure (1)..(791): unsure at all n locations
  Clone ID: TFbOSC19785j.C1.o1.fg
atggcgacggcggcggagtcgcaggggctctccccggggttcaagttcaatccgtccgtcgagcagcttctctgcttcttcctcctgccctacttgcagcaccgacgcctcctcgtcgacggcgtcgtcttcctcgacgacccggcgagcgcgccgccgtgggcgctgctccaccgccacggccggggcggcgaggacgaggcctacttcatcgggccggtgcccgcaggtgacggccatggtggccggcggcagcagcaggtgagccgcaccgtcaccggcggcggcggcggcaagtggataaagcagaggacggagcggccgagaggggaggaggagccggtggtggtgttcggcggcgagacgttccggtgggaggagttcagcctcaacttccacgccgacgagcggtgccggagcggcagcaccgggtgggtgatgcacgagttcgccgtcgtgccccccgccggctcccgcgtcgccgccacccacaccgcctgccgcatcgccttcaccggccacggccagaagcgcaagcgcgtgcccgacggctacgtcttcgtcgacgtccatgtccagaccgccgccgccgncgccgccgtcgttcctccgttgccgatgttgtcctcgtacggcgaaccaccgcacgaacacttctctgacgatcatccgccgccgcattcttacacttattacacccaaggataccagcagttcttgccggcggcggagcaaaacgatcaagaacaggaatactgtgcaccggaccacagatttccaagaatattacc

SEQ ID NO: 12487 - DNA, 279 bp, Oryza sativa
  Clone ID: TFbOSC400170j.C1.o5.gm
atggaggcggaggaggagctgatatgcttctacctccgcaacaagctcgacggcctccacgacgacatcgagtgcgtcatccccgtcttagacatatactccgtcgacccgttgcagctctcagagattcaccacgagatgctgggcagcagcggcgaggagggggagccgtggttctacttctgcccgcggcaggagcgggaggtgcggggcgggcgaccgagctggaccacgccgtcggggtcctggaaggcggtgggcacgccgggggtcgtctaa

SEQ ID NO: 12488 - DNA, 849 bp, Oryza sativa
  Clone ID: TFbOSC101065j.C1.o12.fg
atggcgtcttccgcccatatggctgccgtgctgaacctgccctggggctaccgcttccgccccagcgaccgccagatcatcgccaactacctcggccccatggcgatccacggcgccgactccctccctcagaggggagacgtcgtggagggcgtggacgtcttcgccacgcgccctgccgcgatccccttcgagccgcggcgccacgtgtttgggcgggacgaggtgcgcgcctacttcttcggggaccagcccaccgacagccggggccgcgaggtgcccggaggtgcatggcttccgtgcggcggcggcgacaaggcgtactccggcggcgcggacggcggggaggcggtcgcgtacaggcgcaagtacgagttccgcgccgccaacgaggaagccgaccgcgcgggggaggaggcggcgacgccggcgcggccgagatggcggatgaaggagtaccggctcaacaagagcgccgccgagttccgccgcgcgtacgcgcagcccaaccccaaggcgaacatggactgcgtggtccgcgagatctacacgaaggcggtgccacctccaacgccaccgtccggccgctccggcgacgaggaaatgcaggaaggctccgactactccgtcatggacgaggacgagttggtggactacttgcttcagggcttcgaggacggcaacttcgacgaggaccaggaccagcccgcagcggcagaggacggcgactactccgacgaggacgaggaccagcccgcggcagcagaggacggcgactactccgacgaggaccaggaccagcccgcggcggcagaggacggcgactactccgacgaggatgagccctga

SEQ ID NO: 12489 - DNA, 1596 bp, Oryza sativa
  Clone ID: TFbOSC400934j.C1.o28.fg
atggccggcgagatgcctgacgccgacggcaagccccgctcggcctcctccgggttccagccgtcggcgccgccgcagccgcaggcgcagcagtaccagtacggcacgttcggggccccgtcctccgcccccggtgaggtcccgcagccggcggtcgggttcccccagccggccccgccgccggggctccggcactacccgcagccgcccccgccgtcctacgcggtctaccctccgcttcccccgcagacgtacccggccgccgcgccgtactacgccctgggctaccaggccgtgcaaggttacattcccgttgttgaaggaaggcctgtgagaatgcgacgccttccattttgcggccttggcatgggctggttcctgtttatcattggcttcttcctcgctgccattccatggtatattggagcttttgttttgatatgcgtccgagtacatgattacagggagaaaccaggatatgttgcttgcactattgcggcttcgcttgctgccattgctatcctgcttggtgtcacaagaggagaagagatttggagctcatcgagacgtagctccgcccacgggtcgtctcccggcgacaagccgccgccgtcgtcgtcgtcgtgcgggttcatcatccacgaggcggacgtgtactccgccgaccccgccgacctcacgagggggttcgcgccggcggtggcgaggagcagcggcgacgaggcgtggtacttcttcagcgccgtgagggggctcaagggcggccgcaaggcgcgcacggtggacgacggcgccgggtgctggcactcggaggccggcgcgaagcccgtgctcgccgcctcctccggccgccgcctggggcaccggcagagcttctccttcatcaccaaggacgacgacggccagcgcgtccgctccgggtggctgatggtggagctcagcctcgacgtcgacgaagaggagcagctggtcctgagcaaggtctacttcagcccgcgcgcgcccggcgccaggaaacccacgacggcggcggcgatgtcccgccacaagaggaagctgtccaccaccgacatcgcctcaccgccgcggcgccagagacgccaccgtgtagtaccatcatctccaccggaggagccgaacacgtccccgtcgccggcggctgcgcctccggaccagcaggaaggcggcgacgacgaccccgaccgcgggagcatttcgtggtggctgcggagggtgttcggcctgaccgccacctttaccgaggaggagtccatcgagctcaacccatggctgaaggacatcctgaggccgttcccgcctcccttgccgccgacgccgccgcctccatgcccgagccctcgccggaagctgatcgacatgccggagatcagggagttcatcatgcgcgggtcgtacctcggcggtggccctgcacctccgcgctacgagtgcgatcatccggccatggtgatgaccggcggcgatgatcagcagcagctcgatgagcagcgcagagacgatgttggcgatgatcgagctcattacgatcgggtggacggccagctgcagttcgaacggcactacctgcagttgtaa

SEQ ID NO: 12490 - DNA, 2847 bp, Oryza sativa
  Clone ID: TFbOSC900006j.C1.o17.fg
atgtcagccaccctctcctcttttcttctccttctcttctcttttctctcttctcttcctcttcaaagcgagcggaaggcgaagcaggtagagggcagcggcagagcagcgacgggcaagcatgacagcggggtggaggtggacgtgatcgcctcaacctactacatgagggcgcgagagcgcgatgctggcgcggaggcggacgcgttgcgggaggagctgtggagcgtgaaggccgagctcgagctcgccaagacaaaggcagtggcggcggcggcggcggcaggcgcgctagcggagaaggcgcaggaggtgtacaagcgcggcagggaggacgtgagaaacaccattgcatcttatcgcagtgcattgctgaaaatggagttattttctagggtactaccaccacttggcattgctatgggggactcttggtctgatactgaaatcatcatgttcttggctgagagaaaaacatgggatcctcttccacagaacatactggtgggggttgaccttactatgattgatccacgggactcccctggaaccctttggttcttgaattggcctgataaccagctatgctatgatgacgagaacaatgttttcagaaaggcaaagaatggatattggaagtgcgttgatgcttgcagaatacagacaggcacatctatcttgggcgtgaaactctgtttagagtttcatgaaggccaaacaccatgcggtacaagaagtgggttgatgatgtacgaatatttgatagaacagaatgatgaactgaatttaccacaggcctacaagtctctatgtagaatgttccttcagaaagacagaaagattgttgaagatgaacatatctccttgaatttaggtgttcatcataattttctgggatcctactctcaatatcttgcagaaatacaaaggcaaaatatggtaatgaattcccaggctgtgtcttcagacaaaaaaagtatcttcatcagagaattggatgaacgaaaaagcaagaaatgttccaccaagataaccaggtcaagcacaaggctctaccgacaaaagattcctcatatttggtgtctacgtcacagtgtgtctaggaaatggtttcgtgaatcaatgttcagagttattgataagttggcaaaattgcttgagtcagtattacttgatttggccactgtgagacaaaaaataaacaaaggtaaaaaacgaatttggaagatggaaggcaaattggaaaaggctcagattcaacatctgacagacttcaacaacaaatatggaccatctattcgacaatcagttgaaactgctgaacataataactgtgctttgaggtgtcttaataattatttggagttgatgattgaggaaccacggtttagttcaattgcctatgttcgtctggattcacaagtcaagaaactcgataaggagaacacgtctgcgatggatttatcatccagtttgcaccagatgcttcagaagttaaatttaagagtacaagatgaagaagtctgggtgtcacagttaggctcaaatttgcaggcttcattcagaaaaatcatggatacctcctcagaaataggaaaattagaagatgaagttttgcagctgaaggtcgatatagctgagtttgctccaggtgaagtaaccagttgtgcagtatatgaaatgatcaagacacttcaaattgttgaactgttcatgaataattccaccagacatttgaaacttatcgatggaattaattctgaaatgagagagtttggaagtatctttaatggcaaagtgagatgccttgttcgctttgctagatatcaacaaactattatggagaagtctacacagataaatttgttccagataatcaatttccttggtgacatccgtgctaaagttgacaaaatgactcaaatgtatggtctatctgaagttgtgcccattgtctcaaaccagtttatagaggggagcttcaatgccgatgcatatgcttttgagagtttgaaagagcacagcactgatctctgttttagttggagaacaaggaagtttcataacagattaattctccctccagtgaggcaacaaacttctgggacgtgttcatattacgcgacactatcatcagttgagtccttgtataaaagagaatatgcatcataccctactatcttaaaagataagattggacagcctgatgaatttctggttaatctgtcaagagctcagttggaagatatagtagaagatttttataccaggcataaagtcaagggttcgaaaaggttgaatgtttgtttagataagatgaaaaatgaaggcgttatttcggaagaatcatatatgaaccctcaggctcagtccacagaaagatacaaaatcaaacaatacgaagagctcaatcttgagattgcgatgagggaacgtgataaggaagaagtaagcattgttgacaagaagtgtataggaaagaagaaaaaaaggaggttcagaaaaaagatgagaatgaaggagcacatatttctgacgaagataaagaaagttattgagagccatataatggatggaaaggtgctcattgctagtttccgggtaacaactggttacttcaggttgctacctcatcaaatctacaaaattccagaagaagatccccaatatgaattgaataaaaaaggtaatccctgttctcattgtgtcgttgttgttggttttgggattcgggacggtgaatgttatctgatctatctaaattcatatgggacttcctggggacatgacggattcggtagaatataccttgatagtgtcaggaagctttttttagctcaggtctaa

SEQ ID NO: 12491 - DNA, 1095 bp, Oryza sativa
  Clone ID: TFbOSC900089j.C1.o24.fg
atggctgagatcggcaagggcttggtgttctcccccagcgacgaccagctcaccgacggctacctccggagctaccttgtccggaccagcctcgacgacctgccctccgccgccacctcctacttccacgtcgccgacgtgtactccgccccacccgatcagctcgtcgccggcctcgccccggcgcccggcaccggcgacggcgatggccgggtgtggtacgtgttcaccccagtgcgcgttctcggcagccgcggcgcgaggaaggctcgcaccgtcggcggcggctgcggcgagtgctggcacgcggagggaggccccaaggacgtcaagggcagcgccgccggcggcaagctgcagaagttctcgtacaagatcaagacggcgttgggcgccgtcgtcaagcccgggtggctcatggtggagttctcgttccccggctccgaccacctcgcgctctgcaaggtctaccgctcgccccgcacgtcgcgctacggcgcgccctcgccgccgtcctccgccgcgtcgtcaccgtcgagggccgcgccgccgcccgtgtcgtcgacgtccggccgcaagcgcaaggcagaggaggagtccgaccaccccgaggcgccagcgagcagcgcgccgcggcgaactctgccggcgtcggagcaacacgtcgacgtcgacgccgctgcagcatccgagccggatcagggcggctacctgagcactgaccagctggacagcgtcgcggcgttcgtgcaagaacacgaggcgttcgtgcaagaacacgagggggacgaggagttctgcaagagcctcgggttcgacgagcgctcggatccgcaatgctggaccaacttcttcttgtcggcgttggaggagttcgggccggcgccagaaaccgacgccgccgccgtcgccgtcgccgccgttgagcctggcccttgcccggagtacgaggaacacgatgacactgccactactgctgcgtccagccatgcttacgacagtgccacggctgagctggtgaacctctcggacaaggagttctatgacatcatcttctccggtgaccaacaaggcggcgccgctgtggctggatga

SEQ ID NO: 12492 - DNA, 1587 bp, Oryza sativa
  Clone ID: TFbOSC400849j.C1.o10.fg
atgcaccactacctcaaccggtggatcgccggcaagacgataccggagatggaggccgggttcgtcgccggcgccgacgtctacggcgacggccccgacgcgctgcggcggcggcaccggccgggatactggtgcaactgcgtgtacaagtggttcttcctttgccaccgcaagcgccagagctcgcgcaggaccaccggcaacaagcgcgccgagcgcgtcgtcgccgccggtgggcggtggaaggtggagcaggggaagaaggtgctcggcggcggcggcggcggcggggagagggacagcttagggttctactccagtaactccacgaagaagacgtcatggattatggaggagtacacgagctccgccgctgatggcgccgccgccgcccgcggcgaggaggacagaatggagcccgtgctctgcaagatctacctctcgccgcgcgcccccgccggcgagaagcgggcgctgttcggggaggacggcgtggcggtcgggcccgacggacgcaagaggaacgcccgggtgacggttctggcgacactgttcgacgacgtcgcggcactccttggacagccggtcgccgcgccgccgctgccggcgccaggcgaacagcttggccatggccatggccatttcgatgatgtagcggctcgtttcggacaggtcgccgtggcggcgctgccggcgtcgggcgatcttggccacggcgatttcgatgacgacgccgcggccctccttggacaggtcgccatggcgccggcgccggcgccgggacatcaccaacagggttatgtcgtcgcggaggcgccgctgccggagtcaggttatcttggccattatcaccacgacggccatctcgcgcaggcggcggcggcgccggagcaagatcattatcttggctatcacagtcacgacgcgcatgtcgtggacgcggaggcgacgccggagcaaggctatcatgacgacgcgcatgtcgcggtggcgccggcgccggagcaaggcgatcttggccatgaccaggggcatctcgcggcggcgctgacgccggaggaatgtggcgagatagttggcgcatacgaatttcacccggaaatggtgcagatgctgtccattggcttcgccgcgcccgacgaacagttgttgccgcagctgctagaccccaccggcggcggctacgacatggctagctccgccatcgccgccgttggcgacgtgaacgcatatgccgccgcggcgcccacgccgcgaattagacccaacgcggcggaggcaatggcggcgacggcgacggcagagacaatgccaccaccgctggacgccgtggcggccgagctatccgcgccgccgcgtggcttaccgccggagctcgctttcagtgccttgccgtcggtgcagcaggagccatcctgtgacgacggcgacaacttcggcgagctcgtggcggaggcgatgccgccgttgatcggggagaacgccggcgtcgatgccggcagcgacgagcctctgccggatttggccggcatcatgacggagttggattttggacatgactttttcagcaatcagcacagagaatga

SEQ ID NO: 12493 - DNA, 2709 bp, Oryza sativa
  Clone ID: TFbOSC401141j.C1.o34.fg
atggcaaggcttgttacagttgcagctgctaaggtgaagggctcagcttccagatttcgatacgtttgtagtactcctagaacactggatcagccatggattatagctggtggaaaggtaattgctacaaaaataagaaatgcaactcagcttctgagttgtaaacttggagaattggttccagaagcatggagggaatgcccaaactgcaaatgtcacattgataatagcgatgttactttacagtggccagaattccctgacggtgttaaatttgatccatctgatcttgaagtacttgaacatttagaaagaaaaattaacctgggaaatccagggcctcagggtcttattgatcacttcatcccaactctagaaaagatttaccataacggtgtcttaaaaggatggaagaaaatactggttctttacaaaggctccaaaaagaacaagatagtacaagctaattgggttatgcatcaatataatcttggtgtggaagaaggcggggaggacggagagcttgttgtttccaaggtattctaccaattatcctccaagcaaactggcacgcctgaaatggactctgttactgaagaagcatctgatgcactgaccataagaagtgatcccattacacccataacgaaccctccgctgcctcgctgcctgatgaacagcccgtgtgacacggagcagaatggcaccatttcacatgatcaggagggggaatgcagcacatccactctccggcccatggtagaagctggaaaccgtgcagggtgttctgctggagcgtcaacagccggggacttcaacgaagatctgctgcagcgctgcgagtttccggaggaccccgtcccaactcttgatgacacgctgccttttctttacacggacgaaacggaccttttcagctgggaagattttcaattcgggtcgcaggaaagcttcggctgggtggatggggatcacactcttgttcagtttctgtacctctgcatgtgggaccgccttttggtagacgatctgctgagagaaaaatcaataccattgcccaactctgtagaaaactcacgaaaaaccctcctccgaagtccccaattccacatggcgccgcccacctccgccgccgccgccgtcgcggcggccgcccgcgcctcgccgacgtcggcggcggcgctcgcgctcttcaagtcggtgctgtccgcggacaaggcgctctcgccgctcgccgtgctcccgcacctcgacggcgcgccgtcctcgctgcccaacctcctgctcaccgcctccgccgccgtgcgcccccacgccacctccctccgcctctactcgcggatgaagtccctatccctccccatctcgaccgcctcgctccacccgctcctctccgccctcccctccgccccggccttcgccctcttcgccgacatgttccgcctccgcctcccgctctgcaccaccaccttcaacatcatgctccgccacctctgctccgccgggaagcccgcccgcgcgctcgagctcctccgccagatgccccgcccgaacgccgtcacctacaacaccgtcatcgccgggttctgctcccggggccgcgtccaggcggcgctggatattatgcgggagatgcgagaacgcggaggaatcgcgcccaaccagtacacctacggcacggtgatctctggctggtgtaaggttggccgggtcgatgaggcagtgaaggtgttcgacgaaatgctgaccaagggagaggttaaaccggaagctgtgatgtacaacgccttgattggtggatactgtgaccagggtaagctggatactgcgctcctttaccgtgatagaatggtggagagaggggtcgcaatgacagtcgcgacctacaatttactcgtgcacgccttgttcatggatgggcgtggaacagaggcatatgagttggtcgaggagatgggtggaaagggtcttgcgccggatgtgttcacgtacaatatattgataaacgggcattgcaaagagggcaacgtgaagaaagcactagagatttttgagaatatgtccaggagaggggtccgtgcgacagtagtgacctatacggcattgatatatgccttgtctaagaaggggcaagttcaggagacagataagctgtttgatgaggctgtaaggagaggcattaggcctgaccttgtcttgtacaatgctctgatcaatagtcactccacttctggcaacatcgatcgagctttcgagataatgggtgagatggagaagaaaaggatcgcaccagatgatgtgacctacaatacgctaatgagggggctgtgtctactgggacgtgttgatgaagcgcgcaagctcattgatgagatgacagagaggggaatccagccagaccttgtcacttataacacgctgatcagtggctacagcatgaagggtgatgtcaaggatgctctgaggattcggaatgagatgatgaataaggggttcaatccaacgcttttgacatataatgcgctgatacaggggctctgtaagaatggccagggagatgacgctgagaacatggtgaaggagatggtggagaatggcatcacccctgatgacagcacatacatctcactgattgagggtcttaccactgaagacgagcgtgccattgatgatgagcgactggctgcagcagatgctgcgaaagtatga

SEQ ID NO: 12494 - DNA, 324 bp, Oryza sativa
  Clone ID: TFbOSC401019j.C1.o11.gm
atggaaaatggcggcaacgacggtgatgggtcggcggtgctagtggtgagctggaagcatgagctggtgtcacggctacagttaagtcctagcttccactttgtgccgacggacaaggagctcgtggacttccacctccgcggtaagatcaagagacgcaaaccgcctctctacctcatcaatgagaaatacaagggctatggggaaggtatgtggtactttttcatggtgagggggccatcgaagacgaagaagaaggatttgcctcagctgcacatgaagctcgactacctctgttgccccaagcattcacctgccttttga

SEQ ID NO: 12495 - DNA, 1395 bp, Oryza sativa
  Clone ID: TFbOSC400621j.C1.o9.fg
atggccaatccttcgccgatgggatgtgccgtgggagtggcagacggtggtgctcaccatggtgggctgtggaatattaaagaaccattcaagcttcaaaatggctggcttctgtgggctggagttggtctctttggcgctataatttctattgctttagttggggttgctatgacttatctgaatggtgaacctccagaaagagagactgactcgttagttcttttattgccattaatcggctcatcaagtgccagcactgcttttctggtgggcattactggagttctagcaccaattctggaggagactgtgtttcgaggatttttaatggtgtccttgactaagtggtttcctactccagtttgcatacttgtcagtgctgctctatttgcctttgctcatctgacacctggacaattcccacagttgtttatacttggtgttgcgttgggtttttcatatgctcaaacccataatcttctaactcctatcacaatacatgcattttggaactcgggagtaatattactgttaacctttcttcagaggcccatctactcttccgagggaaccaaatgcataagcctgaagaagtctcttgtcttttacaaagggagagcagcaaaagggttcaagactgattggatgatgcatgagttcagacttccttcactcacggagccttcactttctaaaataccaatagataaaaaaccagccaaagatatctgggctatttgtaagatatttaaaaagcctaactctatggcacaaagagcgttatctcacccctggggtcctcaatcaactgcaacaacaagctcgcaatttgcttcagagagttcctcttgctcagaagaagttgcaataccgataactcagttgaacagtcagcagtgcctgcaggggaggcagcagaagcccaacaatagacaagatggctcttctagtaaagtcataaacttcaagtgcagtccatctttaactcatcaatcagacaaagacaaccataattgtccagtcaccttaccattcaaaacacaaaccctgcagcatatgtcaggtgccacatcgctgcttctcagcataacccctggaataatcaatagcatatatgaagcctcgccaaacatacggtttggacagactgaaccatgcaatggatatgaagttgattgggttataggcacaaatggaggcattgaaaatagtgatgaggatccatatacaagaactggtactgaatacagtacaggcagtgaatgtggaatccggcagaaaataaagtttccatttgatttattgggtgatccttcagataactggacaagcaatatcaatatgccatgtgaattccccttaactcccaactcctacagtcatgtgcaatag

SEQ ID NO: 12496 - DNA, 431 bp, Oryza sativa
  Clone ID: TFbOSC5422j.C1.o2.gm
atggcgacggcggcggagtcgcaggggctctccccggggttcaagttcaatccgtccgtcgagcagcttctctgcttcttcctcctgccctacttgcagcaccgacgcctcctcgtcgacggcgtcgtcttcctcgacgacccggcgagcgcgccgccgtgggcgctgctccaccgccacggccggggcggcgaggacgaggcctacttcatcgggccggtgcccgcaggtgacggccatggtggccggcggcagcagcaggtgagccgcaccgtcaccggcggcggcggcggcaagtggataaagcagaggacggagcggccgagaggggaggaggagccggtggtggtgttcggcggcgagacgttccggtgggaggagttcagcctcaacttccacgccgacgagcggtgccggagcggcagcaccgg

SEQ ID NO: 12497 - DNA, 936 bp, Oryza sativa
  Clone ID: TFbOSC401612j.C1.o17.gm
atggggatcgggtgcgggcgccgcggctgtgggcgcgcgtgtgtgggttcgcaaggggaggatggtgatgagttgagcagtgatgccattgttggtgatgtggtgatgtatcgagtcgagcgtgtcgacggggaaaagaaggtgcccacgcccgcgcccgtcggccctaaccctaaccccaacccaagcccacccgccggccccattcgcctcgcactcgccctcgcctcacgccgcccgatcccccagcgcgcacgcgcgcgcgccgagacgacggccgcggcggcgacggcgacggggatggcgccgctcgcagatcccgccgccgagggcttccgcatccccttcctccccagcgacagcgacctcctcgactgcctcctccgccccaagatcgcctccggccgcgtcgacccccgcttcgcgccgctcgtgcacgacgtcgccgacgcgttcgccctccccccggcccagctggcggccgcgcacgcgcccgcgcccggcgccggcggcgccgaggcgtggtacttattcagcgtgcgcccccgcgcccgcgcccgcgcccgcgccggatccaagagggcggcgtcgcgcgcggtcggcggcggcggcggcaagcggtggtgctcgatgggcgccaagaaggcggtggagggaggcgggtactgccagaggttcaggtacaaggagaggacggcggcgggcgtcgtggcgccccgatggatgatggtggagtacggcgtcgcccaggaacacgacggcgagggcgtcgcccaggaacacggcggcgagggcgtcgccgagctcgtgctctgcaagatcttccgctcccccgagccttcccgtcgctcggagtcggggtcgccgtcctccagctcgtcggcctccgcctccccgtcctgctccggcggccgcaagaggaaggccgccgaatag

SEQ ID NO: 12498 - DNA, 1284 bp, Oryza sativa
  Clone ID: TFbOSC403595j.C1.o7.fg
atggcaacattgccgcaaatggccgcgaccaaggagcgtcaagaggcggctaacccgaccacgacgaccaggacgctggtcgagtccgtcaccaactggatccgcgtctactccgacggctccgtcgaccgcctcggcccgccggaagccgccgcgttcatggtcctcgtcccgccgtacgacgacccacgcgacggggtcaccgtccacgacgtcgccacggaccatggcgtcgacgtccgcctgtacctgacgacgacggcgccggccaggcgccgccctgttctcgttcatttccacggcggcggcttctgcttgtcccacgccgcgtggtcgctctgccaccgcttctacgcccgcctcaccgtggacctcgacgtcgcgggcatcgtctccgtcgtcctcccgctcgcgccggagcaccgcctacccgccgccatcgacgccggacacgccgcgctgctctggctccgtgacgtcgcgtccgggggcagcgacaccatcgcacatcctgcggtcgaacgcctttgcggcgccgccgacttctcacgcgtgttcctcatcggcgacagcgcgggcggcgtcctcgtgcacaacgtggcggcacgcgccggcgaggctggggccgaggcgctcgacccgatacgcctcgccggtggtgtccagctccacccgggcttcatcttgccggagaagagcccgtcggagctggagaacccgcccaccccgttcatgacgcaggagacggtggacaagttcgtcgtgctcgcgttgccgccgacgaaagacaccgagaagttcatctgccgcgccgatgtttacggcagcgagcccagtgacctcgccggaaagttcgcgccggtgcccaggtgcgagaaaggtggcaggctcttcttcactagctgcaagcggcacaaggggagtagcaccaggaaagagcgaaccgcgggggatggcacctgggtgaggcagaacagcaagggggtgaagaacaaggcaggggtcaaggtcggcgagacgcagaacttccgtttcaagaaggacgggagctacaccgactggctgatggaggagcaccactgctgccggcagcaagccgtcgccggcgacgaggagcccgtcatctgccggatgtatgtgtcgccgagggcgcctccggattccgcggcgcgccaggaatccgctgcttttgtgcagcagcagccggcgccgcaggtttccgagccgccgtgcgacaagaagaagagagatgatgtggcagaagaagcccctgccgcagcttag

SEQ ID NO: 12499 - DNA, 798 bp, Oryza sativa
  Clone ID: TFbOSC401567j.C1.o17.fg
atggcgatctgcgctgctgcagctgaccactcccgcgcatccccaagctccgcggcaacgcaaccaacaaccatctgctggagacccagcaaggtcaaggaggaagtagaagaagacggaatggttgtcgatcccccggacgacgccagcgaggcgtccgataatctgcgcgcgacaggtttccaggacacgccgacggtgggcgagctcgtcctgcgccacctccgcccgcgtctccgcggcttccactgcgccgacggcgacgtccccgtcatcggcgtcagggacgaccccgccgccgcggcgccgctggacctcgtcgcgcggcacgggggcgccgccgacaggcgccgcggcgaggcgttctacttcgtgcggcggaggcgctgccgccggccgaacgtgcggcggaccgtcgccgagggaggcggaggcggtggcggtgcgggcgggctgtggaagaagagctggaccgggtccggcaagtcggtgaccgacctcggcgtcgtcgtgccgtggagcaagacgtgctactgcttctaccggcgcgacgagggcggccggctgagcaccttcgggggagggtgggtcttggcggagtacgagatcacggaacccggtacgtaccggcgcgccgacgaggaggaagacgacgacgactactgggtactttgccacgtcaggaagacggcaagcaagaagaggaagcggaatcgctgcgatgaggccgtggctgcacgggctgtagccggtacggagtctaagtcgtatctcctatgtgggctgacagcgaattga

SEQ ID NO: 12500 - DNA, 1035 bp, Oryza sativa
  Clone ID: TFbOSC400792j.C1.o9.fg
atggcgagggccgtggcgtccggcagcagcggcggcggaggcggccagccgttcgaccccacggcggaggatatcgtcaaccggtacctgccgttgcgccgggcgctgcggtgcgacgcgctgccgaggcaggtgcacgacgcggatgtgtacggcgcgcacccggcgctgctcgcgtcggtgtacccggcggcgaacgagcggttcgagtggttcttcttcgtgtgccgccgtcagtgccccggtggccggcgcagggccgggcccggggactaccgcctctcgcaggaggcgaagcaccgcggcaacgcgttctgccacagcttccggtactacgagtacgaggacgccggcggcggcttcagggagaccgagtggcgcatggtggagtacggcgatcgcggccgcgacgccggcgccggaggctccgagggcttcgagctggtcgtctgcaaggtctacccggcgcgcggcggggcgctccacgagcggctcggggccgaccgggcggtgctcgcgacgcgccaccgcgccgacgaggacgccaagccgcaggtgctcgtccagctctacctcgccagcctccgcctcgggaacccgctcgcgtgccgcgtgcaccgcgccgacgacgtcttcgacgcgcacccggcggtgatcacggccgcgctccctgctgccaacgaccggtgcgagtggttcttcgccgccgtgcgcccgcgcgggcacgcgcaagggcacggggacggcgcgccgccgcgcccgcggaaggccgggccaggggcgtacgtgccggtgcgcgagtgccgcgtcgtggacgggaggcgcggggacatgggctgccgcctcgtgttctggtacagggaggacgacgaggaggcgaggcgggcgtcgcggaggacggagtggtggatggacgagtacaggttcggcccggacttcccgtacggcgagctgcccgcgcccatggcgcgcggcgaagacgaagagctggtggtgtacaaggtgtatcctaggctggtcggtaaccggcgataa

SEQ ID NO: 12501 - DNA, 1125 bp, Oryza sativa
  Clone ID: TFbOSC400978j.C1.o35.fg
atggcggcggctggcgcggatgggctccctccggggctcagattcgaccccagcgacgacgagctcgtcggccggtacctgctccggcgcctccagggccagcccctcccgctcgacggcgtcgtcctcgatgccgatcccctgagcgcgcagccatggaggcttctcgcggatcacggccggggcggcgacgaagccttcttcctcgcggaggcgcacgccaagaacgccaagggcaagcgccagaagcgcaccgtcgagggtggagggttctggcaggggcagaggatgtgcgtcgacggcaagaagctgctcgtccccggcggcgacgacggcggcggcggcggcgaagtactggagatcgcgtggcgcaagtatgtcctgagcttctttgccgagggggagagggggagctcggggtgggtgatgcacgagtactccgtgacggcgccggctgacctcgcctcgtcgccgctccggctctaccgcatccgattcagcggctacggcaagaagcggaagagagagccggaagacgacggtcgagcacatggcgcgccccggcgggctgaggcggagactgctctgttcgatctggaggtcgggccaccgccaccgccactgctcgttcctcctcccgcggcggcggcggcggatcatggcaccgatcagagctcctccggtgtgaccgacatggtgttccgtgatcttcccgacctgatcgctgatgctggagctgctctgcccgatcagaaccaacaggattggtctgaagtcgccgatcagagctccttctgtgtgatgggcgatgactcttctctgctgctccctgatcttcctgggatgattgatgacaatgagcaccagcagtttgtgcgcgagtgcgacatgccacacctgttcgtcccgcaagcagaggaagccattgctggtggtggtgcagcatcggcgccatcggcggacaaccagaactgcgagttcaatgacggcgaggacatggcattgtcagattttgagtttccggagagtattgatgaggtgcttagctacatcgacttcagcacgagcgacacgagctgccgcgacttcaccatggacgagctgttcgatctgccggtggactag

SEQ ID NO: 12502 - DNA, 1554 bp, Oryza sativa
  Clone ID: TFbOSC401327j.C1.o19.fg
atggagtctttacgtgacatggtcctcccaccaggatttggattccacccaaaagatactgagctcatttctcactatctgaaaaagaaaatacatggccaaaagattgaatatgagatcattccagaggtggatatatacaagcatgaaccatgggatttacctgcaaagtgcgatgttccaactcaggataataagtggcatttcttcgctgctcgtgacagaaagtatcctaacggttctcggtcaaatagggcaacagttgctgggtattggaaatccactggaaaggatcgagccataaaaatgggcaagcaaactataggaacgaagaaaactttagtttttcatgaaggccgcccacccactgggagacgtactgagtggatcatgcatgagtactatatagatgagcgtgaatgtcaagcctgccctgatatgaaggatgcatatgtactttgtcgtattaccaaaagaaatgactggatcccagggaatggcaatgagttggacaacagtgatcctcatccagaaccatatgatgctcctccatcagttatcagtactgaacagctaaatcctgctgctgaaccagttgtcggtgttgaagctgcaccagttaccgttgctgaacctgacggtgttactacgtcagctatcactgctaatataccatctcctagtgatgacattaatctggatgattggttgaatgaactatttgatcctttctttgaccctgaacagagtctggcttctgctgatctgtctccagatgaacaaaatgttgaatcatcggtgagtttcttcacagtcactgtgtttgcagttcttagcctgtgcatacttgctcatcgcgctatcttccttcttaatttacagaacgtaggtgctttggctccaaaggtggaacaagactattctagtcctaacgagaacgtagtagatgatacggagtacttgttgcctgaagatgtttacaacatactgcaccctggtacagatgacttcaatatgctccagaatcctttggatcagtaccccattcaatatgcaaccgatgtttggagtggaattcagaaggaagaactgtggtcgccccaggccaatgctgagcctagtcagtcgaatgaagctgctgataatggaattataagacgttatcgtagtatgaaaacacctgaaactagtgtgccgcagttcaagggtaaaactcaggctaaaatgcgggttgggatcaacaagatggctacgagtagttctgaatctatcaaccagactatcaagtttgagaacagtggtcgtcttgttgagcaccagaagaaccaagcgcatgatgtagcttctaccaagcggtcagacgcagggaagccaagtacagagctcagcagcaatcgaggatttctcaggggtatccgaaatgcatttgcaggctgttcggatgctcgatggaacatgatacttgttgcgggtttcgctattggagtcgctgtggtagcgcttcatataggccaacgccttggattaagccagagagatcagcagcatacctag

SEQ ID NO: 12503 - DNA, 831 bp, Oryza sativa
  Clone ID: TFbOSC401434j.C1.o2.fg
atggcggcggcgaagcggcgagtgcgcgacgcggaggcggacctgaacctcccgccgggcttccgcttccaccccaccgacgaggagctggtggcgcactacctctgcccgcgcgccgcgggccgcgccgccccggtccccatcatcgccgagctcgacctctaccgccacgacccatgggacctcccccaccgcgccctcttcggccgccgcgagtggtacttcttcaccccgcgcgaccgcaagtaccccaacggctcccgccccaaccgcgccgccgcctcgggctactggaaggccaccggcgccgacaagcccgtgctgcacaacggcaggacggccgggatcaagaaggcgctcgtgttctaccacggcaagcccccccgcggcgtcaagacggagtggatcatgcacgagtaccgcctcgccaagaagggcggcgccgccgccgccgcgggcgcgggcgcgctcaggctggatgactgggtgctgtgccggctgtacaacaagaagaacgagtgggagaagatgcagagcaggaaggaggaggaggaggccatggcggcggcgcagtcgtggggggagacgcggacgccggagtcggaggtcgtcgacagcgacgcgttcccggagatggactactcgctgccggcggcgtcgttcgacgacgccctgctgcccaaggaggaggcgcgcgacgacgactggctcatggggatgagcctcgacgacctccagggcctcggctcgctgctgcaggccgacgacctctccatgctcgcgccgccgccggcggcgaagacggagccgctcggcgcgccattcttctga

SEQ ID NO: 12504 - DNA, 675 bp, Oryza sativa
  Clone ID: TFbOSC400708j.C1.o1.fg
atggagcggtgcagcgtgctggggctgggcggtggcgggggcgggggcgggcggctggacggcgagctgccgccggggttccggttccacccgacggacgaggagctgatcacctactacctgctgcggaaggtggtggacgggagcttcaacgggcgcgccatcgcggagatcgacctgaacaagtgcgagccgtgggagctgccggagaaggccaagatgggggagaaggagtggtacttctacagcctccgcgaccgcaagtaccccacgggactccgcaccaaccgcgccacgggcgccggctactggaaggccaccggcaaggaccgcgagatccgcagcgcccgcaccggcgccctcgtcggcatgaagaagaccctcgtcttctaccgcggccgcgcccccaagggccagaagacccagtgggtcatgcacgagtaccgcctcgacggcacctacgcctaccacttcctctcctcctccacccgggatgagtgggtgatagccaggatcttcaccaagcccggcgtgttccccgtcgtccgcaagggccgcctcggcataagtggcggcggcggcgacacctcgtgcttctcggactccacctccgcctccgtcggcggcgggggcggcacctccgcctcgtcggcgctgcgcgcgccgctggactga

SEQ ID NO: 12505 - DNA, 1122 bp, Oryza sativa
  Clone ID: TFbOSC401682j.C1.o1.fg
atggagcggtgcagcgtgctggggctgggcggtggcgggggcgggggcgggcggctggacggcgagctgccgccggggttccggttccacccgacggacgaggagctgatcacctactacctgctgcggaaggtggtggacgggagcttcaacgggcgcgccatcgcggagatcgacctgaacaagtgcgagccgtgggagctgccggagaaggccaagatgggggagaaggagtggtacttctacagcctccgcgaccgcaagtaccccacgggactccgcaccaaccgcgccacgggcgccggctactggaaggccaccggcaaggaccgcgagatccgcagcgcccgcaccggcgccctcgtcggcatgaagaagaccctcgtcttctaccgcggccgcgcccccaagggccagaagacccagtgggtcatgcacgagtaccgcctcgacggcacctacgcctaccacttgctctcctcctccacccgggatgagtgggtgatagccaggatcttcaccaagcccggcgtgttccccgtcgtccgcaagggccgcctcggcataagtggcggcggcggcgacacctcgtgcttctcggactccacctccgcctccgtcggcggcgggggcggcacctccgcctcgtcggcgctgcgcgcgccgctggctgaggcctcgctgttcgccgccgccgcggcgccagccgttgacggcgccgacagcagcaactacggcgggggcggcggcgccggcagcgccaccgccaccgccaacttggtcaccggccttgagctcgtgccctgcttctccaccacagcccacatggatgcctcgttcggcaccgggcagtacaacccggccccgctggccgtcgagccgccgccgccgccgccggccttcttcccgagcctccgctcgctgcaggagaacctgcagctgccgctgttcctctccggcggcatgcaggcgggcgtgtcgtcgcagccgctcagcggcggcggggccttccactggcagtccggcatggacgtcaaggtcgagggcgccgtcggccgcgcgccgccgcagatggccgttggccccggccagctcgacggcgcctttgcatggggcttctag

SEQ ID NO: 12506 - DNA, 1077 bp, Oryza sativa
  Clone ID: TFbOSC100569j.C1.o6.fg
atgtggtcttggcttataactggtaggggagttgctaagaaaataagaaatgcacctcattgctctagtcgcccaataagtgaattgggtgcagaagcacagatggaatgtccaaactgcaaacatgttattgataacagtgatttgcaaaaaggtaggttattgctgatgagaaaggaggttgctatacagtggcctgggctgcctgctggtgtcaagtttgatccatctgatttggaattgcttgaacatttggaacaaaagattggcctggggggttcaaagccacatacattcattgatgaatttattccgactatagataatgatgaagggatatgctattcacatccggaaaatcttcctgggaaatccaaagccatagttgaaaagggggttacaaaaggttggaagaaaataatggttctgtacaagagttcacaaagaggtgccaaacctgataaggctaactgggtgatgcatcagtaccatcttggggcagaagaagatgaaaaggatggggagcttgttgtctccaaaatctcctaccagttgcatggaaaacagatagacaagtctgaaacaggaaatgctgatgaagaatctgatgcatttgctgcaagggttggtccaaaaactccaaagtcaaacaccccacagccatgtcgcttaaaaaacagtccatgtgaaacagaaaattacgatcccatcttggaggaccaggacgaagaggagtctaacatacctattgttagcctgaaggatgatgctgggaatcctgcgtggtgcgctggagaaacccaggccgcgagggaagcagttcaggcctgtcctaacttggatgaatccctgcgctgtcatgaagttctggattccttctatcatgaaacgttgcttccttctgaccgcccaattctgtcccaaggcgggaatgagattcttgacaggaacctgaatgcggtgtatggactacctgatctctacaatgtagaccttggaacacctccagattttcagcttgctgatttgcagtttggatcacaggagagcattggcaactggctggatagcatctag

SEQ ID NO: 12507 - DNA, 1599 bp, Oryza sativa
  Clone ID: TFbOSC401435j.C1.o7.fg
atggcagaactaccaccggaaggccgcggcggcggtggcaacaacaatgggaagtggaaggggaaggaaaaggtggtgcccgagtacggcaagaaccggcacggcatgtccgtcggctggtacttcgtccccaaggatctggagctctttgccatcctcaagtgcaagctcgtccgcggccagctccccggcgccctcaacaacgtcttcgagcatatcaggatcctcgaattccaccccgccctcctgcatgagatgtacatcaagaacgaggaggatgggtacatctacttcttcagcaagaggcagttcacgacgaaggcagggaacaagaggcggccgacgcgggtgacaaagggcgggacgtggaaggcgtctggcgggagcaagacagtgaggagcaagaaggtcggcggcatcgacgttggccagaagctcaccatggtgttctacgagcgcaggtttgagggtgaccggaaccccatcaagaccaattggggcatgcatgagttcaccaagatcattgatggcaccaaaaaccagcttgaggaccttgccgtgtaccgcctgtacaagatcaaaaggaaggaggacgaagaaccgtcgaacactgccgccgcggcgtcgagcaccgacgagccctccacgtcgtcggcattgccacctcctacgccaccgcggccattgccggacatggccggaccgtcgtcagcaacgccgctactgccactgcaattgccgggcctggccgggtcgtcgtctgcgatgtcgctgcctgcactgcagctgccgggcatggccgggtcgtcgtcggcgatgccgctaccgccactatcgttgccgggcctggctggagggatgatgtccatggcggaccaggcgaacatggcctcgacgtcgcaggcgtccacaccgtcgtcggagctcctgcaagactggtacgacgagttcgagatcacgtacggcgccgtggctccgccgtctcctagcacgatcagctgggtggcgccgcagagctcgccgacggggtggtggccgtcgccgaacggcgggccggtgcagcacgacggctacctcgggatggcagcggatccaacgtcgtacatgctggaaaacctgttgcccaccgcggcgatcccgccggagccgatgatgccgccgacgagctcgccggcgccaccaccagccgtcgaccaccaccaccggctctcgcctccgcatgacgccgccggcagcaactacaaccacccggagctcgccgactacaacggcggcgtccaggcgcagcacgagcatcagtatcacccacaggagccgcaggcatcgctggtggatgccgaggacggctacagcgccatggccggtggcgacgacgcgcagctgggcggcgcggagcttgacaccgaacgaatcgccgaaatggtaaaccatataatggatggcgaattcgagttcaaattcgaggacaacaccgtccttaagtacaacgaagtctttcctgacaatgatgaggtggtggcggcgccgatgatgatcgacggtggtagggatggcgatggcgcagatggaggtgatggagacgacccattcgacaattag

SEQ ID NO: 12508 - DNA, 1347 bp, Oryza sativa
  Clone ID: TFbOSC900188j.C1.o4.fg
atgacgccgcgcgcctccaacctcaccggcgtggagatctactcgccggtggagatgaagtggaaggagaggagcggcacggcgaagacggcgaagatggcgaagcggcgcggcggttgggaaaacgacgcgacgaggatggcggcgggcgagcaggagcggcaggcctcgcaggtgcttgggtcgatccaagcaagaatgagcagcgacggcgcctctggaagcattggaatgaagcacgacgacggcgatcaccggccgagcaccggagcgtcgtcgcggcggtgccccagctgcggccacgaccctgactgcaacaagccgttcgacatggttgggatgcctgccggcgtcaggttcgatccgacggaccaggagctgattgagcacctggaggccaaggtgaaggatggcggctcaacatcgcaccctctcatcgatgagttcatacacaccattcaaggagaagatggcatctgctacacacatcctgagaacctgcccggtgtgacaagggatggcctgagcaagcacttcttccaccggtcagccaaggcctaccccactggcacaaggaagcggaggaaggtcctggctgatcagcagcctgacgaccatccacaggccagcaagggcagaaatgtcgcggcggcggagacacggtggcacaagaccggcaagacgcgggagatcacggtgcgcggccagcccaagggctgcaagaagatcctggtgctctacaccagcttcggcaagaagcgcaaggcggagaagaccagctgggtgatgcaccagtaccacctcggcgagctggacgacgagaaggaaggggagctcatcctctccaaggtcttctaccagacgcagacgcggagcgccgccgcagcagaggcaccggtaagctcgggtgctgccatggaggtgcagggacagcagcagcaagtgctgaagctgcaggctgatgatggtcacttcagctcagctcctaccaagaagagactgcatcaggatgttgtagcacaagtaaaagttgatcggggtcaccactgcatgccagcacaacgccaagtcaacttcaatttgaaagtaactcctgtgcccaccaccagttcattccctgtcgttgtcgacaaacagttgtattctcctgtggcgctattccgaagtgaacatcttcatgtagttcaacattacgacacttccattttacaaattaaaccttttgacttgtttacattctacagggaagaacttcaattcatcagccccaaaaagcagattggcctcaccagcgctggcctcctgacaaccaagatcaacatggataacttcctggattcacagtag

SEQ ID NO: 12509 - DNA, 1671 bp, Oryza sativa
  Clone ID: TFbOSC900220j.C1.o29.gm
atggcgaagcggcgcggcggttgggaaaacgacgcgacgaggatggcggcgggcgagcaggagcggcaggcctcgcaggtgcttggtgagggtgctcgtcggcatcccggtcttgatccagatctccgtctgcgaggcagcgaggacgttgtccaggaggactgtcgtcggcggcggcggcaccgccgcgacgctaggtctagcgggctgcctcgcctcgccgccaccgccaagccgacgagctcgccgcctccccgcgcctccgccggctgcgcgtgtggctccagctccgccgccgcggtcgcccgccgctcctcctcatcggcgagcacggagaggaggctgacgccgccgccttgctcctcgttggcgagcacggagaggaggctgacgccgccaccttgctccccccgccgcccgccgccgccgccttgctcctcctcgtcggcgagcacgaagaggaggctgacgccgccgccgccttcctccccacccgtcagccggcgccgccgtcctgcccgttgccccagagagaagaagagagagagagagaagaggaaaggagagaagaggggaaagaaagaggaggctgacctggacaggctgacatggtcgatccaagcaagaatgagcagcgacggcgcctctggaagcattggaatgaagcacgacgacggcgatcaccggccgagcaccggagcgtcgtcgcggcggtgccccagctgcggccacgaccctgactgcaacaagccgttcgacatggttgggatgcctgccggcgtcaggttcgatccgacggaccaggagctgattgagcacctggaggccaaggtgaaggatggcggctcaacatcgcaccctctcatcgatgagttcatacacaccattcaaggagaagatggcatctgctacacacatcctgagaacctgcccggtgtgacaagggatggcctgagcaagcacttcttccaccggtcagccaaggcctaccccactggcacaaggaagcggaggaaggtcctggctgatcagcagcctgacgaccatccacaggccagcaagggcagaaatgtcgcggcggcggagacacggtggcacaagaccggcaagacgcgggagatcacggtgcgcggccagcccaagggctgcaagaagatcctggtgctctacaccagcttcggcaagaagcgcaaggcggagaagaccagctgggtgatgcaccagtaccacctcggcgagctggacgacgagaaggaaggggagctcatcctctccaaggtcttctaccagacgcagacgcggagcgccgccgcagcagaggcaccggtaagctcgggtgctgccatggaggtgcagggacagcagcagcaagtgctgaagctgcaggctgatgatggtcacttcagctcagctcctaccaagaagagactgcatcaggatgttgtagcacaagtaaaagttgatcggggtcaccactgcatgccagcacaacgccaagtcaacttcaatttgaaagtaactcctgtgcccaccaccagttcattccctgtcgttgtcgacaaacagttggaagaacttcaattcatcagccccaaaaagcagattggcctcaccagcgctggcctcctgacaaccaagatcaacatggataacttcctggattcacagtag

SEQ ID NO: 12510 - DNA, 882 bp, Oryza sativa
  Clone ID: TFbOSC401940j.C1.o3.fg
atggatcggcatgaggaggaggcaggagagtctccatgtgtgccgccggggttcaggtttcacccgacggaggaggagctggtgggctactacctcgccaggaaggtggcctcccagaagatcgatctcgacatcatccaggagctcgatctctacaggatcgagccatgggatctgcaagagcgttgcaagtacggtgggcatggcggcgatgagcagacggagtggtacttcttcagctacaaggaccgcaagtaccccagcgggacgaggaccaaccgcgccacggcggcgggcttctggaaggccaccggccgcgacaagccggtgctctcgtcgccgtcgacgagggtgatcgggatgaggaagacgctggaggaaggttgggtggtttgccgcgcgtttcagaagccgatgcccaaccagcagcagcacaggctgtcctacggctgcatccccggcagctacggcgccggagcctacgccgccgtccccgacaactacagcttgctgctgcaccacgacaaccctagcttcgccgggcggccattgatgagcgccgctgcctcagctctcttcgccaacaacaacaataacagcgtcgtcgaccacagcaacattctgagttcagagtccaagcttcacttctccgacatgatgccgcctctggagagccccaccatcgtcgacggcgagggctacgtctcgcaggctagcagctgcgtcgacgtcgatcagcaagccggcatcgtcgactggaacctgctcaccagcttgctgccgccgccggcgcatcagctcttccaccacctgccttccgcttctagctccaagaacagcaacaacatttcttcgtcaggcttcatcgatgaccgagactga

SEQ ID NO: 12511 - DNA, 1056 bp, Oryza sativa
  Clone ID: TFbOSC400651j.C1.o3.fg
atggtggagcctgtgaaatcggagcttggcagcctgttcttacctccaggcttcaggtttcatccgacggacgctgaagttatcttgaactatctccttgagaagttcatcaaccctagcttcacctccttgcccatccacgaggtcgacctcaacaagtgcgagccatgggatctcccaacggcgaggatggggaacaatgaatggtacttcagccgcaaggacatgaaatacccgacggggatgcgaaccaaccgagccaccaaagagggatattggaaggccaccggcaaggacagggagatcttcaagcctgccatttacgaaggaagcagcaagaacaataagcagcttgtcgggatgaagaagacgctggtgttctacatggggagggctccaaagggcaccaggaccaactgggtgatgcacgagttccgtccccacgccaacctccacaaccactacccaaaccttcgtctcaatcccaacgaatgggttgtgtgcaaggtgttccacaagaagcagggagacgaagccatcaacaaccagcagcagcagcctgccgttgatcaagccgacgacgacgacatctttcagctagatgacatcttcgccgaccccagcatctacgacttcagcaactcatctgccaacatcttgtcggcgccgcccaacaacaatgcggttcattcctccgtttctgcaggtacgacgatgactagtacgactaccgccagtagcttccagcatcagccaaactgctatagtgcgcctctgcagcagcacgtctcctcttggaataatacgcctggagctggaggagcccatggaattggaagcagctactacaacttgcagcagcagcagcagcaggcagcaatggtgaaagacctagaagatatcattgctgtcccggattatggtacgctactgccgagcagcaacaagggttcatcaataaggtcggcgacggctggagtttcgcagcagaatccccttggcgtgccgcagtacaagatagagaattatggggatcattacatatcacgagagtaa

SEQ ID NO: 12512 - DNA, 152 bp, Oryza sativa
  Clone ID: TFbOSC100708j.C1.o4.hg
atgcatcctaatggcgcgccgctggccgtgccaccgggtttccggttccatccgacggacgaggaattgctctactactacctgaggaagaaggttgcttatgaggccatagatctcgacgtcatcagggagattgacctcaacaagcttga

SEQ ID NO: 12513 - DNA, 996 bp, Oryza sativa
  Clone ID: TFbOSC400302j.C1.o15.fg
atggggagggaaggagaggagttagaaaggaggaagaggaagggattatgggggagggaaggagaggagttagaggagaggaggaggaggaagatgaagagatgggatgaagagataagtgatgatagtatgatgatgggtggtgaggtgagggcgatcgagtcgaggctgcctccgggtttcaggttccatcccagcgacgaggagctagtcggctactaccttcggaacaagcagcagcagcagcagcagcagacggcggccacctccatgctcgtcgaggttgacctccatgcctgcgagccatgggacctaccagaggtggcgaaggttggttcggatgagtggtatttcttcagctggagggagaggaagtacgcgacggggtggcgcaggaacagagcgagcaagcaagggtactggaaggccaccgggaaagacaagcccatccttcatccgacggtggccggcgccaggaagacgttggttttctactccggtcgcgcccccaacggccgcaagaccgcctgggtcatgcacgagttccgcctcctccatcatcatcatcatccaaacccaaatattcagaatatgcagcagcaggagggggatgactgggtgctgtgcagggtgttccgtaaggggaacaacagcaatggacaacctctagccacttcttcgccacctgctcatcacctggtggagtcactcatcagctcacctgcaccaactatcatgagcgatcacgatcggctcttcaccatccagctgccgcatcaccaacattgtgatgagcagtactttttcttagatgacgatgaacagcaccagcagcagctgctagatctttcagtgctccaagctccaacctcgttcgagtctgagcaagctccaggccacggtggcatggagattaatatcgcagagatggagagcttcgacacgacctgtgctgcgctgcaagacgcgagcgattactgcatgcagctctattaa

SEQ ID NO: 12514 - DNA, 879 bp, Oryza sativa
  Clone ID: TFbOSC400311j.C1.o13.fg
atggagcagcagcggagcaggtcgacggcggcaggaggagaggtggaggtggagcagctgccgggattcaggttccatccgacggaggaggagctgctggagttctacctgaagcaggtggtgcaggggaagaagctcaagttcgacatcatccccaccgtccacctctaccgccacgacccgcgcgagctccccggactcgcccgcatcggcgagcgcgagtggtacttcttcgtcccccgcgaccgcaagcaggccaccggcggcggcggcggcggtaggcccagccgcaccacggagcgcggcttctggaaggccaccggctccgaccgcgccatccgctgcgccgccgaccccaagcgcctcatcggcctcaagaagacgctcgtctactacgagggccgcgcccctcgcggcaccaagaccgactgggtcatgaacgagtaccgcctccccgacgccgccgccattcccgacaccatgcaattgcaaatgcaacacgacgacatggtgctctgcaaggtctaccggaaggcggtctccctcaaggagctggagcagagggtcgccatggaggagcttgcacgctccaccacgtcctccggcacccacaacaccggctcgcccctgcagcaggactcctcctccatctccatctcctcctcctcggacgccatgaagaaagaggtggtgggggtggatgaggcgtcggcggcggcgcatgagctggtccgcccggcgacgctgagcctgccgcagctggaggtggcgaggccgcagagcgggctggagtggatgcaggagccattcctgacgcagctgcggagcccatggatggagacctggtcgccctactacgccagcgtcctcaacttctga

SEQ ID NO: 12515 - DNA, 1482 bp, Oryza sativa
  Clone ID: TFbOSC400785j.C1.o19.gm
atgagcatatcggtgaacgggcagtcggtggtgccaccggggttccggttccacccaacggaggaggagctcctgacatactacctgaagaagaaggtggcctcggagcgcatcgacctcgacgtcatccgcgacgtcgacctcaacaagctcgagccatgggacatccaagagaggtgcaggattgggtcagggccgcaaaacgactggtacttcttcagccacaaggacaagaagtacccgacggggacgaggacgaaccgggcaacggcggccggcttctggaaggccaccggccgcgacaaggccatctactccagctccaaccgcatcggcatgcgcaaaaccctcgtcttctacaagggccgtgccccccacggccagaaatcagactggatcatgcacgagtaccgcctcgacgacccctcctccgcctccgcctccgtctccgtcaacctcccctcctactactcttcctcctcatcgtcatcttccccaatgcacggtgtcgccggagaccaaggagctcaggaggaaggctgggtgatctgcagggtgttcaagaagaagaacctcgtgcaccacggcggcggcgccgccgcggcgagccaccacgcggcggccaagctcgcggcggcggccatggagggcagcccgagcaactgctcgacggtgaccgttagcgaccacgtcaaggcgcagatgctgcactcgtccgccagcgacgacgccctcgaccacatcctccagtacatgggccgctccggctgcaagcaggagaccaagccggcggcgatgtcggcgtcgtcggcggcagcggcggcggcgctggagcagcacctcagtacgcctcagtacggcaagttcatgaagcttccgccgctcgagcacgtcgccggcggcgtgggcctcctggcggcggccggcggcggcggcgagtactgctccgccgccgacgcgtcggggatcgccgactgggacacgctggaccggctcgcggcgtcgtacgagctcaacggcgccctctccgacgtcgcctccggcaagaacatggccggcttcttcgacgtcgtcgatcagcccgccggcgccgccgccttctcctccggcgacggcgacctgtggagccttgcgcgccttcatatacgggaggtggcaattaagataggcgtgcatggcgatggaggcgagcgacgtgtgcagggaaagggatgtgacgacccgagaggaaggttcgtcgcatgcggaaacgccgaaaagaggttgagagtgagacgacgcaagcggacgagccataaaaccgggtataacgccgcctccatccgccgtgacgaccgcggcgtgaggatgttgtacacaagttggaggtgcagccacgacgggagaaacaccttcacgggcacatcatcgtcgggcacctctgacgacggcggtgggagcttcacctcgggctccaacaataggggcggaagtcgagcttag

SEQ ID NO: 12516 - DNA, 951 bp, Oryza sativa
  Clone ID: TFbOSC408811j.C1.o12.fg
atggccgacgacgacgagatcgctcttgagccaggctacgtcttccacccttccgacgacggcctcatcaccctcttcctccgccccagcatcgccaagatccccttcgaggaccgcctcatcaaccacgccgacgtctactccgccaatccggccgagctcgtcggcgagcacagaccggcgccgggcacccatgggagcagcagcgtctggtacttcttctgctccccgcgcttcaccagcaagcgcaagacctccgggaggcggcagcgcgcggtcggcggcggcggcggcggcgagagcgtgtggaagtcggagggcggcaagaaggccgtgatcggcgccgatggccgccgcgtcgggtacctccagaagttctcctatggcgtctacgagtcgtcgtcgtcggggtcggcgcgcacgttcacgaggctagggtggtgcatgacggagtacggcctcgacgacgacgccatcgacggagcagacaagcaggtgctctgcaaggtctaccgctcgccgcgcgcggtctgcgcggaggcgcgcacggcggcggcggcgaagtcggccgattcgccatgctccggctcgaagaggaaggcggacgacggcgcggatcacccggaggcgccgcccagcgcgcggccgcggcaagaggaggccgggagcgagcagccggcgatcctgccggagttggacctggatgcgttgctgtcggcgccgatggacgacagtttgggagtggaattcgacacggccacgacggagcagtacatgaggtatctgatgaacgacgagccattgccgtgggctccgacgatggaggttgccggcggcggagacgaattcatcgagacgacgaacggaccttgcatgggcgaagaggagatcatccagcggctggcttccggagaaaccctcgacgacattcttggctcgaaccctaattaa

SEQ ID NO: 12517 - DNA, 771 bp, Oryza sativa
  Clone ID: TFbOSC400259j.C1.o78.fg
atggccgacggcggcggccgccgggctcccgggttccgcttctacccgacggaggaggagctgatatgcttctacctccgcaacaagctcgacggcctccgcgacgacatcgagcgcgtcatccccgtcttcgacgtctactccgtcgacccgttgcagctctcagagattcaccacgagatgctgggcggcggcggcgaggagggggagccgtggttctacttctgcccgcggcaggagcgggaggcgcggggcggccggccgagccggaccacgccgtccgggtactggaaggcggcgggcaccccgggggtcgtctactccgccgaccgccggcccatcgggatgaagaagaccatggtgttctaccgcggccgcgcgccgtcgggaaccaagaccgcgtggaagatgaacgagtacagagcattccactaccccgacgcctcctccgcctccgcctccagcgccggcgccgccgcgccaccaaaccatcttcctccgcagctgaggagcgagttcagcctgtgtcgactgtacaccagatcgggaggcatccggcaattcgatcggcggccgctagcgggtggtggtgatgagaacccggggccatccatggctgccgcggcggcgtcacccgaggaaaacgacggatcaggaagttccatgcagcaactggagctgatggatcaaggtggcgccgttgatccggattgggaccagtgggacgacttggccaccttgaccgcacttctgtactggcctagagattag

SEQ ID NO: 12518 - DNA, 615 bp, Oryza sativa
  Clone ID: TFbOSC418721j.C1.o3.fg
atggggaaggagatgaatctgatccgagaagacgagtacggcggcggcggcgtcgggttcgagccgacggaggacgagctgatgctccacttcctccgtccgcagctgcgcgggttcgcgccgcgcgtggcgggcgccgtggtggaggccgacccctgcggcgcggcgccgtgggagctcctggcgcggcacgggaggcgggaggaggggttcttcttctcggcgcgcgcgcggaggaagccctcggtgcggcggaccgtggcgggctgcggcggcggcggtggcggcggtggcgcgtggatgcacagctccaccaagaacgggcagtccgtgaccgacctcggcgtggtggtgcggtggtgcaggatcaactactgcttctacgtgcgcggcgagatggggcagcagcggagcaccgggtggatgatggccgagtacgagatcaccgacccgcggtgctaccgccgcgccgacgacggcgaggaggacgacttctgggttctctgccatgtcaggaagagctcgaggccccaagccgccaagatctctccagccaagccagcacggcggcgcaagcccgccgccgccgccgccgcggatgtccgggctgcgtga

SEQ ID NO: 12519 - DNA, 858 bp, Oryza sativa
  Clone ID: TFbOSC407962j.C1.o2.fg
atggaggaggagtggtgttgtgtggcgccgggattcaggttccacccgacggaggaggaactggttggttactacctggcacggaaggtggtcgggcagcaggacgacgggatcatccaggaggtggatcttaacagcatcgagccatgggacctgctgcaagctcagcagcatgatcaggagtactactgctacttcttcagctacaaggaccgcaagtaccccagcgcgcgagggacggggacgcggaccaaccgcgccacggcggcgggcttctggaaggccacgggccgtgacaagccggtgctctcctcctctcgatcatcatcgtcgccggcggtgatcggcatgaggaagacgctcgtcttctaccgcggccgcgcgcccaacggctgcaagaccgactggatcatccacgagtaccgcctcgtcgcccaccatcagcagccggacggcagctgctgggtggtgtgccgcgcgtttcacaagcccaccaccaccaccctgcagcatcagcttcacctgcacaggccgcctcctctacttcatcatcccggctattacgccgaacaaaatttatatcctcctctcgctgctgctgctggtggcggcggcttgctctgctcacttgccttggacatggagttggaggacgaggaggatgaatccaagatgatgatcttaagcaatgataatattccgctggtggtgagtccgactgccgtacacacacaaggcaccggcggcgacattattaacgacgctactaccgcgcctgctgctgctgctgctgctgatcatcgtcgacaccttgctccaccaccaccacttcacttgttagctaattcagtcgattaa

SEQ ID NO: 12520 - DNA, 873 bp, Oryza sativa
  Clone ID: TFbOSC900274j.C1.o4.fg
atggaggagtggtgttgtgtggcgccaggattcaggttccacccgacggaggaggaactggttggttactacctggcacggaaggtggtcgggcagcaggacgacgggatcatccaggaggtggatcttaacagcatcgagccatgggacctgctgcaagctcagcagcatgatcaggagtactactgctacttcttcagctacaaggaccgcaagtaccccagcgcgcgagggacggggacgcggaccaaccgcgccacggcggcgggcttctggaaggccacgggccgtgacaagccggtgctctcctcctctcgatcatcatcgtcgccggcggtgatcggcatgaggaagacgctcgtcttctaccgcggccgcgctcccaacggctgcaagaccgactggatcatccacgagtaccgcctcgtcgcccaccatcagcagccggacggcagctgctgggtggtgtgccgcgcgtttcacaagcccaccaccaccaccaccctgcagcatcagcttcacctgcacaggccgcctcctctacttcatcatcccggctactacgacgaccaatatttatgtcctcctcctgctgctgctggtggcggcggcttgctctgctcccctgccttggacatggagttggaggacgaggaggatgaatccaagatgatgatcttgagcaatgataatattccgctggtggtgagtccgactgccgtacacacacaaggcaccggcggcgacattattaacgacgctactaccgcgcctgctgctgctgctgctgctgctgatcatcgtcgtcatcctgaattgctagctgcaggtcccatcgacaccttgctccaccaccaccacttcacttgttag

SEQ ID NO: 12521 - DNA, 990 bp, Oryza sativa
  Clone ID: TFbOSC900019j.C1.o16.fg
atggagtgcggtggtgcgctgcagctgccgccggggttcaggttccacccgacggacgacgagctggtgatgtactacctgtgccgcaagtgcggcggcctccccctcgccgccccggtgatcgccgaggtggacctctacaagttcaacccatgggatctccccgagagggcgatgggaggggagaaggagtggtacttcttctcgccgcgggaccggaagtacccgaacgggcagcggccgaacagggcggcggggacggggtactggaaggcgacgggggcggacaagccggtggggtcgccgcgggcggtggcgatcaagaaggcgctcgtcttctacgccgggaagccgcccaagggcgtcaagaccaactggatcatgcacgagtaccgcctcgccgacgtcgaccgctccgccgccgcccgcaagctctccaagtcctcccacaacgccctcaggttggatgattgggtgttgtgccgaatctacaacaagaagggagtgatcgagaggtacgacacggtggacgccggcgaggacgtgaagccggcggcggcggcggcggcggcgaagggtggtcgcatcggcggcggcggcggcgcggcggcgatgaaggtggagctctccgactatgggttctacgaccaggagccggagtcggagatgctgtgcttcgaccggtcggggtcggcggaccgcgactcgatgccgcggctgcacaccgactccagcgggtcggagcacgtgctgtcgccgtcgccgtcgccggacgacttccccggcggcggcgaccacgactacgccgagagccagcccagcggcggatgcggcgggtggcccggcgtcgactgggccgccgtcggcgacgatggcttcgtcatcgacagctccctcttcgagctgccctcgccggcggcgttctcccgcgccgccggcgacggcgccgccttcggcgacatgttcacgtacctgcagaagccgttctaa

SEQ ID NO: 12522 - DNA, 972 bp, Oryza sativa
  Clone ID: TFbOSC401022j.C1.o2.fg
atggaggaggggttgccgccggggttccggttccacccgacggacgaggagctggtgacgtactacctcgcccgcaaggtctccgacttcggcttcgccacccgcgccatcgccgacgtcgacctcaacaagtgcgagccatgggacctccccagcaaggcaagcatgggggagaaggagtggtacttcttcagcatgcgcgaccgcaagtacccgacggggatccgcaccaaccgcgccacggactccggctactggaagaccaccggcaaggacaaggagatcttccacggcggcgcgctcgccggcatgaagaagacgctggtgttctaccgcgggagggcgcccaagggcgccaagaccagctgggtgatgcacgagtacaggctccagtccaagttcccctacaagcccgccaaggacgagtgggtcgtctgccgcgtcttcaagaagctccagtgccacctcgccaagccccgcccgccgcacgacgacgtcgacggagacggcgcctcgccgccggagatggtggacgcctcgtcgctcggcgagcttggcgagctcgacgtctcctccatcctcctcggcggcttcgcgccgccgtcgggcgagctctgccatggcggcggcggcggagacggtttcggcgcgcacaggcttcatgtcggcgcgtacatgagctggctgcaggcggcggcggcggccaaccagggcatgttccagtggccggcggccacgcaggcggggctggtcggaggcaccgtgttcgcggcggcgcacaaggcggcggggacgatgccgttcggcggcgggtgcagccagcagcaagcgcgggacgtgggcgtttctctggcgaacgtaggaggaggcgatgcgttgttcggcggggcgccgctggcgaaggtggacatggaatgcggcgagcaggcgccgcagctggacatggacgactccacatggagagccttctga

SEQ ID NO: 12523 - DNA, 1704 bp, Oryza sativa
  Clone ID: TFbOSC22429j.C1.o1.fg
atggcggcggcggatgggctcctcccgggcctcaagttcgatcccagcgaccacgacctcgtcggaaggtacctgctccggcgcctccagggccagcccctcccgctcgacggcgtcatcctcgaggcggatcccctgagcgcgccgccgtggaagcttctcgcggatcacggccgcggcgacgaggccttcttcttcgcggaggcgcatgccaagaatgggaaggggaagcggcagaagcgcaccgttgagggcggcggattctggcaggggcagcccacgtgcgttgacggcgagaggctttgcgtccccgacgacggcgtcggcagcggcggcggcggcggcggcttgcagatcgcgtggcgcaagtacgtgctcagcttcttcgcgaacggagagaggggcaagttcggatgggtgatgcacgagtacccggtgacggcgccggatggcctcgcctcgtcccaattgcggctgtatcgcgtccgattcagcggctacggcaagaagcgcaagaggaagccccaatgtccgggagcccacggcgacgacgacggcgagctacaatgcgcgccgcccccgcgccccatggcgaagacggctctgctcgaggagcgtgggccactgccccatcccgttcttggccctgcatcggtggtggatcagtgcaccgatcagggctcatccggcgtgatcgacgattcttcgctggtgtttcgtgatcttcccgacctgattgacctgccagttgcggaggaagcagatgccagccatggtgcagagactgctctgctcaacgagcacctgccgctgccgccgccacagttgttcgttccccctactgcagtgccgctggacctcgccgatgactctaatggcgccgatcagaactcctatggcatgatgggcgacgatcagctgctgcttcctgaccttcccgggacaatcaatgacgacatgccagacctgttcgtctcccaagcagaggaagccagtgcagtgcccgcgatcagctaccactcgtcgggcttcatgggcaacgaggttgcggcattgtctgattttgagttgccggagagctattcctcatctgatgccatggacggcgaggcgctggcattgtcgaattacgagtttccagagagcttcgaggaggatctgagctgcatcgacttcgccactgccaacgcgagcagcctcggcttcccaatggacggataccccatggacgagctgttcgatgatatgcctgaccagggctcttccggcgcgatggacgattcatcggtggtgttccgtgatcttcccggcctgatcaacctgccagccgcagaggaagcagatgccatcggcgatgcagagactgctctgctcagggatctcgccgatgactctaatggcaccgatcgaaactcctatggcgtgatgggcgacgatcaggatcggctgctgcttcctgaaattcctcggagaatcgacatgcccgacttgttcgtctctcaagcagaggaagccggtctcggtggcggtgcagcgctggactcctcatcgggcgccatggacggcgaggcgctggcattgtccgactttgagtttcccgagagcgtcgaggaggtgctgagctgcatggacttcagcacggtcgacatgagcttcttggacgtccccattgacgagctgctagatgatctgcccgcagactga

SEQ ID NO: 12524 - DNA, 1005 bp, Oryza sativa
  Clone ID: TFbOSC421430j.C1.o8.fg
atggaagaggagcagcggttgccggcggggttccggttcttccccaccgacgaggagctcgtcacctactacctcgccaggaaggccatggacgccaccttcacctccgccgccatccgcgacgtcgacctctacacctccgatccatggcacctcccatgcgactcgtcggcggcgagcaccggaggcggcggcggcggcgagtgctacttcttctgcagacggagcagcaagtacccgtccggcgcgcgcgtccgccgcgcgacggccggcggctactggaagtcgacggggaaggacaagggcgtgtacgctgccggcggcggcggcgggctcgtggggacgaagaagacgctggtgttctacgaagggagggcgccgcgaggggagaagacgagctgggtgatgcacgagtactctagagcaccgagcaccaacttcatcagaggagctcaggcacgtacacataatcttctcgatattatctacagcgagtgggtgatctgcagggtgttcaagaagcagcctccaattgaacactggctggaaatggaggaggtggagacgacgacgacgacgacgacagtgcaggagcacacgccaaaccggcgccgtctccctccggcggaggctgcggcggcgccgccgccgccgtccggtcagccgtggcaacacacgagtcgccggtccggcgatggccgtgctgccatcgatggtggcaaccgtgaggaggaggaggatgaacatggcctggctcgagaggagtcgtcgtctccggtggtcatcagctcaccatcacgctgcacctcctcaccgtcgtctcggcttctcaaccatgagcaccttggtgcttcgtcgtcagatgacctgccggagttgatggagttcggcgacatctacggcgggatcgccgccggtggcccgacggaccagcaggcctcatcatcaaactcaaattccatttgcaactttctcgacgagccatactactgctggaacttctga

SEQ ID NO: 12525 - DNA, 732 bp, Oryza sativa
  Clone ID: TFbOSC406649j.C1.o1.fg
atgagcatctcggtgaacgggcagtcgtgcgtgccgccggggttccggttccacccgacggaggaggagctgctcaactactacctccgcaagaaggtcgcctccgagcagatcgacctcgacgtcatccgcgacgtcgacctcaacaagctcgagccatgggacatccaagagaggtgtaagattgggtcagggccgcagaacgactggtacttcttcagccacaaggacaagaagtacccgacggggacgaggacgaacagggcgacggcggccgggttctggaaggccaccggccgcgacaaggccatctacaacgccgtccaccgcattggcatgcgcaagacgctcgtcttctacaagggccgcgccccccacggccagaagtccgactggatcatgcacgagtaccgcctcgacgaccccgccaccgacaccgccgccgccacacccacggttacttctgctgctgctgcggcggcggcgatggcggcggcggcggacggcgggcaggaggatggctgggtggtgtgcagggtgttcaagaagaagcaccaccacaaggaggccggcggcggcggcggcaagcacggcggcgacggcagcgccggcgccaaggcggcgcacgcttactcctccagcgacgacgcgctcgaccagatcctgcagtacatgggcaggtcgtgcaagcaggagcacgagctcccctcgcctcaggccagcggcggtgcg

SEQ ID NO: 12526 - DNA, 930 bp, Oryza sativa
  Clone ID: TFbOSC900198j.C1.o5.gm
atgagcatctcggtgaacgggcagtcgtgcgtgccgccggggttccggttccacccgacggaggaggagctgctcaactactacctccgcaagaaggtcgcctccgagcagatcgacctcgacgtcatccgcgacgtcgacctcaacaagctcgagccatgggacatccaagagaggtgtaagattgggtcagggccgcagaacgactggtacttcttcagccacaaggacaagaagtacccgacggggacgaggacgaacagggcgacggcggccgggttctggaaggccaccggccgcgacaaggccatctacaacgccgtccaccgcattggcatgcgcaagacgctcgtcttctacaagggccgcgccccccacggccagaagtccgactggatcatgcacgagtaccgcctcgacgaccccgccaccgacaccgccgccgccacacccacggttacttctgctgctgctgcggcggcggcgatggcggcggcggcggacggcgggcaggaggatggctgggtggtgtgcagggtgttcaagaagaagcaccaccacaaggaggccggcggcggcggcggcaagcacggcggcgacggcagcgccggcgccaaggcggcgcacgcttactcctccagcgacgacgcgctcgaccagatcctgcagtacatgggcaggtcgtgcaagcaggagcacgagctcccctcgccgcaggccagcggcggcggcggggccggcgcagggagcaggccggcgtcaaggtacctcccgccaatgtaccccagcctgcgggcgtctggttttggaaatcggtccctctttcgccgcccgcgtgggggctccgcggcgattggctactcgtcagttctgcctgataataatattgtttacatcctgtacgtcgtctcaggctcatcagcagattaa

SEQ ID NO: 12527 - DNA, 1485 bp, Oryza sativa
  Clone ID: TFbOSC900189j.C1.o17.fg
atggcgggattaggaaagggggagagtagcggcggcggtggcggcggcggaggggagatggggttcaggttcaagccgagggaggcggaggccgtggagtactaccttctcccccggctgcagggccggccgcccgtgcccaaccccgccatcgtcgtggagaacgtctacgagttcgagccggagcggctcatcaatgagaagtgcaacggcggcgtcgccggcgagggcgaggaggggtggtacttcctgtcgccgagggatcgcaagtacaggaacgggaagcggccgtcgcggagcacggaggacaaggccgggcggtggaaggcgtcgacggggaagacggaggggaaggacccgatcacggagtgctatggctgggtcaagttctgcgtcaccagcctcgtctacttcaagggccccgtcaagacggagaagaagaccaagtggctgatgcgcgagttcaccatcccgcacttcgagaacaagctcgacaagaccgccgccgccggcggcagcagcaaccagcggcagctggatcagtacgtgttgtgcaggatttacacgtcgccgaagaaaggcgcagacgacggcgagcaagccgaagtcgtccgcggcggcggcggcggcggcgaggacatcgacgagtgggcggaagcctgcgctgtcttcgacttgggtcccgagacggcggagggcagcgacaatgcggatgcggcggcggcggagggagacatgcggtcggcgaaacaggcgggcaagaggcccgtggcggcggcggcggtggccgagcagccgtcgaagcggccgtggctgccaccatcaccgtcgacgccatgtgacggcgggccatcgcaagcgatgggcaaccgccaagtcccaatgcaggggctatcactcatgcacaacttcccgcctccgccgacgacgttctgcggccacgcgccatttcagcaaggattcccggtgcacaacaaccgcgcgcagatgcggtggccgacgatgcagcacaactgcatgccgtcgccggcgcacagcttccagccgcggccggtgcagcggcgaccggtgctcgtcggccaagcgccaccgcagcggcgaccggtgcatcacgtcggcggccacgcgccgatgcacatgcaccaggcgcagtggacgccggtgcacatcgcccaagcgccgatgcagcagctgccgtttgacgattgggtgttcgatccgttcgacgacccgccaccgccgatgcagcagctaccggtgatgatgaacaactaccagccgcaagcgccaatgcagctgccgccgatgatgaacaatgaccagccggcgatggtgcacggcggcgagctccaggcgccaatgcagctgctgccggcgacgacgcacggcggcgaggtccaggcgccaatgccgctgaacgtgtacgaggaggagcagaggccatcgcaagaagacgggggacaatgcacaaatgcagaaggatga

SEQ ID NO: 12528 - DNA, 2052 bp, Oryza sativa
  Clone ID: TFbOSC900291j.C1.o15.fg
atgaaacaagggaaagtggagatgacgccggcggtcgccgccgcggcggttctgccggtggggttccgtttccggccgacggacgaggagctggtgaggcactatctgaagggaaagatcgctgggcggagccaccctgacctcctcctcatcccggacgtggacctctccacctgcgagccctgggatctcccggccatgtccgttatcaagtccgacgaccccgagtggttcttcttcgccccccgcgaccgcaagtatcccggcggccaccgctccaaccgctccaccgccgccggctactggaaggccaccggcaaggaccgcctcatccgctcccgccccgccggccccctcatcggcatcaagaagaccctcgtcttccaccgcggcagagctccgcggggcctccgcaccgcctggatcatgcacgagtaccgcaccactgagcctcacttccaatcaggcaaaaacggtagcttcgttctgtatcgcctgtttaacaagcacgaacaagatgatacccataccccggcctccaatttggaccaacaattgtccacgtcttctcaaggcaatccccaaaatggcacacctgctgtccaaccggccctcgcctcaataatgaaggatcatcagaccttaccatcatctggtttcagccaactgactgaaatacaagatgctagtacatctgtccatgacaaagagcaaactgtagcccatgacgatgcttttctggacgtgttatctcaacttccagacctagagcctgagcaaagatacaatggattccctaatatcacctctccaattcgcccttacagcgatcacccttttgtcggcaatctgggtgagcaagatctttcagcgcattttggcagtaccttgtctgagcaggacctgcaaagtttgttgtttagtccaaattacaccaaaatggataagcaccccactggaaacgtagagtctaatcctaccgcgtcgtccaacaatccaaacaataacacattactcatggatagttggaggaagaatgattcatatcagatgcttctaattcagcgtgcagacaacacagatgctacttgctgttcttcttcaatcaatgcaccacaaacagaaacaagtgatgctaatcttgaagcaagagcccagagtagcagcatggtctacagtggagtagccgagggctcccccttgtgcaaccaagatcaactacactccgcattcaatcctcacatggagtcacaaaagagtggagccttctgttgggctggattgtggaccccttatccccagcattggttcgatactatcgtagaaccgggcaggagtggcatgacattttcagatgccttgaaagaacaaggtcaggaacaggcaccttcaatgaagcacttgacagctcaagatctcgttgatccacaacaaggaactgctgcaagaaggatccgccttgtatgctctgttgagagggcatcagtctctcaacctgtatcctcacatttgcagagtgaatatgaagctggatcatgctgtaacactcgcaattcatctaataacaagaaggaaagtgtcaggagtgaagatgaagctggatcatgttgtaacactggaagttcatctaataaccacagcgaggaaaatgacgatgcagcctcccagattatggtactactacagtttattgatggagaaccaatgcatattcagtgcaaagaggatacccctattcaagtggatcattcagtggaagttatggacaagctccaaggcttctcctttcatgaagagatgttggtacatgctaatcagccccgtggaactaatctaaagcagaggctgttgagagtggagtctagaaatagcaatgagaataatgtaccttcgttggagacacgagaacagcagcatgcacctcatattcagaaatggactagctctgttgtgcgactagggtgggggtggcagtggccggctctctttgtgatggccggctctctgcttttgttggttggtgtgtggaaatctctgaatcacactacctga

SEQ ID NO: 12529 - DNA, 969 bp, Oryza sativa
  Clone ID: TFbOSC407684j.C1.o4.fg
atgagcggcggcggcgaaggggcggcggcggcggagaggcaggagctgcagctgccgccggggttcaggttccacccgacggacgaggagctggtgatgcactacctctgccggcggtgcgccggcctccccatcgccgtccccatcatcgccgaggtcgacctctacaagttcgatccatggcatctcccaagaatggcgctgtacggcgagaaggagtggtacttcttctcccctcgggaccgcaagtacccgaacgggtcgcggccgaaccgcgccgccgggtccgggtactggaaggccaccggcgccgacaagccggtgggcacgccgaggccggtggccatcaagaaggcgctcgtcttctacgccggcaaggcgcccaagggcgacaagaccaactggatcatgcacgagtaccgcctcgccgacgtcgaccgctccgcccgcaagaagaacaccctccggctagatgattgggtcctgtgccgaatctacaacaagaaaggcggcgtggagaagccgagcggcggcggcggcggcgaacgttcgaatatgatgagccacggggagaccgcgtcggcgggctcgccgccggagcagaagccggccgtgctgccgccgccgccaccgccgtacgcggcggcggcgccgttctcggagctggcggcgttctacgacgtgcggccgtcggactcggtgccgcgggcgcacggcgcggactcgagctgctcggagcacgtgctgacgacgtcggcgtcgtccggcggcgtcgtcgagcggccggaggtgcagagccagcccaagatcgccgagtgggagcgcacgttcgccggcgccgccgccccggctggcgccgtcagcacggccggaccgattctgggccagctcgaccccgccgccgccgtcgccggcggcggcgacccgctcctccaggacatcctcatgtactggggcaagccgttctga

SEQ ID NO: 12530 - DNA, 687 bp, Oryza sativa
  Clone ID: TFbOSC401583j.C1.o24.fg
atggcggcggaggcggcctccggtggcggtggtgggtaccggatgctgccgcaggcggggttgccgatcggtttccggttccgacccaccgacgaggagctcctgctccactacctccgccgcaaggtcatgtcgcgccccctccccgccgacgtcatccccgtcgccgacctcgcccgcctccatccatgggaccttccaggcgagggagacggcgagaggtacttcttccacctgccggcgacgagctgctggcggaggggcggcggcgggagcagggcgggcggcggcggcggcgcgtggagggcgtccgggaaggagaagctcgtcgtcgcgccgcgctgcggcaagcggcccgtcggcgccaagcggacgctcgtcttcttccgccgcggcggcgcccgcaccgactgggccatgcacgagtaccgcctcctccccgccgacgaccatccgccggaggccaacgacgtctgggtggtctgccgcgtattcaagaagaccaccacgctggctcaccgccgttcgccgccgtccatccgtggcgcgccacgccggcgagccgccgccgccgacgacgacgacatgccgtcctcgccgtcgtcctgcgtgacggacggcggcgacgcgggggaggagggagaagagagcagcagctgcagcgtcgtcgcttctaattgtccatga

SEQ ID NO: 12531 - DNA, 824 bp, Oryza sativa
  Clone ID: TFbOSC2451j.C1.o1.np
ggacttagcatccccatggtgaatggtgccacaatccacctcctccctggtttccggttccgtccaactgacgatgagctagtcatcaaatacctctacccccgtgcttttcatgtgccactgccctgtgcgatcatcaccgatgttgacatccatcatcacaacccctgggacatcgtggcggagagggagaaagggaagcacttcttcacaagaaaggaggtcaagtaccctggtagccgccgtagcaaccgtgttgctggtaatggcttctggagagcagcaggctcggaggtgcccatctattacaaaccagaaggtgctgctaacgacatgctagttgggatgaggcggactctagtgttccactacggaaagtcacgatctgcagagcgcactgaatgggccatgcatgagtttcagcttgctggtgctggtctccttcctcaccctatgatgagctcatgggtgatctgctgcatctacaagaagaggcagcaaaacacaaaaaacaaatcagaagatataactgacaaaaacaatggcagtccgtctgctgcccatactcatgcccctctggtggaaaccatggtcgaacctgataattcttggatgatatgtcgcatttacaagaagaggcagcgtgcaccgcaggtcatcatccctccgtccattggcaatgcaagggaagctgtcctcgccgttcctgccattggcaatgcaggcgatcgtcaagtcacttcattgacttcccagggcatagatgtttcgaggaggggagtgatgagtctgccaatgtcatcacaaaggacaagggcagtgat

SEQ ID NO: 12532 - DNA, 474 bp, Oryza sativa
  Clone ID: TFbOSC2465j.C1.o1.np
ggacttagcatccccatggtgaatggtgccacaatccacctcctccctggtttccggttccgtccaactgacgatgagctagtcatcaaatacctctacccccgtgcttttcatgtgccactgccctgtgcgatcatcaccgatgttgacatccatcatcacaacccctgggacatcgtggcggagagggagaaagggaagcacttcttcacaagaaaggaggtcaagtaccctggtagccgccgtagcaaccgtgttgctggtaatggcttctggagagcagcaggctcggaggtgcccatctattacaaaccagaaggtgctgctaacgacatgctagttgggatgaggcggactctagtgttccactacggaaagtcacgatctgcagagcgcactgaatgggccatgcatgagtttcagcttgctggtgctggtctccttcctcaccctatagcacaaaactggcatgca

SEQ ID NO: 12533 - DNA, 1521 bp, Oryza sativa
  Clone ID: TFbOSC401036j.C1.o17.gm
atggagcgacggtgtggcacgtcggcgccggcgatcgaagacatgtcgccgcacagccggagcacggccggaaaatacatagctggctacatagtgaaaaaaaaaatgcatcctaatggcgcgccgctggccgtgccaccgggtttccggttccatccgacggacgaggaattgctctactactacctgaggaagaaggttgcttatgaggccatagatctcgacgtcatcagggagattgacctcaacaagcttgagccttgggatctcaaagatcgatgcaggattgggacgggggcgcaggaggagtggtacttcttcagccacaaggacaagaagtacccgacggggacgaggaccaaccgcgccacggtggccggcttctggaaggccaccggccgtgacaaggccatcttcctcggcagcggcggcggcacgaggattggcctgaggaagacgctggtgttctacaccggaagggccccgcacggcaagaagaccgactggatcatgcacgagtaccgcctcgacgacgacaatgtcgacgtcccggaggaaggatgggtggtgtgtagggtattcaagaagaagagcatccatcagaggggcttcgaccagccggacatggcggcggcggccgacgaggacgagctccggtaccagctgctccacggcgcgggcatgtcgtcgtcgccggtcgaccagaagcacgtgctcctccaagagcagctcgtcgcgcacggcgcccatggcggcggcttcgtcgtcccggcgttcgaagcctccatgcacctcccgcagctcgccagcgccgacgcggcgccgtgcggcggcggcggcggcggccatgtcgcgttcgcctccatgaacccgctcgacgccgccggctgcggctcgcagaacatgatgacgatgaagatggcagcgacatccggtggcgagatgctgctgatgagcggcggcggcgtcgacggcggccgcttcggcgccgccgccgactggtcgatccttgacaagctcctggcgtcgcaccagaacctcgaccagctcttccatggcaaggtcgccggagcgcatcagcagcagcagcagatggccatggacgccgcctcgtcgttgcagaggttgccgttccaccattacctcgggttggaagctgcagatcttctcaaatccagtccactcccagtctcccaccgtccagtcccagacagagtcccacaggcgcacgattcctcacctcctcatcggccggcgccgccgtggggccaagccgtcgtcgcctcctcgctgcggggccaagccgccgccgccgccgggaccaatcgcctcctcgcccagtcgccacatcgccgccatcggagcaacccacgccggctctgccgcgccccattgcctcctcgcgccgtcacgcgccacatcgccgccgccgggccaagccaaccaacgccgccgccgcggcgccccatcgcctcctcgcctgcctcaccgtcaagccccaagatttggtatgacttgtag

SEQ ID NO: 12534 - DNA, 906 bp, Oryza sativa
  Clone ID: TFbOSC401231j.C1.o5.fg
atgtcggagtcggaggtgtcggtgatcaaccagctggaggaggaggagactcggctggagctgccgccggggttccggttccaccccaccgacgaggaggtggtgacccactacctcacccgcaaggcccaggaccggagcttctcctgcgtcgtcatcgccgacgtgaacctcaacaactgcgagccatgggacctcccaagcaaggcgaagatgggggagaaggagtggttcttcttctgccacaaggaccgcaagtacccgacggggatgaggacgaaccgggcgacggccagcgggtactggaaggccaccgggaaggacaaggagatcttccgcggccgcggcctcctcgtcggcatgaagaagacgctcgtcttctacatgggccgcgccccccgcggcgagaagaccccctgggtcatgcacgaataccgcctcgacggcaagcttccccccaacctcccccgctccgcaaaggaggaatgggcggtttgccgggtgttcaacaaagacttggcggcaaagattgcccaaatgccgccgcctcccttcccgcgcaacgactccttcgacctcgacctcgacgacttcctccacctcgacgccgacctgccgccgctcatcgacgaccccttcgcctccacctccacgctcaagacggagccacctccgccggccaacctgatgcacaaccactacggctacttctccctcccggcgtcagcgaccaattataaccacagctccggcgccatggcggaccaggcgattcggaggttctgcaaggcggaggcgtcgacggcgtgcttctccggcgccgacgctgacgtggatccggtggtggacgagctgctctccttcccggactccatcacggactactcctacatatggaaggcctga

SEQ ID NO: 12535 - DNA, 2037 bp, Oryza sativa
  Clone ID: TFbOSC32411j.C1.o2.fg
atggcggcggcggctggagatgggctcccgccggggctcaggttcgagcccaaggacgacgagctcgtcgcccgcttcctcctcgcgcgcatccagggtaagcccctccctctccacggcgtcatcctcgacgccgatcccctctgcgcgccgccatggaggcttcttgcggatcatggcaggggcgatgacgcgttcttcttcgccgaggcgcgggccaagaacggcaaggggagccggcagaagcgcacggtcgagggcggagggtactggcaggggcagaggatgtgcgtcgatggcgagaggctggtcgtccccgatggtggcggcggcggcggcgtggagatcgcgtggcgcaagtacgtcctcagctacttcgcggatggcgagaaggggagctcggggtgggtgatgcacgagtacgccatcacgtcgccggctgacctcgcctcgtcggcgatgcggctgtaccgcatccggttcagtggccacggcaagaagcgcaagagggaaccggattctcagagcgcccacgacgaacacggtcgagcgcgctgcgccccacagatcgccatgcccgagactgctctgctcgaggacagcgcgccgccgccacagcccgtccatcctcctgctgcggtggtggactgtgtctgtgacgtcaccgatcagggctcttccctggtgtttcctgatcaacccgggtcaatctatgaggatgagttgcagagctttgtgcctgagttcgccgcgcgcaatctgttcgtctctttgccagaaggaagccgtgacgtcgtggcagaggctgctctgatcgaggacttggcgctctcgccacagcctgttcctcctcctgcagaggtggtgaaccaagctgatgactccgatggcgctgatcagggctgctcgagtgtgtttgctgctcttcccgacctgatagtcttgccaccggaggaagcctgtggcagtggtggtgcagcaccggcgccgtcttgggcatcatcgctggacaaccaaaacgacgacgcaccagctttctttgagtttccagagagcatggatgacatggttggctgcttcgacttcgcctccatggacaaccagagctgcactagcgccgtgtcagagattgctgtgctcgaggagccctttcttcctccacctacaatggtgaaccatgacaataactctgtctctgacggcgccgatcagagctgcttcggcgtgggggacaactctaccctggtgttttctgatctaaccgggtcaatcgatgaggatgagcttcagagttttgtgcctgagttcgtctctctgccacaaggaagctgtgaagctgatgctgaagctgacagcggtggtggcgtagcaccggcgcagtttgctgaatttggaggtccagagagcatggatgacccgttgaactttccagcagaagccagtggcggcggcgaccgtgcagcaccggcatcatcttgggtgtcatcgcaggacaaccaaaatgatgaggcgccaatgttcttcgagcttccagagagcctggatgacatggttggctgctttgactttgccgccatggatggccagagctgcactagcgccgtgtcagagactgctctgatcgaggagctcgttcttcctcctgcagcaatggtgaaccatcacgatgactctgtctctgacatcgccgatcatggctgctccggcgccgttcctcctcctaattcagaagtggtggacctccccaatgactctgtcggcgccgatcagagctgctccggcatggtggacgattctctttccgggtactatgaggctgagctgaaggacgccagcggtggtgcagggtccatgatgtcgtcgccggacaagcagaaggagcactcctcatcgggtgtcatggacgtggaggccactggttttggagttccagacagcatggatggcctgagctgcatcgactttgccgagacgatggacgacctgagctgcatcgacttcaccattgatgatgagttgtttgatctatggagctag

SEQ ID NO: 12536 - DNA, 2121 bp, Oryza sativa
  Clone ID: TFbOSC32411j.C1.o5.fg
atggcggcggcggctggagatgggctcccgccggggctcaggttcgagcccaaggacgacgagctcgtcgcccgcttcctcctcgcgcgcatccagggtaagcccctccctctccatggcgtcatcctcgacgccgatcccctctgcgcgccgccatggaggcttcttgcggatcatggcaggggcgacgacgcgttcttcttcgccgaggcgcgggccaagaacggcaaggggagccggcagaagcgcacggtcgagggcggagggtactggcaggggcagaggatgtgcgtcgatggtgagaggctggtcgtccccgatggtggcggcggcggcggcgtggagatcgcgtggcgcaagtacgtgctcagctacttcgcggatggcgagaaggggagctcggggtgggtgatgcacgagtacgccatcacggcgccggctgacctcgcgtcgtcgacgacgcggctgtatcgcatccggttcagcggccacggcaagaagcgcaagagggaaccggaatctcagagcgacaaccaccagatcgcagtggcggagactgctatgctcgaggacagcgcgccgccgccacagccggttcatcctcctgcagcgatggtgaactgtgtctctgacgacaccgatcagggcttctccggtgccgttcctcctcctgcaccggtggtgcaccataccaatgactctgacgtcaccgatcgatactcttccctggtgttctctgatcaacccgggtcaatctatgaggatgagttgcagagctttgtgcctgagttccccgctcgcaacctgttcgtctctttgccagaaggaagccatgaagctgaaccggcgcaatctgtgtcgtcgttagctgatgttggaggtccagagaacatggatgatcagagctgctccggcgtggtgtttgctaatcttcccgagctgatcgtcttgccatcggcgccatcgctggacaatcaaaacgacgaggcgccagtgttctttgagtttccagagagcatggatgacattgttggctgctttgacttcgccgccatggacaaccagagctgcactagcgccataccagaggagccctttcttcctcctgctgcaatggtgaaccatgacgatggctatgcctctaacaacgccgatcaaggttgctccggcgcctttcctcttcctgcagcagtggtggaccttcccaatgagactgacggcgccgatcagagctgctctggcgtgggggacaactctaccctgttgttttctgatgttaccgggtcaatcgatgaggatgagctgcagagttttgtgcctgagttcgccgcgagcaacctgttcgtctctctgccacaaggaagctgtgaagctgatgctgaagctgacagcggtggtggcgtagcgccggcgcagtttgctgaatttggaggttcagagagcatggatgattcttccatgatgtacccgttgaactttccagcagaagccggtggcggcggtggccgtgcagcaccggcatcgtcttgggtgtcatcgcagcacaaccaaaatgatgaggcgccaatgttcttcgagcttccagagagcctggatgacatggttggctgctttgactttgccgccatggatggccagagctgcactagcgccgtgtcagagactgctctgatcgaggagctcgttcttcctcctgcagcaatggtgaaccatcacgatgactctgtctctgacatcgccgatcatggctgctccggctccgttcctcctccttcagcagtggtggacctccccaatgactctgatcagagctgctccgggtactatgaggctgagctgaaggttccacttgagtacgccgcgcgcaatccggtcgactctcccgcaaaaggcggcaatgaagccgaagttgacgccagcaatggtgcagggtccatgatgtcgtcgccggacaagcagaaggagcactcctcatcgggcgtcatggacgtggaggctattggttttggagttccagacagcatggatagcctgagctgcatcgacttcgccgagacaatggacgacctgagctgcatcgacttcaccattgatgatgagctgttcgatctatggagctag

SEQ ID NO: 12537 - DNA, 1491 bp, Oryza sativa
  Clone ID: TFbOSC407633j.C1.o20.fg
atgacagcggagagcaatggcggcaacagctcggcggcggcgacgacggcgagcaatggaggccggcggagacacgagctggtgccgaagctacgattgcctccaggctaccacttcgtgccctcggatgaggagctcgtcgacttctacctccgcggcaagatcgagcaacgtaggccgcccatggacttcatcaacgaggttgacattatgagcttcgatccagtcaaattgatcgagaaatacaagggttacggagagaatagatggtacttcttcacagtgaggaaaccatcgaagacgaagaaaaaggacgagccaaataggaaggtggtggtggatggggtagaggagggaagctggagcgcgacggggagcgtggcatatatctgtgggaaggatcacgagactgtcattggcaccaagagggttctcacctacaaatcagctcgctctgctgaggaggacaagtggagcatgcatgagtatgtcatgttagataaatcccagatcctggatacaactagggatacaatgtcgatggatcaatatgttctgtgtgcgatacagttgaagcagacatacgaggctgaaaagaaggcccaggaggaggaggagagaggcgtcaaacgcaagagaacggcaacgaggaagaggagaaaaggagacattgatcaaactacttcccaggagcaagaagatcagcagcaggagacaccaccacctggagatcctcatgatcaatccgttgtagatgccccttattattccacgcaaatggcgttaggaggagaagaagaagttgcgccagttccatggtgcgccgattgcatggcgcaacctgatcgaatcgaatatcctgcagtgtggtacaatcagcaggagcaacagccatcgcagttagttgatcgatcgatgatgacacaaggctacattggagatctttcttacattcagaatcaatttgatcaacagcaggcacatgatcatggtagcattaatgcatttgacgaggctctcgaccaatgccatgacaccaatttcgcatgggataatgctggtatctatcctggaaataacttgctagatggcaacttggatgatgatactcaggatcagtttggcaatcaatctactcttggtgcattaactggagaattagagtatggcacgggctaccagttccatgacgcactccaggctacgccaggttctgatgatgcatctgctcaatccatgggaattcaacctgctgctggacattccatgggagatgatgatgagacatgctgtaatgatgatttgtcgtcactccttgctgatatttcgagaatcttactagatggcaatggtgttataaacaatgaaggaaacccagagggaagtaatcagggcttgcacatctgcaaagatggacaccaatggccgttagaagagagcacaatgccaacggttgagtgtgttctgcagcatcctggagagtctgcctga

SEQ ID NO: 12538 - DNA, 858 bp, Oryza sativa
  Clone ID: TFbOSC8882j.C1.o8.fg
atggtgatgagcggcggcggcggcggcgcgaggattgtcagtgatccggcggcgacgccggggttccgattctacccgacggaggaggagctgatcggcttctacctccgccaccgcctcgccggcacgagggccgacgacgtcgcccgcgtcatccccgtcgtcgacgtctacggctaccatccttcccagctcgccgccatggccggggtggcgaccgcgggggacagggagcagtggttcttcttctgcccgagggcggagcgggagctccacggcggcaggccggcgcggaccacgccgtcgggctactggaaggccacgggctcgccgtccttcgtcttctcctcctccgccgccgccgccgccagggtcatcggcgtcaagcgcaccatggtcttctaccagggccgcgccccctccggcaccaagaccaggtggaagatgaacgagtacaaggccgtcgccgccgccgccgccgacgacgaccacaacgccgctggcgtggccgtgcagctgccaccaatggcgccgccgccgtcgtcctccgcgtgcgtgcggctgaggaacgagctgagcgtgtgccgggtccaccatcaacctcagctccagcaacaacaacgtcagctgccatcgtcggcagcggcggcggcgacgaacggcaacctcatcgccctcgccggcgggtacgagtgctcacacgacagctccggtggctcgtcggaagatgccgccatcgactggagctcgctgattaccgccgccaccgattccgctaccgccgccgttgatttcagcttcaacgacgacatcgatttcagccctgccgctgttggcccatgggcgccacagctttga

SEQ ID NO: 12539 - DNA, 924 bp, Oryza sativa
  Clone ID: TFbOSC900066j.C1.o15.fg
atggtgatgagcggcggcggcggcggcgcgaggattgtcagtgatccggcggcgacgccggggttccgattctacccgacggaggaggagctgatcggcttctacctccgccaccgcctcgccggcacgagggccgacgacgtcgcccgcgtcatccccgtcgtcgacgtctacggctaccatccttcccagctcgccgccatggccggggtggcgaccgcgggggacagggagcagtggttcttcttctgcccgagggcggagcgggagctccacggcggcaggccggcgcggaccacgccgtcgggctactggaaggccacgggctcgccgtccttcgtcttctcctcctccgccgccgccgccgccagggtcatcggcgtcaagcgcaccatggtcttctaccagggccgcgccccctccggcaccaagaccaggtggaagatgaacgagtacaaggccgtcgccgccgccgccgccgacgacgaccacaacgccgctggcgtggccgtgcagctgccaccaatggcgccgccgccgtcgtcctccgcgtgcgtgcggctgaggaacgagctgagcgtgtgccgggtgtacgtcagcaccggcacgctccgatccttcgaccgccgccccctcgacgcgcccccggtgatcagccaccatcaacctcagctccagcaacaacaacgtcagctgccatcgtcggcagcggcggcggcgacgaacggcaacctcatcgccctcgccggcgggtacgagtgctcacacgacagctccggtggctcgtcggaagatgccgccatcgactggagctcgctgattaccgccgccaccgattccgctaccgccgccgttgatttcagcttcaacgacgacatcgatttcagccctgccgctgttggcccatgggcgccacagctttga

SEQ ID NO: 12540 - DNA, 662 bp, Oryza sativa
  Clone ID: TFbOSC409911j.C1.o6.np
tgcgccctcatttcatccatggcaatgcagctgtccttgcctgtcttgccaacgggttttcgtttccatccaaccgatgaggaactagtcatcaactacctccagaggcgtgctaccgggctatcgtgccccatccccataatcgcagatgtcgaaatatacaacttcaacccgtgggagcttccatccatggctctatttggggaacatgagtggtacttttttacactacgcgaccacaggtaccccaatagtgtgcgccctagtcgctcagcggcgtcaggcttttggaaggccaccggcactgacaagcccgtccaagttgctaacatgcaaagcactcctgtagctatgaagaaggcacttgtattctatgttggccgcccgcccatggaaaccaagactacatggatcatgcatgagtaccgtctcacaaacacgggagggtccactgcctcccacccatccttgtcttcatccaccgcacacccttctgtgaagctagacgagtgggtgctatgcaagatcttcaacaagtccccagagccggacaacaccgcaccaccatcaaacgtcgtctcacggttacagtgctcgccgccgctgccgccgccggcggcaccgcccgggcacttcaatctaatataaaaaaaaacaaaaaa

SEQ ID NO: 12541 - DNA, 591 bp, Oryza sativa
  Clone ID: TFbOSC29108j.C1.o1.fg
atggcgccgaggaaggtccatggcctcagcatcgacctcgacataatcccagaagtagacctctacaaatgtgagccctgggaattggaagagaaatccttcctgcctagtaaagactccgagtggtacttctttgggccaagggatagaaagtatcccaatggatgccgcacaaaccgtgcaaccagagcaggatactggaaatcgacggggaaagatcggcggatcaactaccagaacaggtcaattggtatgaagaagacactagtctactacaaaggtcgagctcctcaggggattagaaccagttgggtgatgcatgagtaccgcatcgaggaaagcgaatgcgagaacgccatggggattcagttacaggactcctatgcgctatgtcggattttcaagaagaatgtggtgttgggtgaatttgacaagaaaggggagtgcagttcatcacaggctaaaggaaatgaagaagttacagatttcggggatgctggacaatcctcgggagcaaatgagaatgataaagacaattcatggatgcaattcatagcagaggatctatggtgcaccaacaaactaaagtga

SEQ ID NO: 12542 - DNA, 951 bp, Oryza sativa
  Clone ID: TFbOSC401108j.C1.o12.fg
atggcggcggcggttgggggcagcgggaggagggacgcggaggcggagctgaacctgccgccgggcttccgtttccacccgaccgacgaggagctcgtggtgcactacctctgccgcaaggttgcccggcagccgctccccgtcccaatcatcgccgaggtcgacctctacaagctcgacccctgggatctccctgagaaggcgttgttcgggaggaaagagtggtacttcttcacgccgagggaccggaagtacccgaacgggtcgaggccgaaccgcgcagcggggagagggtactggaaggcgacgggagccgacaagccggtggcgcccaaggggagcgcgaggacggtggggatcaagaaggcgctcgtgttctactccgggaaggcgccgaggggggtcaagacggactggatcatgcacgagtaccgcctcgccgacgccgaccgcgccccgggcggcaagaagggctcacagaagctggacgagtgggtgctgtgccggctgtacaacaagaagaacaactgggagaaggtgaagctggagcagcaggacgtggcctccgtggcggcggcggcgccgcgcaaccaccaccatcagaacggcgaggtcatggacgcggcggcggctgacaccatgtccgacagcttccagacgcacgactccgacatcgacaacgcctccgccggcctgcggcacggtggctgcggcggcggcggcttcggcgacgtggcgccgccgaggaatgggttcgtgacggtgaaggaggacaacgactggttcaccggcctcaacttcgacgagctgcagccgccgtacatgatgaacctgcagcacatgcagatgcagatggtgaatccggcggcgccagggcacgacggcggctacttgcagtccatcagctcgccgcagatgaagatgtggcagacaatcctgccaccattctga

SEQ ID NO: 12543 - DNA, 1152 bp, Oryza sativa
  Clone ID: TFbOSC400547j.C1.o10.fg
atgaggagtagtgacatagagaagcaagatgaagtcatgctacctggcttcaggtttcatccaacggatgaagagctcgtcagattctaccttagaaggaaaatccagcagaagtctcttcccattgagctcatcaggcagctggacatctacaagtatgatccatgggatctcccaaagttagcaagtactggagagaaggaatggtatttctactgcccaagggataggaagtaccggaacagcacaaggccaaacagggtgactggagcaggtttctggaaggccactggaaccgataggccaatctactcctccgatggatcaaagtgcataggcttgaagaagtcccttgtcttctacaagggcagagcagctaaaggcgtcaaaactgactggatgatgcacgagttccggctgccatcgctcactgacccttcattgccacagaagaagccactcgagaagatcattccaccaaatgattcctgggcaatctgcaggattttcaagaaaaccaattccacggcacaaagagcgctctcacactcatgggtatctcctcccttgtccagcacaaatgaagcctacactgcccctgtctcgcagaccacacagagaagtcagcatacctcagataacacatcatcagtaatgaccgatgccatctcctccaccatccagttcaccggaagtagctacttgccttcaacagttccttcatgccacaacccactcagcatgattgacagcaacagcaggccagatgcatctgtacctctaccctcaccggttgcagagcatcagaccatgggtatcctctcagcaatcccacttgatattacagctgggattgacattgcatccatggttttcaatgcatcatccttcacactcccaaacatggatagaatgactgcaaacatagagtttggccaaccacagaagtgcaacagcagcagcagcatgaccaacagatgtgtggtcgacatgcctgatgttgctaacaatatcaacagcggtccacggtccatcaacttcaacctgcaaggaacactttctgatgactggagaatgaccttgccatgggaatcactcccttgcacgacagaagtctcaacaaatttccagtcaaccaagtgctatacttag

SEQ ID NO: 12544 - DNA, 1603 bp, Oryza sativa
  Clone ID: TFbOSC400240j.C1.o17.np
atggcgcccgtgagtttgcctccaggtttcaggttccaccccaccgatgaagaactaatcatctactaccttaagcggaagatcaacggaagacagatagaactcgaaatcattccagaggttgatctttacaagtgtgagccttgggatctgcctgaaaaatcctttcttccgagtaaagatctcgaatggtacttcttcagccctagagaccgcaagtacccaaatggatcaaggacgaaccgtgcaacaaaagccggatactggaaggcaactgggaaagatcgaaaagtgaactcacagaggcgtgcagttggtatgaagaagactcttgtgtactaccgtggtcgagctccacatggttctcgcaccgattgggtcatgcacgagtaccgcctcgatgagagggaatgcgagactgacactggcttacaggatgcatatgctttatgccgggtgttcaagaagacagcgcccgggccaaagatcatagagcattatggtgtggtgcaccaccatgtcgagcaacctcaatggatgacgagcagtatcgatcgctccccaacgttggacgtgtcgtgtgatggaagaggtgatgactttgagagcagcagcttctctttcccaacagagacgccaatggactccatgcacggtgggtttggaatgcagatgagtgcacctcacgaggatggcaaatggatgcagtttctgagtgaagatgccttcaacgccaccaatccattcttgacgaacccagtttctgccaacttctcatgccttccatccaaggtggatgttgcactggaatgtgcgaggctgcagcacaggctcaccttgcctcccttggaggtggaggatttcccacaggacgtcagccttgacacgaagattggcatacttcgcagtaaccccaacgaagttgacattctccaagaattcctgtcagttgcgactgcctctcaggagctaattaatggctccaccagtagctaccctgaaatgtggttaggagctagcacaagcagtgctagctacgtcaatgaactgtcctctctagttgagatgggcggcgttggcacttctaaccaccacgaatccgcaaggctacaggtcgagatcgctgacatggaggtgttcaaggacgagaagaagcgggtggagaaccttagaggagtcaagttggtgaacacagtattccatattcgatacagactgtatacagatacagttcttgcatgcactaactcagagctagattgcaggagaagccggtcatcgcatgaccgatcccactgacgtaggcggcatcgacactgccccgatcttctcgcaatctcaacctgacgactttgctgctggtttcgacgacgtcaaccctaatgcatctttcgatctgtacgagaaggttgacgtcaaccacaggctattcgtttcaagggtcgctgcggcgaagacattcttccaccgcattgagccatcgaagaaggtcagcttccactcgaacccggcagcaaccgccgtcagtaaggcgaccgagaagttccatttccccgttacgaccaaagttagtggtaggataatgggcattgccctctctgcc

SEQ ID NO: 12545 - DNA, 2901 bp, Oryza sativa
  Clone ID: TFbOSC401213j.C1.o53.fg
atggcaaggcttgttacagttgcagctgctaaggtgaagggctcagcttccagatttcgatacgtttgtagtactcctagaacactggatcagccatggattatagctggtggaaaggtaattgctacaaaaataagaaatgcaactcagcttctgagttgtaaacttggagaattggttccagaagcatggagggaatgcccaaactgcaaatgtcacattgataatagcgatgttactttacagtggccagaattccctgacggtgttaaatttgatccatctgatcttgaagtacttgaacatttagaaagaaaaattaacctgggaaatccagggcctcagggtcttattgatcacttcatcccaactctagaaaaggtggaaggaatctgctatacacatcctgaaaatctccccggtatcaagctggacggcaccagcagccatttcttccacagaatatcaaacgcatatggttctggtcagcgcaagcgtagaaagataagccacaccggccatgctgcttctgacgagaacataagatggcacaaaactgggaaaatccaacagatttaccataacggtgtcttaaaaggatggaagaaaatactggttctttacaaaggctccaaaaagaacaagatagtacaagctaattgggttatgcatcaatataatcttggtgtggaagaaggcggggaggacggagagcttgttgtttccaaggtattctaccaattatcctccaagcaaactggcacgcctgaaatggactctgttactgaagaagcatctgatgcactgaccataagaagtgatcccattacacccataacgaaccctccgctgcctcgctgcctgatgaacagcccgtgtgacacggagcagaatggcaccatttcacatgatcaggagggggaatgcagcacatccactctccggcccatggtagaagctggaaaccgtgcagggtgttctgctggagcgtcaacagccggggacttcaacgaagatctgctgcagcgctgcgagtttccggaggaccccgtcccaactcttgatgacacgctgccttttctttacacggacgaaacggaccttttcagctgggaagattttcaattcgggtcgcaggaaagcttcggctgggtggatggggatcacactcttgttcagtttctgtacctctgcatgtgggaccgccttttggtagacgatctgctgagagaaaaatcaataccattgcccaactctgtagaaaactcacgaaaaaccctcctccgaagtccccaattccacatggcgccgcccacctccgccgccgccgccgtcgcggcggccgcccgcgcctcgccgacgtcggcggcggcgctcgcgctcttcaagtcggtgctgtccgcggacaaggcgctctcgccgctcgccgtgctcccgcacctcgacggcgcgccgtcctcgctgcccaacctcctgctcaccgcctccgccgccgtgcgcccccacgccacctccctccgcctctactcgcggatgaagtccctatccctccccatctcgaccgcctcgctccacccgctcctctccgccctcccctccgccccggccttcgccctcttcgccgacatgttccgcctccgcctcccgctctgcaccaccaccttcaacatcatgctccgccacctctgctccgccgggaagcccgcccgcgcgctcgagctcctccgccagatgccccgcccgaacgccgtcacctacaacaccgtcatcgccgggttctgctcccggggccgcgtccaggcggcgctggatattatgcgggagatgcgagaacgcggaggaatcgcgcccaaccagtacacctacggcacggtgatctctggctggtgtaaggttggccgggtcgatgaggcagtgaaggtgttcgacgaaatgctgaccaagggagaggttaaaccggaagctgtgatgtacaacgccttgattggtggatactgtgaccagggtaagctggatactgcgctcctttaccgtgatagaatggtggagagaggggtcgcaatgacagtcgcgacctacaatttactcgtgcacgccttgttcatggatgggcgtggaacagaggcatatgagttggtcgaggagatgggtggaaagggtcttgcgccggatgtgttcacgtacaatatattgataaacgggcattgcaaagagggcaacgtgaagaaagcactagagatttttgagaatatgtccaggagaggggtccgtgcgacagtagtgacctatacggcattgatatatgccttgtctaagaaggggcaagttcaggagacagataagctgtttgatgaggctgtaaggagaggcattaggcctgaccttgtcttgtacaatgctctgatcaatagtcactccacttctggcaacatcgatcgagctttcgagataatgggtgagatggagaagaaaaggatcgcaccagatgatgtgacctacaatacgctaatgagggggctgtgtctactgggacgtgttgatgaagcgcgcaagctcattgatgagatgacagagaggggaatccagccagaccttgtcacttataacacgctgatcagtggctacagcatgaagggtgatgtcaaggatgctctgaggattcggaatgagatgatgaataaggggttcaatccaacgcttttgacatataatgcgctgatacaggggctctgtaagaatggccagggagatgacgctgagaacatggtgaaggagatggtggagaatggcatcacccctgatgacagcacatacatctcactgattgagggtcttaccactgaagacgagcgtgccattgatgatgagcgactggctgcagcagatgctgcgaaagtatga

SEQ ID NO: 12546 - DNA, 702 bp, Oryza sativa
  Clone ID: TFbOSC401601j.C1.o17.np
tgatcttttcttgtgtgagatatggaggagagaaatgatgtcaacatggacaagtcagatgagatcctcctgcctggattcaggtttcatcctacagatgaagagctggttagcttctatctcaagaggaagatccagcagaagcctatctccattgagctcatcaggcagcttgacatctacaagtttgatccttgggatctcccaaagcttgcgagcacgggtgaaaaggagtggtacttctactgcccgagggaccggaaatatcgcaacagcgtgaggccgaaccgggtgacaacagctgggttctggaaagccacaggaactgacaggccaatctactccactgagggtaccaagtgcataggcctcaagaagtcccttgtcttctacaagggcagagctgcaagagggatcaagactgactggatgatgcatgagttcaggcttcctacgctcaccgatccatcgctcccgaagaagccgattgacaagaacattccgctcaacgactcctggacaatctgcaggatcttcaagaagaccagttccatggcacaaagggcactctgtcagacctggggagctcaattgcctggaacaattgatccagacatcttctctacattgcaatctgtgcaagcttcacagtttgccctggagaaaactcaaaaggtaggtctctcacatgctaaacatcat

SEQ ID NO: 12547 - DNA, 1002 bp, Oryza sativa
  Clone ID: TFbOSC900037j.C1.o9.fg
atgtcgatgatgagcttcttgagcatggtggaggcggagctgccgccggggttcaggttccacccgagggacgacgagctcatctgcgactacctggcgcccaaggtcgccggcaaggtcggcttctccggccgccgcccgcccatggtcgacgtcgacctcaacaaggtcgagccatgggacctccccgaggtggcgtcggtgggcggaaaggagtggtacttcttcagcctgagggaccgaaaatacgcgacggggcagcgtacgaaccgagccacggtttcggggtactggaaggccacggggaaggacagggtggtggcacgaagaggggcacttgtggggatgaggaagacactggtgttctaccaggggagggcacccaagggaaggaagacagagtgggtgatgcatgagtacaggatggagggtgtgcatgatcaacaagcttccagcttctcctccaaggaagactgggtcctgtgcagagtcatctgcaagaggaaatcaggagggggtgcaacctccaagtcaagaagcctcaccaccaccaccaccaccattgtccatgacacatccacaccaacctcctcaccaccattgccacccctcatggacaccaccctagctcagctccaggcctccatgaacacctcctcctcctccgccatcgccgccgtcgccgcacttgagcaagtgccctgcttctccagcttcagcaacagcattgccagtaacaacaacaacagcaacagtgctactgtcaatgcacagcaatgctacctgccaattgtcacaggtagcaacaacaatggcatgagctacctggatcatggcctgcctgaatttggcagcttcttggacacccagagctgtgacaagaagatgctcaaggcagtgctgagccagctcaactccattgggggtgaggtgttgccaggcctgcctcctccatctgaaatggctgctgctgtcagctcttcttggatgaatcacttctag

SEQ ID NO: 12548 - DNA, 495 bp, Oryza sativa
  Clone ID: TFbOSC401231j.C1.o1.fg
atggagatgacgatgtcgtcggcggcgacgtcgctgccgccggggttccggttccacccgacggacgaggagctgatcctgcactacctccgcagccgcgccaccgccgggcagtgccccgtccccatcatcgccgacgtcgacatctacaagttcgatccatgggacctgccatcgaaggcggtgtacggggagagtgagtggtatttcttcagcccgcgagaccgcaagtaccccaacggaatccggccgaaccgcgccgccgggtcggggtactggaaggcgacgggaaccgacaagcccatccacgacagcgccaccggcgagagcgtcggcgtcaagaaggccctcgtcttctaccgcggccgccctcccaagggcaccaagaccagctggatcatgcacgagtaccgcctcgccgccgaccctctcgccgccgccgcaaacacctacaagccctcctcctcctcccgattccgcaacgtctccatgagg

SEQ ID NO: 12549 - DNA, 1041 bp, Oryza sativa
  Clone ID: TFbOSC401231j.C1.o13.fg
atggagatgacgatgtcgtcggcggcgacgtcgctgccgccggggttccggttccacccgacggacgaggagctgatcctgcactacctccgcagccgcgccaccgccgggcagtgccccgtccccatcatcgccgacgtcgacatctacaagttcgatccatgggacctgccatcgaaggcggtgtacggggagagtgagtggtatttcttcagcccgcgagaccgcaagtaccccaacggaatccggccgaaccgcgccgccgggtcggggtactggaaggcgacgggaaccgacaagcccatccacgacagcgccaccggcgagagcgtcggcgtcaagaaggccctcgtcttctaccgcggccgccctcccaagggcaccaagaccagctggatcatgcacgagtaccgcctcgccgccgaccctctcgccgccgccgcaaacacctacaagccctcctcctcctcccgattccgcaacgtctccatgaggctggacgactgggtgctctgccggatctacaagaagtccggccaggcgtcgccgatgatgccgccgctcgccgccgactacgaccacgacgagccgtccggagtccttgacgacgcctacagcttctacgcgccgccgatgatcagcaccacgctcatccccaagctccccaagatcccctccatctccgagctcttcgacgagcacgcgctcgcccagatcttcgacgccgccgccgacccgccggccgaccaccatcagcatgccctcgccgtccacccctccctgaaccagctcctcggcgtcggcgacaacttcctcgcggagtgctacccgtcgacggcgtccacggccaccgttgccggcggcaagcgcaaggcgagcccggccggagactacgccggcggcggccacacgccggcgaagaggctcaacggctcatgcttcgacgtggcgccgcagtccgtggtgggcggcttgcaagcgacgccgtcgtcagtcctcgccggactcaaccaccagatgcttcctcctcagctattctga

SEQ ID NO: 12550 - DNA, 1413 bp, Oryza sativa
  Clone ID: TFbOSC900046j.C1.o19.fg
atggcgaccaacctccaccttctcctcgagctaggattccgcttcaacccctcaccggaggaggtcgtcacctactacctcccacgcctcattgccggccacccgcccaaggacaccgagtcctgcatccaccgagccaatgtctacggcgccgagcccagggagctcgcagcccagttcgcgcccgtggcgaggagctccaatggcgaccggttcttcttaaccgagtgcaagcggatcaaggggaaggtctctcgcgtcgcaggcggtggcagctgggtctctcagaccagcaaggatatcaagaacagggaggggatcaaggtcggggaagccaagaatttccgcttcaagaaagatggcacgaacacggattggttgatggaggagtaccacctctgcctccgacaagccagcgatctcgagcccgtcctctgccgggtgtacgtctctcccagggcggccaaagattcggcggcgcaccaagaatccgccgctctcacgccccaagaacctgcgccgccgctggctcatgctcccgcaccggctccgattcaagaaccagccgctctgcctcgtcaagaactcgcgcctgcgccaccacgtctcgaggccgtgatcacgcagcagcaagcgaccatgaagatgggaggttctgtcccggcaagcaaggcgacgcgccagagttgcgtgacggcgtccgcgccaccaccgcgacgtgtggctccgcaaccggcacctccgtcactgcgtactgcaccggcggctgttgcgccgccacggcaagtgcccgtgatcacgcagcagcaggcgcctcccctgaagaggcccgccccgccggtcccctcgccgccgtgcgccaagaagatcagaggacctgtctcggcaagcccggcggcgcgccagagctgcgtggcggcatccgcgccgccgccatggtgtgtgcctccgcctccgcgaccggcaccaccgtcaaggcgcgtcatggcgccactgccgccttatccgatggatccgttcgagacaccaccgtcgcctcatgcacccaggcatgatccgttcgagccaccaccgtcgcctgatccacccatccagagctatgcgatcgatccacccatccagagctatgcgatggatccattcgagcaaccgccgtcgccatacgcaccacatggcgttgatgacatggacgagtttacgagatcgctggaagctcagctagaagaagccgatggtgatgaaattgctgcagcgactgttgctcctcccatggcacaaaacgttgcgcccgatgacgacatggacgagtttacgagatcgctggaagctcagctggaagaagcagatggtgatgacaagattgatgatgatgagattgacgaggaaattttccaaattccgctgaaggactaa

SEQ ID NO: 12551 - DNA, 759 bp, Oryza sativa
  Clone ID: TFbOSC400590j.C1.o15.fg
atggcgatgacaccgcagctagcattttctcgcatgcctccagggtttcggttccagccgacggacgagcagcttgtcgtcgactacttgcagaggcgtaccgctgcgcagccatgcgttactcccgacatcaccgatatcgacgtttacaacgtcgacccgtggcagcttccagccatggcgatgtatggatcggatcatgaccggtacttcttcacgatggcggcccgagaggcgcaggccagacgaacgacaccgtcgggtttctggaagcccaccggcacaaagaagacgatcttcgtcgtcgccggtgggcatgaggtgcccaccgccgtcaagaggaggttcgtcttctacctcggccaccaccaaccatcgggcagcaacaacaacaacaaaacatcatggatcatgcatgagtaccgtctcatgaactctccaagagcggcagtgccgtcgtcttcttcggtgaatcgtcttcccactgatgatctcacggaagagatggtgctgtgtaggatctccaacaaggacctgcctaaaccacccttcatccacaacagcttgttgcagttctcttcagtggggttgaatggtgatgggtataattacttgatccttgatcaccttgagcctccagcaatggagtatcctaatgttggcattggtaatgttgatgatgctgctgctggtactgatgatccgggtgaccttgatgaggagattgatgatagcatgcaaagaaaccatggtggctag

SEQ ID NO: 12552 - DNA, 1113 bp, Oryza sativa
  Clone ID: TFbOSC400934j.C1.o72.fg
atgacatggtgcaacagcttcaacgacgtgcgcgccgtggagaacaacctggccaccgccgccgccgtggccgcggccaagaagcagcagcagcagcagcaggtctcccagcacgtcaacctcatcaagacctgcccctcctgcggccaccgcgcgcagtatgagcagagtcagttgcaggcagcggcggcggcgacgatccaggacctgccggggctgccggccggggtgaagttcgacccgacggaccaggagctgctggagcacctggaagggaaggcgaggcctgacgcgcggaagctccaccccctcatcgacgagttcatccccaccatcgagggcgagaacggcatctgctacacccatcccgagaggcttccaggcacccgtcagccgtcaggacattggaactggtcaactggatactacgattacgaagccactcttgttgtgttgctgacctgctgttgcatgcatgcacgagtcggcaaggacggcctgatccggcacttcttccaccgcccgtcgaaggcgtacacgacggggacgcggaagcggcggaaggtgcacaccgacgagcagggcggcgagacgcggtggcacaagaccggcaagacgcggccggtgttcaccggcggcaagctgaaggggtacaagaagatcctggtgctctacaccaactacggcaagcagcgcaagccggagaagaccaactgggtgatgcaccagtaccacctgggctccgacgaggaggagaaggacggcgagctcgtcgtgtccaaggtgttctaccagacgcagccgaggcagtgcggcggcggctcggcagcgacggccaaggacctctccgtcgacctcgtcgccggtaacaacatcaaggctagcaatgctgctgctgaacaccaccataacgacggcgtcggcggcggcggccacggtggcaacaacagcagcatgctgaaggaagctgcaggcattgtagatttctacaacccagcggcggcgctaatcggctacagccaggcggctcctaacaacagggcggctgcttctgctcatttgacgatgcctaactttgaggtgcacacaggaggtgcaggctttggcccctga

SEQ ID NO: 12553 - DNA, 1518 bp, Oryza sativa
  Clone ID: TFbOSC400431j.C1.o21.fg
atgtacacctctcccacactccttgctctctcgtttgctcttctactgctcatcctcctcctctactactcgtcctctttgctctattcacagctagcaacaagaaggaggcttacacatgcatgtgcacggtctctgccggacgcatatgaatcaggcatgaatagggggcacatcagcagctcggagctcatcgacgccaagctcgaggaacgccggatctccacggccaagcactgccccagctgcggcaacaagctcgactgcaaaccggattgggtggggctaccggcaggagtcaagttcgatccgacggaccaggagttgatcgagcacctcgaggccaaagtgagggaagaaggctcaagatctcatcctctcatcgatgagttcatacccacgatagaaggggaggacggcatatgctacacccaccctgagaaacttccaggtgtgacaagggacggcctgagcaagcacttcttccaccggccgtcgaaggcgtacacgacggggacgaggaagcggcggaagatccagacggagtgcgacgtgcagaagggggagacgaggtggcacaagaccggcaagacccggccggtgatggtgagcggccggcagaaggggtgcaagaagatactggtcctctacaccaacttcggcaagcaccgcaagccggagaagaccaactgggtgatgcaccagtaccacctcggcgacctcgaggaggagaaggaaggggagctcgtcgtctgcaagatcttctaccagacgcagcctcggcagtgcagctggtcctccgaccgcggcggcggcgccgccgccaccgcatccgccgtgacgacggcggcggtgcagcaggatcagcagcgcaggagggacagcggcagcggcagctgctcgtcgacgagggaccacgaggtgtcggcgacgtcctactcgacggccgggtacgccgtcgccgccgccgtcgagatgcagcatttgaagcatgccgccgaccatttcagcttcgcgcctttcaggaagagtttcgaggaggttggtataagtggtgatcaggtacactccaatcagcttgggaggtcggagcagcagcatgctggccaggaacaacagccgcaccggccgttgcttgcaaccacgacggcggtgcctgccacggccttcctgatcagccggccgacgaaccctgtatcaaatatagtgccaccagcaatgcagcatgcatctgtcgttcttgatcatgatcagttccacgtgccagcaatccttctccaccacgacaaatttcagcagcagcagcaacaaaagcttgacaggaggtctgccggcttggaggaactgataatgggctgcacgtcttcgagcacaaaaggagtagtatatacatgcacgttcaggaagcttcaattcctcactcccaagagacagaatggccttaccagccatactggactcctgacaaccaggatcatcatggatagtagcaacaaggctgcttttgatatgcattag

SEQ ID NO: 12554 - DNA, 1338 bp, Oryza sativa
  Clone ID: TFbOSC401826j.C1.o36.fg
atgaacaggtacgacaacaacgggcatgcggcagcggcggcggcggctgcggtggcgggaggaggaggaggaggaggagggaataaggcggcgggggaggtagatgggcatgaggatgacctggtgatgcccgggttcaggttccacccgacggaggaggagctgatcgagttctacctccggcggaaggtggagggcaagcgcttcaacgtcgagctcatcaccttcctcgacctctaccgctacgacccctgggagctccccggaattgagcatctaattaacaagctcgatgggggtgcagcaatggcggcgataggggagaaggagtggttcttctacgtgcctcgggacaggaagtacaggaacggggaccggccgaaccgggtgacggcgtcggggtactggaaggcgacgggggccgaccggatgatccgagccgagaacaaccgccccatcgggctcaagaagacgcttgtcttctactccggcaaggcccccaagggcgtccgcagcagctggatcatgaacgagtatcgccttccccccgccgacaccgaccgctaccacaagactgaaatctcactatgccgcgtgtacaagcgcaccggcatcgacgacggccatggccaggtatccacggcgcggtcgtcggcgcactcccgcggcggcggcgcggcaccggtacaggacaacaagcaaggctcctcgtcgacgtccacgccgacgccgcctccaactccgtccaagctccacctcctcagcagcgagtgcacgtcgccgcccgccatcgtcacggaccacgccgccatggtggcgcacaaggcaccgtcgccgcggcaccatcagcagcagcagcagctccacgctgccaagccttgcggcggctacctgcagaattcctcgatggcttccgctgccggcggcgatcagcagcagcaatttcagcaagacttcgcggcggcattgtaccagcagtactccaagaacacgagcggtgccttcgcctccacgtactcgctgctcaacctcgtcaacgcggcatccatgggcagctccgccgctgccattgatgagctgagctcgctggtgggccacggcacgccgtcctacattaaccccgcggccggcagccacaactatagtcaattccttcacctgcctacgacgccgtcgtcgcatcaaccaacgccggcgccgctcgggacgacgacggcggcagcggcggcgacgctgccgatgtcgctcgccgccttctccgacaggatctgggactggaataatccgatccccgaggccggaggtagggattacagcaccagtactggattcaagtga

SEQ ID NO: 12555 - DNA, 1098 bp, Oryza sativa
  Clone ID: TFbOSC1203j.C1.o9.fg
atggcggaagaagatgacaagaagcagaagggccccgacgtgacggtgccctcgggatacttcttcgtgccgaagccggagcagctcatccgcgactacctcaaccactggatcaccggccggccgatcgaggagctccgggacatcgtccgggaagccgacgtctacggctccgacccggcgacgctgacggaggcgcatagggcgtacggccacgacggcaagtcgtggtacttcctcaccgtcgccaagtggaagggcggcaggggcggcgccggcaccgccggccggctcaaccgctgcgtcgagggcggcggcacgtggcacaactcgcagcgccgccgcgtcatcgagggctacggcgaccgccaggctttcgagtaccgcgcccccgggaacaagaagacgaactggctcatggaggagatcgccagcaacctgccggcggcgatcaccgacgagggcatcatggtcatctgcaaggtctacctctcgccgagggccaaggaggcgacggccgacgaggaggaacgccaagaaaccaacgtggttcccgggcccaagaggctccgagaggcggaagccaccggctacgacgcgccggcgccggagacgccacagcccgacgtcggatgctcgtactccggcggcggcgagacgtctcaagcgaccgcctcgatggactactgctgctcgacgacgacacacacggcggacgacacggccaatgccgccgcctactactacggcgacgttgatgccatcaagccagatgcttacgacggcggcgactacggcatcggcatcaacgcagacggggagctggttctctgcggcaacggccacggtggcatcgggacgcagggacagatgccattggcaatgcagaacaccaacggggagatgaccttgttctcaccgatgaacggctatggtgttggcttcaatgaggaggtgagacaagaaccacaagtaggaggtgaggtggagatgaatgatttcttcaacgatttgttcgtcgacttcgacggcgccggtgatcccaatcccaatcccaacgagggtggagacagccacggccacatactatgtgaatga

SEQ ID NO: 12556 - DNA, 1031 bp, Oryza sativa
  Clone ID: TFbOSC401589j.C1.o15.np
tttggttgtcagcatgagttggtcgttgagcttgagcatggtggaggcgaggctgcctcccgggttcagattccatcctcgagacgacgaactcgtggttgactacctctcccggcggcggcgccgccggcgccggctgcccgacgccgacactgatcgacgtcgatctcaacaagtgcgagccatgggacctcccagagattgcttgcattggagggaaggaatggtacttctacaacctcaaggacaggaagtacgcaagagggcaacgaacaaacagagcgactgaatcagggtactggaaggccaccggaaaagaccgggagataacccggaaagggtccctggttggcatgcgtaagacgctcgttttctacagagggagagcccccaagggtgagaggactgattgggtcatgcatgagttccgtcaagaattagaccatgccaatcaccatcatcatctcaagtacatgcaggagggttgggtgctgtgtagggttttctacaagagcaggacagaagctgttgcagcaccaacaatggagtctactcttcctcctcgttacatcaatggcggcacatcaagatctccattgccacccctcgttgacagctcgatctccttcaatcatggaggttatgaggaagttcttccctgcttctctagctctcatcaccagcagccatcgccggcgtcgatgaacgcgtcggctgctaaagcaaccctccctcgacctctactaggaaaggaaaggaaacaaacacaaaaggggaagtatatgggcctcagcttggcccatgtaaagtttttgcataggcctcctgagcggcccaactactacacttggactctttctctctcattccactctgagcggaactcttcttgctcgccaccgccgccggcgaaggggatcgatcggatgggaacgtcggtgcaggtgactccgttgagtggggcgtacggtgagggacccctctgctacctactcgccgacctagtgttaggtcaaagatgttgggcatgc

SEQ ID NO: 12557 - DNA, 1095 bp, Oryza sativa
  Clone ID: TFbOSC401196j.C1.o76.fg
atggatggatctagtatgagcagcagcagcacgcagcagcaggcgcaggttcctcctggatttcgtttccacccgacggacgaagagctggtggattactaccttcggaagaaggtggccgcaagaaggattgatctcaatgtcatcaaggacgtcgatctctacaagattgagccatgggatctgcaagagcgttgccggatcaatggcgggtcggcggcggaggagcagaacgaatggtacttcttcagccacaaggacaagaagtacccgacggggacgaggaccaaccgtgcgacggcggccgggttctggaaggcgacggggcgagacaagcccatctacgccaccaagcagcacagcctcctcgtgggcatgaggaagacgctcgtctactaccgcggccgcgcccccaacggccacaagtccgactggatcatgcacgagtaccgcctcgagaccaccgagacggccccgccgcaggaagaagggtgggtggtatgccgggtgttcaagaagagattacccacaacaagaagagattcagaccatgacgcaccttgcggcagctggtacgttgatgaagatgcaccgggcgccttcatgtctccgatgatgatcaccagatcatcaatattgcgcccacaccaacaccacgccggcatcacgctgcaagagcaacacctccacaccacttacaagcacagagacctcactactaagattcagcagctccaagtccctgcggcaggccatcatctcctcaacaccatgccccatgacctggagagttctacttcctccttccattctcttttggtctcacctgatcaccaccaaatcaacatgcaccatgctcaggctgatcccttctttgacgacatgcatgcagtcgatcaagccactaccactgactggagagttcttgacaagtttgttgcctctcagcttagcaatgatgctacaaacaagcctgcggatcattatactgatgaaggagacattcttcaggtcagtgacaagcagcaagaggtggcagccgccgattatgcgtccacatcaacgtcaagcagccaaattgatccatggaagtga

SEQ ID NO: 12558 - DNA, 723 bp, Oryza sativa
  Clone ID: TFbOSC2467j.C1.o1.fg
atgcacctccccgctgtgggcatgtcacaccccaccgagggtgagcttgtcttccactacctctatcgtcgtgccgttaacatgccgctgccctctgaattcatttgtgatgtcaacgttcttcctcataacccatgggacatcgtcccaggctcagaaaagccagtctactacaaccagggaggtggcagcgactgcatgctggtgggaatgaggcgcaccctaacattttactttgggaattcacggaccgcagagcgcacaaaatggggtatgcaagaatttcgccttgctggcaatggtctttcgccttaccctgcgatgaagcatgccaccggggatggctcaaaaccaccctgcaactgtgccgaaacaaccatcgccaagagaaatgatggtctctctgcagttcttcgtaatgtgctcgccgtcaccccccttgtggaaaccgttgtcgaacctgatggatcatggctgatctgccgcatctacaggacaaggcagcgtgcattgcctgttatcactcctcctgccatagaaaatgcaagggaaatcattatccctcctgccaatggcaatgcaagggaggctcaagtccgctttattgacttcctgcagcagggatcgcacattgagtcatcctccccctgtagttgtatagttggcccctctttggcagagggaagtgatgaatctgctggtagtgttgaccaaaaggattga

SEQ ID NO: 12559 - DNA, 873 bp, Oryza sativa
  Clone ID: TFbOSC401137j.C1.o28.fg
atgtccccctcccgccccgacgaggcggaccccgccgccgacttcggctcccaccccaccgaccaagagctcgtcaccaaatacctacgccgccacgtcgactccggcgggaacccgtggcggtacgtccacgaggccgacgtgtacgccgccgatcccgacgacctcaccggcaagtactccccggccgtcgccagcgacgggtccagggcgtggtacttcttcaccaccgtgcggtccaagagcaccggcgggcagaggagggcgcgggccgtgggcgacggcgggtgctggcactccgaggccggcgccaaggacgtcgtcggaggcatccgcagcccccgcccgatagggcggcgccagttcttctcgttcgtcaacaaggagggcccccggcgggtgcggtcggggtggatcatggtcgagatcggcctcaaatacgcccagcagaacgcctcctccgacgagcttgttctgtgtaaggtgtaccggagcccgcgggcgccaccggctgccgccgccgccaacaaatccatggccgccccacctcccaccgccacgaaatccaagacggaggaggctacaccacctcccgatgacgtgaaaccggtggtggcggctgcgcagactcccgacaccaaaatactcagggcggcgaaggaggcggccgcgactggatgcaagaggaaggccgacgtgaagagctctggtgcaagaaggggcaagcggctctgctcccgctgccgggcggagacatcggaatcggacagcgagacggcggtacttgacaggtcgccgtccatcgaagacgaaacggcggactcttcagaaatccatggaagcagtgatggcaaattcatcaggttcttgtga

SEQ ID NO: 12560 - DNA, 528 bp, Oryza sativa
  Clone ID: TFbOSC33262j.C1.o5.np
tctaaaaggcaatgtgcagtgcacaacaagagcagcaactgctcgtcagtggccaagccatgcagatggtactgggcggcgctcgcggccgagctgggccagccttcccgctcgcgccgcgcacgcctacgggataaagaccgcgccgctgctggccttctacgcctcggccagtctggcgctcgtggcgctgagcgtcggtgtttgctcgccggagaagaagctggtggtgccggagagcgtgtgcgggcggccgaccggccgctggggctgtagttccaccacgcctccggcgacctgtacgtggctgacgcgtacctgggcctcctgagggcgccggtgcgaggcgggctagccgaggtggtgacgacggaggccgccggcgtgccgttcaacttcctaatcatgtaatcttccattgggttctaataatttacaaggtcgtagtgctgcactatgagttagctgttctcaaccctttctgaaatggatttttttctgagttctcatggactagcttacagttca

SEQ ID NO: 12561 - DNA, 1245 bp, Oryza sativa
  Clone ID: TFbOSC401927j.C1.o13.fg
atggcgtgtgcagagacgtatatcgagaacatggaggacagatgcatctacttctttagcaggaggctattcgcagcgaaggctaggaacaagaggcagccgatgagggtggcaaacggtgggacgtggaaggcatctggtgggagcaagacggtgaggagcaagaaggttggcggcatcgatgttggtcagaagctcaccatggtgttctacgagcgtaggttcgagggcgaccaaaaccctgtcaagaccaactgggccatgcacgagtacaccaagatcattcctagctccaaaaaccagtgtatttacaataaggaaggaggacacagagccggtgaacgctgccgccgcggcgtcgagcacggacaagccctccacgccggaggcactgccaccgcctacgccaccgccacggccattgctgaacatggccggatcatcgtcggcaacgtcgctactgccaccgcaattgccaggcctggctgggtcgtcgtcgacgatgccgctggcactgccactgcagctgcctggcctgcccgggtcgtcggcggcgatgtcgctctgccgggcttggctggagagatgacgtccatggcggaccaggcgaacatggcctcgacgtcacaggcgtcagcaccgtcgtcggagctcccgcaggactggtacgacgagtacgaggtcgcgtacggtgccgcggcgccgccgtctcctagcacgatcagctgcgcggcgctgccgagctcgccgacggcgtggtggccgtcatcgatcggcgggccggtgcagcacgacggctacctcgggatggcggatcctgcgtcgtgtaatacgttggaacacctgttgcccagcgcggcgatcccaccagagccaatggcgccgccgaagaactcgccggcggcgccaccaccggccgacgccggcggcaactacgaccacccggagctcgccgactacggcggcggcgtccaggcgcagcacgagcatcatcagccgcaggagctgacggatggcgcggacggcgacgcacagctagagctaggcgccgcggagtttgattccgaacgagtagccgaaatgatatcccaaataatggatggtgaattcgtgtttaaatttgaggacgacaccattgttagcttcaacgaggtggcggcggcgccgatgttgatcgacggcggtggggacggcgacggcgatggtgcagatggaggtgtcggagatgatccattcgataattag

SEQ ID NO: 12562 - DNA, 396 bp, Oryza sativa
  Clone ID: TFbOSC412891j.C1.o1.fg
atggacgacgacgagatcgctctggagccaggctacgctttccgcccttccgacgacggcctcatcaccctcttcctccgccccaagatcgccaagatccccttcgagcaccgcctcatcaaccacgccgacgtctactccgccgatccgacggagctcgtcggcgagcacagaccggcgccgggaacccatgggagcggcagcgtctggtacttcttctgctccccgcgctacaccagcaagcgcaaggcctccgggaggcggcagcgcgcggtcggcggcgagagcgtgtggaagtcggagggcggcaagaaggccgtgatcggcgccgatggccgccgcgtcgggtacctccagaagttctcctatcactacactggtcaaggtcacctgtga

SEQ ID NO: 12563 - DNA, 1008 bp, Oryza sativa
  Clone ID: TFbOSC14633j.C1.o4.gm
atggacgccgtcgagacgcggcatggcgagtcggccaggggaaaaggtggagggacggtcatctaccgttcgcaagggcgcgtggcggcggtggcgaggtacaacgggttgggtagattccgtcggcagcggcaccccggactccggcagcgcgacagcggcggaaggacgacggtggctggccgggttggctcatctcgcagctcgccaggctggcttggcgaggtgcgcctggtagtggggacgacgacaagccgctggttcggcaacggtgtgaacagattcagcaatatcgaggttgccagccggcttgccttcgccgccgccgactggtgcctcgacctacacggctggtctattatgccgctgttgatgggcgtctacgtcttcaccgcccggccgtctcgtccgctgccgactggtgtttccgcctacacggctggcctattatgccgctgttgttgggcgtccacatcctcaccaaccggcttgccttcgccgccgccgattggtgtctccgcctacacggctggcctattatgccgctgttggtgggcgtccacatattcaccaaccggcttgccttcgccgccgctgattggtgtctccgcctacatggctggcctattatgccgtcgttattgggcgtccatgacctcaccgccagcctacctccatcgccaccgactggtgtttctgcctacacggctggcctattatgccgccattgttgggcgtctacgacttcaccggcctgtctctgtcgccaccgactggtgtcctcgcctatacggttggttggtcacaccaccgttcatgggcatctacgtcttcaccaaccggtttgcctttgccgccaccgactggtgtctctgcctacatggctggtctattatgacgccgttggtgggcatcttcgctttcaccgtcgaccgccttctttcgccgccgactggtgtcttcattgatccagatccagatatgcataaaaaggattcatggctttaa

SEQ ID NO: 12564 - DNA, 963 bp, Oryza sativa
  Clone ID: TFbOSC14633j.C1.o5.gm
atggcgggcgcggatgggctccttcccggcctcaggttcgaccctagcgacgacgagctcgtctcccgctaccttctccggcgcatccagcagaagcccctcccgctcgacggcgtcatcgtggatgccgatcccctgagcgtgccgccatggacgcttctcgcggatcacacccgaggcgacgaggccttcttcttcgcggaggcacgcgccaagaatggcaagggcaagcgacagaagcgaaccgtggagggcggagggttctggcaggggcagaggatggccgtggatggcgagcggctggtcgtcccaggcgacgatggaggcggcggcggcgacgaaggcctggagatcacgtggcgcaagtatgtgttgagcttcttcgccgagggtgaacggggcagctcgggctgggttatgcacgagtacgccgtgacgtcgccggctgacctcgcctcgtcgcagctccggctgtaccgcgtcaggttcagcggccacggcaagaagcgcaagagggagccgcagtgtctggactcccacgacgacgacgacggcggggatcaagaaagcgcgactcaccggcgcgccgtggctgagaccactctgttcgacggatacgtgcctcgtcctgcagccgacggcaccgaccagggcacctatggcgtgatcgacggcgaatcttcgctggcgtcacattgtcttcccgatcagatcgttcccccagcagaagaagctgatgccactgctggtgtagagaatcctctgctcgatgaggagcgctggtcaccaccacagcccgctctggtgaagcagaactcctacgacctaatggccatttcgtcactgctgttttctgatcttcccgacagaatcgatgacgatgacctgtctgtgtcgcaaacagagggcaccgatctgttcgagcagggctcctccggcgtgatcgacgacgattattgtcgg

SEQ ID NO: 12565 - DNA, 1023 bp, Oryza sativa
  Clone ID: TFbOSC407201j.C1.o2.fg
atgggggacgcgctgtgggagatgctgggggaggagatggcggcggcggcggcggcggccggcgagcacgggctgccgccggggttcaggttccaccccaccgacgaggagctcgtcaccttctacctcgccgccaaggtgttcaacggcgcgtgctgcggcggcgtggacatcgcggaggtggacctgaaccggtgcgagccgtgggagctgccggaggcggcgaggatgggggagaaggagtggtacttcttcagcctccgcgaccgcaagtacccgacggggctgcgcaccaaccgcgccaccggcgccggctactggaaggccaccggcaaggacagggaggtggtcgccgccgccgccgccggcggcgcgctcatcggcatgaagaagacgctcgtcttctacaagggccgcgccccgcgcggcgagaagaccaagtgggtcctccacgagtaccgcctcgacggcgacttcgccgccgctcgccgctccaccaaggaggaatgggtgatctgcaggatctttcacaaggtaggagatcagtacagcaagctgatgatgatgaagagcccagccagctactacctcccagtgagccaccaccaccccagcagcatcttccatgaccttcctccggtcccattcccaaaccctagcctcgtccccttccaccatgatctccccacaagcttccatcctccattgctgcagcacagccatgcgaacagcaagaacagcagcagcaacaatggcggcttcgtcttccccaatgagccaaacaccacaaacagcagcgataaccacatttcttgcaatggcgccatggctgctgctgctgctgctgcttttccttccttcagctgtgctagtactgtcactggcaaggggggcccaccggcgcagctcggagtcaacgccggtcaacaggagccaccgccacctacctggatggacgcttacctgcagcacagtggattcatttatgagatgggcccacctgcagtgcccaggggcgcatga

SEQ ID NO: 12566 - DNA, 963 bp, Oryza sativa
  Clone ID: TFbOSC401860j.C1.o15.fg
atgggagagcagcaacagcaggtggagcggcagccggacctgcctccgggctttaggtttcacccaacggacgaggagattatcaccttttaccttgcacccaaggttgtggacagcaggggcttttgcgttgctgccattggagaggtggatctcaacaagtgcgagccatgggatttgccagggaaggcgaagatgaatggggagaaggagtggtatttctactgccagaaggatcggaagtacccgacggggatgaggacgaacagggcgacggaggctggatactggaaggcgacggggaaggacaaggagatcttccgcgaccaccacatgctcatcggcatgaagaagacgctcgtcttctacaagggcagggctcccaagggcgacaagaccaactgggtcatgcacgagtacaggctcgccgacgcctctccgccgccgccgccatcctccgcagagcccccgaggcaggacgactgggccgtctgcaggatcttccacaagagctccggcatcaagaagccggtgccggttgctcctcatcaggtgcccgccgccgccaactaccagcagcagcagcagatggccatggcctccgccggcatcatccaagtccccatgcagatgcagatgccatccatgtctgaccagctgcagatgttggacgacttctccaccaccgcttcactctcactcatggcgccgccttcctactccactctgcctgcaggcttcccgcttcagatcaacagcggcgcccatccccagcagtttgttgggaacccgtccatgtactaccaccagcagcagcagatggacatggccggcggagggttcgtggtgagcgagccgtcgtcgctggtggtgtcgccgcaggatgctgccgaccagaacaacaacgccgccgacatctcgtcgatggcatgcaacatggacgctgccatctggaagtactga

SEQ ID NO: 12567 - DNA, 1131 bp, Oryza sativa
  Clone ID: TFbOSC400524j.C1.o1.fg
atggaagtggaagcaaggatacacctcctgttgatcaagctagtcttctataggagtgcagaagagcgagaatcagcctctgttcatattaacttgctaccagttcgggagctatactttgatccgcggaagaagatggacgcattctcccatgtcccgccaggttttcgtttccaccctactgacgaggaactcgtggattactaccttaggaagaaggtagcactgaagaagatagacttggacgtcataaaagatattgatctgtacaaaattgagccttgggacctacaagaacaatgcaagattggaaacgaggagcagaacgagtggtacttcttcagccacaaggacaagaagtacccgacgggcacacgcaccaacagggcgaccactgccggcttttggaaggccaccgggagggacaagccgatctatgtcaagaactgccttgttgggatgaggaagacgttggttttctacaggggccgggctcccaacggacagaagtcggactggatcatgcacgagtatcgcttggagaccaacgaatacggagctccccaagaggaaggatgggtggtctgcagggtgttcaagaagcgagtcgcggcggtgcaaagggcggccggcgacggcggcgactcacctttctggttcaacgagcacgtcgcgttcatggcgccggcgccaggcctcgactcgccgtaccatggccaccgccagagccacccttgcaagctggaggtagagtatcaccaccacctccttcctcaggaggcggcgccgttcatgcacctcccaaggctggagagccccaagctaccggccgccgacatcattgtcgccaccgcagcgtcgtccgctctccagccgtgcggccacacgacggcgcagcagctgcagctgcagatcgagccggtctacgtgacggccgatgcgtcggcagcagattggagggatcttgacaagctggtggcgtctcagttcggccacggcgactcgactgcgaaggagcccagttactgcaatccggtgcaggtgtttcaggtcgaggggaagcaggaggatagcttggattacgtgtccacgtctgcctcctgcggaggggaggaggatttgtggaaatag

SEQ ID NO: 12568 - DNA, 1113 bp, Oryza sativa
  Clone ID: TFbOSC401780j.C1.o17.fg
atggacactttctcccatgtgccacctggtttccgctttcaccctactgacgaggagctcgtcgattactacctgaggaagaaggtggcatcgaagaaaatcgacctcgacgttataaaagacgtcgacctgtacaaaatcgagccctgggatctccaagagaagtgcaagattggcatggaagaacagaatgactggtacttcttcagccacaaagacaaaaagtacccgacgggcacccgcaccaaccgggccacgggcgccggcttctggaaggcgacggggagggacaagcccatctacgcccgcagctgcctcgtcgggatgaggaagacactcgtcttctacaagggccgtgcccccaatggccagaagtcggactggatcatgcacgagtaccgcctcgagaccaacgaaaacggcaccacacctgaggaaggatgggtggtctgccgggtgttcaagaagcgggtggcgacggtgcggagaatggccgacggatcaccgtgctggttcgatgaccacggcgccgtcggtgcgttcatgccggacctcagctcgccgaggcagctactgccgcaccaccaccaccaccacccgggctcgtcggcggcgctgtaccacggccaccaccaccagcagctgcagcagatgtacggtcactgcaagccggagctggagtaccaccacctcctgccgcaggaggccttcctgcagcatcttcctcagctggagagccccaagccgccgccgccgcctcctgcggcggcggcctacattggcggccacctcggatcgtcgtcgtccaccgcccttactactcacgacgacgaagcctccggctccgccgcgcagcagcagccgccgtcgttggaggctgtttacatggccggcgccggcgtcggcatcggcgtcgacgcgtcggtgacggactggaggctactggacaagttcgtcgcgtctcagctgctcagcaaggagtccatgtccagctacggatcccatccggctcaggtgtttcaggctgcagacggtggcaagcatgaagaggctttggactacgcttcgacgtcggccggctccggcggcggcgaggctgatctgtggaaatag

SEQ ID NO: 12569 - DNA, 679 bp, Oryza sativa
  Clone ID: TFbOSC900198j.C1.o15.np
ctcaagttgatcgccggagcagcatcagcatcagcatcagcttcaccatgcggggatcagatcatcatcaggatgtcgtcgcggcaccgcggggcggtggcggtggaggagacgacgggcaggcgcacgacatggtgatgccggggttccggttccacccgacggaggaggagctcatcgagttctacctccggcgaaaggtggaggggaagcggttcaacatcgagctcatcgccttcgtcgacctctaccgctatgacccgtgggatcttcccgctctggcctcaattggggacaaggagtggttcttctatgtgccaagggaccgcaagtaccgaaacggcgatcggcccaaccgagtgacgccatcggggtactggaaggccacaggggcggataggatggtgaaggtggagggtgaccgtcctatcggcctcaagaagacgctcgtcttctacgtcggcaaggcgcccaaggggcttcgcagcagctggatcatgaacgagtatcgtctccctcatggcgacgctgaccgctaccaaaaggtagaaatttcgctgtgtcgagtctacaaacgcccaggaatcgaagacaactgtagtgcgatcgaatctcgatctacccgtcacttggccatttgcagattaattactagttctgcactactttaattgccctg

SEQ ID NO: 12570 - DNA, 1716 bp, Oryza sativa
  Clone ID: TFbOSC414191j.C1.o15.fg
atggacgtggaccctcctcctccgctgccgccgccaccgccaccgccaccgccgccggcgacgccgcagcagaacaaggcggtggagcttcctcccggcgtatacttcaacccgacgcgtgaggaggccatgcaccactacctcaaccggtggatcgccggcaagacgataccggagatggaggccgggttcgtcgccggcgccgacgtctacggcgacggccccgacgcgctgcggcggcggcaccggccgggatactggtgcaactgcgtgtacaagtggttcttcctttgccaccgcaagcgccagagctcgcgcaggaccaccggcaacaagcgcgccgagcgcgtcgtcgccgccggtgggcggtggaaggtggagcaggggaagaaggtgctcggcggcggcggcggcggcggggagagggacagcttagggttctactccagtaactccacgaagaagacgtcatggattatggaggagtacacgagctccgccgctgatggcgccgccgccgcccgcggcgaggaggacagaatggagcccgtgctctgcaagatctacctctcgccgcgcgcccccgccggcgagaagcgggcgctgttcggggaggacggcgtggcggtcgggcccgacggacgcaagaggaacgcccgggtgacggttctggcgacactgttcgacgacgtcgcggcactccttggacagccggtcgccgcgccgccgctgccggcgccaggcgaacagcttggccatggccatggccatttcgatgatgtagcggctcgtttcggacaggtcgccgtggcggcgctgccggcgtcgggcgatcttggccacggcgatttcgatgacgacgccgcggccctccttggacaggtcgccatggcgccggcgccggcgccgggacatcaccaacagggttatgtcgtcgcggaggcgccgctgccggagtcaggttatcttggccattatcaccacgacggccatctcgcgcaggcggcggcggcgccggagcaagatcattatcttggctatcacagtcacgacgcgcatgtcgtggacgcggaggcgacgccggagcaaggctatcatgacgacgcgcatgtcgcggtggcgccggcgccggagcaaggcgatcttggccatgaccaggggcatctcgcggcggcgctgacgccggaggaatgtggcgagatagttggcgcatacgaatttcacccggaaatggtgcagatgctgtccattggcttcgccgcgcccgacgaacagttgttgccgcagctgctagaccccaccggcggcggctacgacatggctagctccgccatcgccgccgttggcgacgtgaacgcatatgccgccgcggcgcccacgccgcgaattagacccaacgcggcggaggcaatggcggcgacggcgacggcagagacaatgccaccaccgctggacgccgtggcggccgagctatccgcgccgccgcgtggcttaccgccggagctcgctttcagtgccttgccgtcggtgcagcaggagccatcctgtgacgacggcgacaacttcggcgagctcgtggcggaggcgatgccgccgttgatcggggagaacgccggcgtcgatgccggcagcgacgagcctctgccggatttggccggcatcatgacggagttggattttggacatgactttttcagcaatcagcacagagaatga

SEQ ID NO: 12571 - DNA, 1512 bp, Oryza sativa
  Clone ID: TFbOSC5990j.C1.o1.gm
atgacatggtgcaacagcttcaacgacgtgcgcgccgtggagaacaacctggccaccgccgccgccgtggccgcggccaagaagcagcagcagcagcagcaggtctcccagcacgtcaacctcatcaagacctgcccctcctgcggccaccgcgcgcagtatgagcaggcagcggcggcggcgacgatccaggacctgccggggctgccggccggggtgaagttcgacccgacggaccaggagctgctggagcacctggaagggaaggcgaggcctgacgcgcggaagctccaccccctcatcgacgagttcatccccaccatcgagggcgagaacggcatctgctacacccatcccgagaggcttccaggcacccgtcaggacattggaactggagtcggcaaggacggcctgatccggcacttcttccaccgcccgtcgaaggcgtacacgacggggacgcggaagcggcggaaggtgcacaccgacgagcagggcggcgagacgcggtggcacaagaccggcaagacgcggccggtgttcaccggcggcaagctgaaggggtacaagaagatcctggtgctctacaccaactacggcaagcagcgcaagccggagaagaccaactgggtgatgcaccagtaccacctgggctccgacgaggaggagaaggacggcgagctcgtcgtgtccaaggtgttctaccagacgcagccgaggcagtgcggcggcggctcggcagcgacggccaaggacctctccgtcgacctcgtcgccggtaacaacatcaaggctagcaatgctgctgctgaacaccaccataacgacggcgtcggcggcggcggccacggtggcaacaacagcagcatgctgaaggaagctgcaggcattgtagatttctacaacccagcggcggcgctaatcggctacagccaggcggctcctaacaacagggcggctgcttctgctcatttgacgatgcctaactttgaggctcaagatgttcaaaggtggcttgccttgctcgagatctggagcttgatcctcgaaatcctcgcactgcgggctgagctggcgccgacgtggcgcctacgtggctgccacgcgggccggcgggaggtagacgacgacccggccgcgaatggacggcgggtggcggcggcgagcagcggagcgaaccacggtgatacaggcaaaagcgagcacaccgggcggctgcacgtgacaaggggagacgagccaacggctcggattcgtcggaggttgctcgacggcggcggattgcggcggcggcaaccggcggcgggagaagagggaaacggcgacgaggtcacgagaggtcgattcccggcggtgagagcatctacgcggcgtcgggaactcgacgctagcgtcggattgggcggaactacgccgagcgaggccggcgacgagcgggtgctacggagctcgggcggcgacggcggcgagcacacggcgagcgacggcaacagtcggggcggcgccggctaa

SEQ ID NO: 12572 - DNA, 879 bp, Oryza sativa
  Clone ID: TFbOSC400621j.C1.o20.fg
atggcaggaggcggaggcggcgaccgcgcgccgtcgtcgtcgtcgacggcgatgatctcgcgactcctgccgccgggcttccggttccggccgaccgacggggagctcgtcgcccactacctcgcccggaaggcggccgacgccggcttcacctccgccgccatccgcgacgccgacctgtaccgcgccgagccctgggacctcctgccgccgccgcgttgtgatgcggcggcggaggaggaggaggaggaggaggagcggtgcggctacttcttctgcacgaggagcttcaggtggccgtcgggaacgaggacgaacagggccacggcgaccgggtactggaagtcgacggggaaggacaaggcggtgctgcacggcggcggcggcggcggcggccgccccgtgggggtgaagaagacgctcgtgttctacagggggagggcgccgaggggcgagaagacgagctgggtcatgcacgagtaccgcctcctgcacggcggcgccgccgccaccgcctcttcttccccgacgccgacgacagttgtcgcccgcagtgagtgggtgatttgcagggtgttcgtcaggaagacaccagatggtaacaacgataggggaactacagaacatcatcttccctccgacgacgctcatctccgttcgtcgccggcgccggcgaactctgtggacggcgcaggccatgcgagctgcagcttcttctccggtgctaatgagtccatggcgccaagcgaccatttcaacataggagacgacatgatcctccatggccacgacgaggaggagttgctgatgatgaactgttcttcggcttttgatctgccagagcttctcgactacgagagcttctcgctggacctttga

SEQ ID NO: 12573 - DNA, 1278 bp, Oryza sativa
  Clone ID: TFbOSC12503j.C1.o3.fg
atggagagcccggactcgtcgtccggctcggcgccaccgcgagtactacggcggcaacagcagcagccgggctcggcgccggagctgccgccggggttccggttccacccgacggacgaggagctggtggtgcactacctcaagaagaaggccgcctccgttccgctccccgtcaccatcatcgccgaggtcgatctctacaagttcgatccctgggatctccccgagaaggcgaacttcggggagcaggagtggtatttcttcagcccgagggaccgcaagtacccgaacggggcgcggccgaaccgggcggcgacgtcggggtactggaaggccaccggcaccgacaagcccatcatgtcgtcggggagcacccgcgagaaggtcggcgtgaagaaggcgctcgtgttctaccggggcaagccacccaagggcgtcaagactaactggatcatgcacgagtaccgtctcacggacacgtctagctccgccgccgccgtcgctacgaccaggcggccgccgccgcccatcaccggcggtagcaagggcgccgtctctctcaggctggatgactgggtgctgtgccgcatatacaagaagacgaacaaggccggtgcggggcagaggagcatggagtgcgaggactccgtggaggacgcggtggccgcgtacgcgccgtcgtcgcagcagcatgccacggctgctgctggcatggccggttcggacggcgccggaggagttgctgcagcgcacggcggcgactacagttcactgctccatcacgacagccacgaggacaccttcctcgtaaacggcctgctcaccgcggaggacgccgccggcctctcgaccggcgccagctctctcagccagctcgccgcggcggcgagggcggcggcgacaccgtgcgacgccaccaagcagcttcttgctccgtctccaaccccattcaactggttcgaggcattccttccacgggccaaggagtttcctagtgggctaagcaggagtagcagagacatcggcgacatgtcgctgtcatcgacggtggacaggagcctgtctgaggctggcgccgtggccattgacaccggcgacgccgccaatggcgcaaacactatgcctgcatttatcaatcctctcggcgtgcagggtgcaacctaccaacaacaccaagccatcatgggtgcctcgttgccatcggagtcagcagcagcagcagccgcctgcaatttccagcatccgttccaactctccagggtgaattgggattcctga

SEQ ID NO: 12574 - DNA, 1101 bp, Oryza sativa
  Clone ID: TFbOSC400780j.C1.o51.fg
atggaatcatgcgtccctcctgggttcaggttccaccccaccgacgaggagctcgtcggctactacctccgcaagaaggtcgcctcccagaagatcgacctcgacgtcatccgcgacatcgatctctaccgcatcgaaccctgggatctccaagaacattgtgggatcgggtacgatgagcaaagcgagtggtacttcttcagctacaaggacaggaagtacccgacggggacgaggacgaacagggcgacaatggcggggttctggaaggcgacggggagggacaaggcggtgcacgacaagagcaggctcatcggcatgaggaagacactcgtcttctataagggcagggcgcctaatggccagaagaccgactggatcatgcacgagtaccgcctcgagaccgacgagaacgcgccgccacaggaagaaggatgggtggtgtgccgagcattcaagaagaggacggcgtatccggcgaggagcatggtggagacgtgggactactccttgcacgagcgcaacatcatgagcgccgcggcggcggcggcgttcgccgatccgagcgcggcgtacgcgcagatgaggcggcagcacaggagcgggcggttcaagcaggaggcggagctggacggcgccgccacagccctcctccactactccagccacctcgccgagctgccgcagctcgagagcccctccgcggctgcggcgccgctccagcccaacccgagccagctggccaccgccggcgaggacgacgactgcaagggcgataatggcggtaggagggccaagaaagcccgcgccgccggcgacaaggtggcgacgaccacggactggagagcgctcgacaagttcgtcgcgtcgcagcttagccccggggagtgtggcagcatggaggcaacggcggaagccgcggcggcggcagtcgccggtgtgagctcgccgctggaccacggcgatgacgacatggcagcattgctgtttctcaacagcgacgagagagacgaggtcgacaggtggacggggttgctcggctccggcgccggcgcgagcggcgtcgacggcgacctcggaatctgtgtgtttgacaaatga

SEQ ID NO: 12575 - DNA, 1995 bp, Oryza sativa
  Clone ID: TFbOSC32412j.C1.o3.fg
atggcgtcggcggctggagatgggctccctccggggctcaagttcgagcccaaggacgacgagctcgtcgcccgcttcctcctcgcgcgcatccagggtaagcccctccctctccacggcgtcatcctcgacgctgatcccctctgcgcgccgccatggaggcttcttgcggatcatggcaggggcgatgaggcgttcttcttcgccgacgcgcgggccaagaatgggaaggggagccggcagaagcgcacggtcgagggcggagggtactggcaggggcagaggatgtgcgtcgatggtgagaggctggtcgtccccgatggcggcttggagatcgcgtggcgcaagtacgtcctcagctacttcgcggatggcgagaaggggagctcggggtgggtgatgcacgagtacgccatcacgacgccggctgacctcgcgtcgtcgacgatgcggctgtatcgcatccggttcagcggccacggcaagaagcgcaagagggaaccggaatctcagagcgcccaccacgacgacggtcgagcgcgctgcgccccacagatagccatgcccgagactgctctgctcgaggacagcgccccgccgccacagcccgttcttcctcctgctgcggtggtgaactctgtctctgatggcgccgttcctcctcctgcaccggtggtgaactgtgactctgacgtcaccgatgaggatgagttgcagagctttgtgcctgagttctccgcgcgcaacctgttcgtctctttgccacaaggaagccatgaagctgaagcggacgtagttggtggcgcattgccggcgcaatctatgtcgtcgtttgctgatgttggaggtccagagaacatggatgaccagagctgctccggcgtggtgtttgctaatctttccgacctgatcgtcttaccaccggtggaagccagtggcgcagcacccgcgccatcttgggcgtcatcgctggacaatcaaaacgacgaggcgcctgtgttctttgagtttccagagagcatggatgacattattggctgctttgacttcgccaccatggacgacccgagctgcactagcgccatatcagaggagccctttcttcctcctgcagcaatggtgaaccatgacgatggctatgcctctgacaacgccgatcaaggttgctccggcgccgttcctcttccttcagcagtggtggaccttcccaatgagactgacggcgccgatcaaagctgctccggcgtggtggacgattcatccatggtgtttgctaatattcacccgttggactctccagcagaaggtggccatgaagccgaagccggtgccgggggtggccgtgcagcaccagcgccgtcttgggtgtcatcgctggacaaccaaaacgacgaggcgccaatgttcttcgagcttccagagagcctggatgacatggttagctgctttgactttgccgccatggatggccagagctgcactagcgccgtgtcagagactgctctgatcgaggagctcgttcttcctcctgcagcaatggtgaaccatcacgatgactctgtctctgacatcgccgatcatggctgctccggcgccgctcctcctccttcagcagtggtggacctccccgatgactctgacggcgccgatcagagctgctccggcatggtggatgattcccttcccgggtactatgaggctgagctgaaggttccgcttgagtacgccgcgcgcaatccggtcgactctccctcaaaaggcggccatgaccatgaagccgaagtcgacgccagtggtggtgcagggtccatgatgtcatcgccggacaaggagaaggagcactcctcatcgggcgtcatggacgtggaggccactggttttggagttccagacagcatggatggcctgagctgcatcgacttcgccgagacgatggacgacctgagctgcatcgacttcaccattgatgatgagctgttcgatctatggagctag

SEQ ID NO: 12576 - DNA, 912 bp, Oryza sativa
  Clone ID: TFbOSC400909j.C1.o25.fg
atgagcggcggtcaggacctgcagctgccgccggggttccggttccacccgacggacgaggagctggtgatgcactacctctgccgccgctgcgccggcctccccatcgccgtccccatcatcgccgagatcgacctctacaagttcgatccatggcagcttccccggatggcgctgtacggagagaaggagtggtacttcttctccccgcgagaccgcaagtacccgaacgggtcgcggccgaaccgcgccgccgggtcggggtactggaaggcgaccggcgccgacaagccggtgggctcgccgaagccggtggcgatcaagaaggccctcgtcttctacgccggcaaggcgcccaagggcgagaagaccaactggatcatgcacgagtaccgcctcgccgacgtcgaccgctccgcccgcaagaagaacagcctcaggttggatgattgggtgctgtgccggatttacaacaagaagggcgggctggagaagccgccggccgcggcggtggcggcggcggggatggtgagcagcggcggcggcgtccagaggaagccgatggtgggggtgaacgcggcggtgagctccccgccggagcagaagccggtggtggcggggccggcgttcccggacctggcggcgtactacgaccggccgtcggactcgatgccgcggctgcacgccgactcgagctgctcggagcaggtgctgtcgccggagttcgcgtgcgaggtgcagagccagcccaagatcagcgagtgggagcgcaccttcgccaccgtcgggcccatcaaccccgccgcctccatcctcgaccccgccggctccggcggcctcggcggcctcggcggcggcggcagcgaccccctcctccaggacatcctcatgtactggggcaagccattctag

SEQ ID NO: 12577 - DNA, 945 bp, Oryza sativa
  Clone ID: TFbOSC401024j.C1.o4.fg
atgacgtggtgcaacagcttcagcgacgtccgcaccgccgtggacagcagcttgtcgccggccgccgccgtggccgccgccgcggggaagaaggcggcggcgtcgctcgccgtcctcgtcaagatgtgcccctcctgcggccaccgcgcgcggtatgaacaggagacgacgacgatccaggacctgccggggctgccggccggagtgaagttcgatccgacggaccaggagcttcttgagcatttggaagggaaggcgaggccggactcgaggaagctccaccctctcgtcgacgagttcatccccaccatcgagggcgagaatggcatctgctacacccatcccgagaggcttcccggtgtgagcaaggacgggctggtgaggcacttcttccaccggccgtcgaaggcgtacacgacggggacgaggaagcggcggaaggtgcacagcgacgaggtcgacggcggcgagacgcggtggcacaagaccggcaagacgagaccggtgatggccaacggccggcccaggggctacaagaagatcctcgtcctctacaccaactacggcaagcagcgcaagccggagaagaccaactgggtgatgcaccagtaccacctcggctccgacgaggaggagcgggacggcgagctcgtcgtctccaaggtcttcttccagacgcagcccaggcagtgcggctccaccgccgccgccgccgccgccaaggaggcctccgccgccgtcgccgccgccgtggtgaacagcaactactccatcgtccatggccatcaaggtggtggtggtggtagctttctcaaggaggcaaacgttgtgcacgagttctacgacccggcagcaacgatgggttaccggccacctgctcctgctgcgcacttcgcgccaaacttcgcggtgcacgcggcaaggaacagctttggtggcccttga

SEQ ID NO: 12578 - DNA, 1149 bp, Oryza sativa
  Clone ID: TFbOSC413292j.C1.o1.gm
atggccatgggaggcagtagcccggcggcgggcggcggattgggcgggcggcgaggcggcggcggcgccgtcgaagccgcggggttgggagcgggcggtggcccgctggcgaggccgggtggcggcacggtggggcggcagcggcgacggtggcgatgcaggaggcgcgcggtgctgagaggagcgctcgagcgttgtgcggcggcaggaaggaaaaaggaaaagtgcgacgtccgcaccgccgtggacagcagcttgtcgccggccgccgccgtggccgccgccgcggggaagaaggcggcggcgtcgctcgccgtcctcgtcaagatgtgcccctcctgcggccaccgcgcgcggtatgaacaggagacgacgacgatccaggacctgccggggctgccggccggagtgaagttcgatccgacggaccaggagcttcttgagcatttggaagggaaggcgaggccggactcgaggaagctccaccctctcgtcgacgagttcatccccaccatcgagggcgagaatggcatctgctacacccatcccgagaggcttcccggtgtgagcaaggacgggctggtgaggcacttcttccaccggccgtcgaaggcgtacacgacggggacgaggaagcggcggaaggtgcacagcgacgaggtcgacggcggcgagacgcggtggcacaagaccggcaagacgagaccggtgatggccaacggccggcccaggggctacaagaagatcctcgtcctctacaccaactacggcaagcagcgcaagccggagaagaccaactgggtgatgcaccagtaccacctcggctccgacgaggaggagcgggacggcgagctcgtcgtctccaaggtcttcttccagacgcagcccaggcagtgcggctccaccgccgccgccgccgccgccaaggaggcctccgccgccgtcgccgccgccgtggtgaacagcaactactccatcgtccatggccatcaaggtggtggtggtggtagctttctcaaggaggcaaacgttgtgcacgagttctacgacccggcagcaacgatgggttaccggccacctgctcctgctgcgcacttcgcgccaaacttcgcggtgcacgcggcaaggaacagctttggtggcccttga

SEQ ID NO: 12579 - DNA, 519 bp, Oryza sativa
  Clone ID: TFbOSC401927j.C1.o10.fg
atgggaagtggaaggggaaggagaaggtggtgcccaagcacggcaagaaccggcacggcatgcttgtcggctgctacttcgtccccaaggaccctggagctcttcgccatcctcaggtgcaagctcgtatgcggccagctccccggtgccctcaacaacgtcttcgagcatatcaggatcctcgaattccaccccgccctcctccatgagacgtacatcgggaaagaggaggatgggtacatctacttcttcaacaggtggcagttcgcgacgaaggcagggaacaagaggcggccgacacaggtggcgaagggcgggacgtggaaggcgtctagtgggagcaagacggtgaggagcaagaaggtcggcggcatcgacatcggccagaagctcaccatgatgttctacgagcgcaggttcgagggtgaccggaaccccatcaagaccaattggggcatgcacgagttcaccaagatcattgatgactccaaaaaccaaaaaccaggtagtccttgttaa

SEQ ID NO: 12580 - DNA, 1704 bp, Oryza sativa
  Clone ID: TFbOSC900009j.C1.o21.fg
atggcggcggcggatgggctcctcccgggcctcaagttcgatcccagcgaccacgacctcgtcggaaggtacctgctccggcgcctccagggccagcccctcccgctcgacggcgtcatcctcgaggcggatcccctgagcgcgccgccgtggaagcttctcgcggatcacggccgcggcgacgaggccttcttcttcgcggaggcgcatgccaagaatgggaaggggaagcggcagaagcgcaccgttgagggcggcggattctggcaggggcagaacacgtgcgtcgacggcgagaggctttgcgtccccgacgacggcgacggcagcggcggcggcggcggcggcttggagatcgcgtggcgcaagtacgtgctcagcttcttcgcgaacggagagaggggcagttcgggatgggtgatgcacgagtacgcggtgacggcgccggatggcctcgcctcgtcccaattgcggctgtatcgcgtccgattcagcggctacggcaagaagcgcaagagggagccccaatgtccgggagcccacggcgacgacgacggcgagctacaatgcgcgccgcccccgcgctccatggcggagacggctctgctcgaggagcgtgggccactgccccatcccgttcttggccctgcatcggtggtggatcagtgcaccgatcagggctcatccggcgtgatcgacgattcttcgctggtgtttcgtgatcttcccgacctgattgacctgccagttgcggaggaagcagatgccagccatggtgcagagactgctctgctcaacgagcacctgccgctgccgccgccacagttgttcgttccccctactgcagtgccgctggacctcgccgatgactctaatggcgccgatcagaactcctatggcatgatgggcgacgatcagctgctgcttcctgaccttcccgggacaatcaatgacgacatgccagacctgttcgtctcccaagcagaggaagccagtgcagtgcccgcgatcagctaccactcgtcgggcttcatgggcaacgaggttgcggcattgtctgattttgagttgccggagagctattcctcatctgatgccatggacggcgaggcgctggcattgtcgaattacgagtttccagagagcttcgaggaggatctgagctgcatcgacttcgccactgccaacgcgagcagcctcggcttcccaatggacggataccccatggacgagctgttcgatgatatgcctgaccagggctcttccggcgcgatggacgattcatcggtggtgttccgtgatcttcccggcctgatcaacctgccagccgcagaggaagcagatgccatcggcgatgcagagactgctctgctcagggatctcgccgatgactctaatggcaccgatcgaaactcctatggcgtgatgggcgacgatcaggatcggctgctgcttcctgaaattcctcggagaatcgacatgcccgacttgttcgtctctcaagcagaggaagccggtctcggtggcggtgcagcgctggactcctcatcgggcgccatggacggcgaggcgctggcattgtccgactttgagtttcccgagagcgtcgaggaggtgctgagctgcatggacttcagcacggtcgacatgagcttcttggacgtccccattgacgagctgctagatgatctgcccgcagactga

SEQ ID NO: 12581 - DNA, 1206 bp, Oryza sativa
  Clone ID: TFbOSC401001j.C1.o48.fg
atggctgaatcctccgaatctgcgtggccgcagcagagtcagcagctgcagattagcagcacaatgccggccggttctgcatggccggaggaggagaatctcgagaatctcgagcagccgcttcccctgctgatgccatcgtcggaggatcatcgcgagcagcagcttgttcccgttccatggctgcagcaggatcaggatcaggagtggcatgagcaggagcagtttcttcccctcaaaaatcagaatcaggagcagcttcaggatcagcaacctctgcaggatcaggaggagacgcgtagatatttgggcgtgcccggaatccggttcgtgccgtcggatatagaacttatccttgacttcctccggccgaaactacgcggcgagcagctgcccagctacagctacatgcatgtctgcgacgtctactccgaccatcctaaagaacttacgagtaagctgggtcccagccgcgaaggaaactggtacatgttttcacctagaaaccggaaatacaacaaaggcaaaaggcctagccgaagcaccggtcaattgggtttttggaagtcgactaccaagaacgaggccgtccttgacgccctcagcgataacatgttgattggatacaaggcatgcctcacctatcacgaatacgatgagagcatgccgacgccaaagttgaagaaagagaacgcgatcaagacgccgtggaagatgtgggagttcgtgtgttccaactccaaccggccgttcgacgcggaggaggagcccatgcggctcaacgactgggtgttgtgcaaagttaccaacaaggacaacaaagttaccaccaagaagttcaaaccacaacgcagcaagaagccgaagaagccgaagaagctacagcaggaggaacagccacaaaaccaaggcattgtgatcaggcagccgtcagaatccggctcggcctcctcgtcgcaccaagaaatccctggctcttctcttcccggagccggaggagacgccgcggccgcggcggcgacggcggcggcggtggtggatcctatgccattgcatatgattcctccttcttcatggaattatttcagcacgggagttactgcagatggtattgttatggatgacagtacgggagtcgattcatatggttgtgtagatggtgctggtgctcttaatttccagaggaacatcttctaccaccgttaa

SEQ ID NO: 12582 - DNA, 1470 bp, Oryza sativa
  Clone ID: TFbOSC418099j.C1.o5.gm
atggaggaggagaagaggttggaaaggattattaaggagattgacagtccaattagcccaggaggaggagcagctttattagcagaagatgatgatctggtgtttccagggtttcgatttcatccgacggatcaagagctcgtggggttttatctgacaaggaaggtggagaagaagcctttcagtattgacatcatcaaggagatcgatatctacaagcatgatccctgggatcttccaaaggtgagccatggcgcggtggcgctgcagggctcgtcgtcgtcgtcgtcgttgtcgacggcggcggcggcggagaaggagtgcggctatttcttctgccttcgagggaggaagtacaggaacagcatccgccccaaccgcgtcaccggctccggcttctggaaggccaccggcatcgacaagccaatctactcttcctcactcgccgccgccgccgccgccgccggtgccggcgactgcattggcctcaagaagtctctcgtctactaccgcggcagcgccggtaaaggcaccaagacagattggatgatgcacgagttccgactcccctcctccatctccgactccgatcacctccaagacgcatcagagacatggacgatttgccggatcttcaagaggagcatgacctacaccaagggcagggcggcggcggcagcagcatccatgaacaagcgaattagccatgagcttcagcacattcatcatcatcagcagcagcaattctactaccacgaggtagtccatgacggccatggccaccaccatcgtcgccacctgcagcactacgccggcagcgcttccatggcagcggcggcggccaacatcgtcgacgtcatcgatcactcgtcggacgccgagacgacgacgaggtctcactctcactctcagtctcacctcgtcgctgacattcgtcatcgtcagtcgccgttcatgctcgacttccatgctgggacggcgtcgtcgtcgtcgtcgacggcggcggggtggagcgaggtgatgagcttcagtagggatggcgggagcagcagcggcagtagctgggacgagctggggaggatcatggatatctctaccaattctgctaataataattactacttcgcgccgccgccttctcccgccggagccgctcgactcctcctagagcgcgccagcccgctgccgccgcctcccgccggagctgctcgcctcctcctcgcgcgcacccgccggagccgcctcaccctacccgccgctgcctgcttccctgctcgcgccgcgccgcgccgcgatggagaggaaagagaggcgggaggagagggggccattggaggagggctggaggtcgctgcgcatggcccgtcagcatcggcgaggttggctgggcaagaggcgagcgccaacagaggtgccggggaggagcaggccgccggcgcggtcgtaggagagggtgccgactggaggtag

SEQ ID NO: 12583 - DNA, 1080 bp, Oryza sativa
  Clone ID: TFbOSC410931j.C1.o1.fg
atggagcatgacgtgcaccaccaccggcagatgatgcagcagcagcagcagcaggagatggacctgccgccgggcttccggttccaccccaccgacgaggagctcatcacgcactacctcctccgcaaggccgccgaccccgccgggttcgccgcgcgcgccgtcggagaggccgacctcaacaagtgcgagccatgggacctgccatcgagggcgacgatgggggagaaggagtggtacttcttctgcgtgaaggaccggaagtacccgacggggctgaggacgaacagggcgacggagtccgggtactggaaggcgacggggaaggaccgggagatcttcagggggaaggccctcgtcggcatgaagaagacgctcgtcttctacaccgggagggccccccgcggcggcaagaccggatgggtcatgcacgagtaccgcatccacggcaagcacgccgccgccaattccaagcaggatcaggagtgggtgctgtgcagggtgttcaagaagagcctcgagctggcgccggcggcggcggcggcggtcggcaggagaggcgcgggcgcggggacggacgttgggccgtcgtcgatgcccatggcggacgacgtcgtcggcctcgccccgtgcgcgctcccgccgctgatggacgtgtctggcggcggcggtggcgccggcacaacctcgctgtcagcgaccgcgggcgcggcggcggcgccgccgccagcgcacgtgacctgcttctccaacgcgctggagggccagttcctggacacaccgtacctcctccccgccgccgatcccgcggatcacctcgccatgtcctccgcctcgccgttcttggaggccctgcagatgcagtacgtccaggacgccgccgccgccggaggagcgggcatggtgcacgagctgctcatgggcggcggctggtattgcaacaagggcgagagggagaggctgagcggcgcctcgcaggacaccggcctcacgtcgtcggaggtgaaccccggcgagatctcgtcgtcgtcgcggcagcaacgcatggatcatcacgacgcgtccctctgggcctattga

SEQ ID NO: 12584 - DNA, 2262 bp, Oryza sativa
  Clone ID: TFbOSC401138j.C1.o3.fg
atgacggtgatggagctcaagaagctgccgctcgggttcaggttccaccccaccgacgaggagctcgtcaggcactacctcaaggggaagatcacggggcagatcaggagcgaggccgatgtcatccccgagatcgatgtctgcaagtgcgagccgtgggatctccctgataagtctctgatccgctccgatgatccggagtggttcttcttcgcgccgaaggataggaagtatcccaatgggagcaggtcgaacagggcgacggaggccgggtactggaaggccaccgggaaggacagggtgatcaggtccaagggtgacaagaagaagcagcaagtaattggcatgaagaagacgctcgtgttccaccgggggcgtgcgccgaagggtgagcggactgggtggatcatgcatgagtaccgcaccaccgagccggagtttgagtccggtgagcagggaggttacgttctctaccggctgttccgaaagcaagaggagaaaattgagcgacccagtccggatgaagtggatagaagtggatactcacccactccttctcgttcaactcctgataacatggaaccaattgaagacggaaatacaccattaaacagggaatctccagaatctgctctgcatgaaagcccaattgatttgcctgctctaactgaggctcaagctgcgccaattacaaggtggcttgcagacagaactgataacgcgacaacaaatgaagtaaacatctctcacatgcctcatcatgggcttgatggaggagctaaggctagcccttcagctggtgctttccctcagctgattggttcacaacagaatatccatgataataatgaattagccacagtttctgcacccatgctaccacatgaagacttcaataatttccctctaggagccattggtaattttgatggcaatatgaatcctcgagatccagtggaggagttcttgaatcaaaccattgctgatccagatgagcattcatcaacaacatcaaaggctcagtatgattcggacactggaatcataccaactgagtttgagaaccatggggtgatgcagggtgaattcatggatgatctgagtgggttggaaaatttagatttctggccagatgaccgaaatccccagttgagtgcactgtatgaggacacaccattgctgccttatgatagcaccgaccaggatgtgctctccatggactctggtgctgaatccttgcaagatctattcaacagcatggacgattcaaacgcgaggaataatgtatggggcaacgaaccattcctccaggggactggatttcccatgtcttggccgttacagccgaactccgcatttccaaaccagggcactgcaaataggaggctcatgctacagctatcagaatcattatctcctgattttgatgtgagcatgactagagatgagtgtgaagatgaggaaccaggtattgttgtaacttcgaagtatgtgaatgaagctcctgaggagtcaactgcagaaaaggatatgccttctgatggagatgatgctgagccaacgggtattactatcctgaggcgacgccatgctccaactgcaagttcgttttctgatggagatgatgctgagtcaacgggtattaccatcctaagacagcaccaagctccaaatgcaagcttgctttctgatggagatgatgctgagtcaacgggtatcactatcctaagacgacgccaagctccaactgctagctcagctagttcatttactcaacagggtgctgcagtgcaaagggtgcggctacaatcaaaccttgatgcagcaccgtgttctagcgttgatggttcatcaagttgcatcataaatgaaggtgaaagtgaacgcaccatggagaaacctgagattgaagagaatgcaggaagtaccttggctgaaggtgggacttgccatgaggatgaccagaaggagcatgatgcttcagcagcaaatgctaaatctgttctgaggctgcggaagacagcagagggaagcgacaaggagaacaagcaggaggaagaggagggtgttcttgcttcacatatgttagtagccacataccctagttgttcagcagttgatactttgaaagagagagttgagcgaaagttgaaaaaagcttcatgcaaacgtgaggatggtcacctgctgcctagtggattatgggccaaagctgattttgatcttttagaaaatgattttaagggctggtttgggttgtga

SEQ ID NO: 12585 - DNA, 1632 bp, Oryza sativa
  Clone ID: TFbOSC400138j.C1.o85.fg
atggcggcaccggaggatggggaggacaagaatttcgggaagaacaagcacgggctcccgatcggcttctacttcgcgcccacggaccaggagctcctcgccatcctcgaggccaagcgcctcggccgcccgctctcccgcgcgcacgacgccttcttccacgacatccgcatcctcgacttccaccccgccgagctctacgagaagtacgccaaggacgaggagaagggctacttctacttcttcagcaagagggagttcccgacgagcagcaagaagcggccgctgcgggtggcggagggcggcgcgtggaacagctccggcgccgtttacaaggtggtgaagagcagcaagtccggcggcggctacgacgtcggccataagaaaaccctcgtgttccaccagcgtttccccggcgacaaggaggccgtcaaaaccaactgggccattcaggagttcaccaggatcatcgggccccagaacgaggttccggatcttgccgtgtaccgcctgtacaagatgaggaaggaaggcagggagacgcctgcagacctcgccgccgacgaggccgcggccgcggcggccatgaacaaccgtggacaacaagcgtcggctgcggccatggcgctgccaccgccggcgacgggcctgcctgggggaaggatgatgtccatggcggacaaggcgaacatggcctcgacatcaaaggcgtacgggccgtcaaagtcaagctcatcgcaactccagcaggatgcggcggcggcggcggcgccaccgaacgcagcaggggctagcaactgggcgccgaggccttgcaactgccgggagtgcgcgccggcggcgggacactatggctacttcgcggccgcggcggccatgaacaaccgtggcggacaagcgtcggctgcggccaaggcgctgccactgccggcgccgggcctgcctggggtaaggaggatgtccatggcggacaaagcgaacatggcctcgacatcaaaggcgtacgcgacgtcgcagtcaagctcatcgcaactccagcagggtgcggctgcggtggcggcgccgccgaacgcagcagggcctagcaactgggcgccgaggccttgcaactgccgggagtgcgcgccggcggcgggacagtatggttacttcgcgtccatggttccacggccgtcgctggaccggaagggcaagggcaaggcgccgatggactgtgccgagcaggccggcggcggcggcggctgtcacgcggagtcaacgagcactccggcgccgccgaagggcgccgagtactacggatgcagcgtcgccgtcgaggatgatgacgaagaattgctgaagtttctgcaggcgatggtgaggggcgaggaggtggagggtgatggcgaccacgccatggccgacgagcgcggcccgcagcagggctcctccccggtggcggcggcggcggcctccggctccgcgcctgcaggtcatgacggtcgccgtggctcgctgcagggtggccaccatggatcctcctcccccacctcattggcggccgccgccgccaccggcgacgacgtcacatctgccgccagtgcaggtgacgacgtcagtggcagtcagcaggaagaccaccctgcgcgttga

SEQ ID NO: 12586 - DNA, 1032 bp, Oryza sativa
  Clone ID: TFbOSC418457j.C1.o11.fg
atgaagaggggttgtgaagatgaacttggagctggtgatgtgattctacgaggggtggaggaggtagaagaggaagatgatgatgacctggttctccccggattccggttccatcctaccgacgaggagctagtgacgttctaccttcgccggaagatcgccgagaagcggctgagcatcgagatcatcaaggagatggacatctacaagcatgatccctccgacttcctcaagacgagcacggtgggcagcgagaaggaatggtacttcttctgccttcgagggaggaagtacaggaacagcatccgacccaaccgggtcaccggctccggcttctggaaggccaccggaatcgaccgcccaatctgctctgccgccggcggcggcggcggcgactgcatcggcctcaagaagtcgctcgtctactaccgcggcagcgccggcaagggcaccaagaccgactggatgatgcacgagttccgcctccctccgccgcccgccgacgacctcgccgccggccgctcctcccctcctccgagcctccaagaagcggaagtttggaccatctgccgaatcttccagaggaacatcacccacaagaagcagccgcagccgcagctcgccgtcgccgccgccgcggtgccggcgccggtgccggacgcgacgagctcgatcaccggcagcctcgagtccgacagcgccggcgacgacgtcgtcgagtacatgaacaccctccagccgccgccggcgagcaacgtgaacggtggctacagcaaccagcgctacttccaggagcaatggaacagtagcagcaatgataataccacagtgtttcatcagcatgcggcggcggcgccaccgccggagccttcgccggcgacggcgatggccggattcggccatgatcagagcgttctcagctcgccggcgccgagcgatttttactacaaggatggatgcaacgatgacatttacaggatggtgatggagctcgccgatccgagcttgttctatgatcatatatatgcttaa

SEQ ID NO: 12587 - DNA, 588 bp, Oryza sativa
  Clone ID: TFbOSC401435j.C1.o9.fg
atggagggagtagatcgtattggctggaacttgggcttgggcttccttaggaaagaacggccgccggtgcatggggacagcggcggcagcggtggaagcaacagcaacgatgggaagtggaaggggaaggagaaggtggtgccggagtacggcaagaaccggcacggcatgcctgtcggcttctacttcgtccccaaggacctggagctcctcgccatcctcatgtgcaagctcgtccgaggcaaggtccccggcgccctcaacaacgtcttcaagcatatcaggatattgaattccaccccgccctcctccatgacgtatatcgagactatggaggacgggtacatctatttctttagcaagaggcaattcgcaacgaaggctaggaacaagaggcggccgatgagggtggcagacggcgggacgtggaaggcgtccggtgggagcaagaaggtcggtggcatcgatgtcagtcagaagttcaccatggtgttctacgagcgtaggtttgagggcgaccgaaatcccgtcaagaccaactggggcatgcacgagttcaccaagatcattcctggcaccaaaaactag

SEQ ID NO: 12588 - DNA, 1971 bp, Oryza sativa
  Clone ID: TFbOSC900369j.C1.o22.fg
atgagccacccctcgtcgtcgtcctcctccgctcccccggcggcggccgaggccacctccctcgcaccgggattccggttccacccgacggatgaggagctggtgtcctactacctgaagcggaaggtccatgggcggccgctcaaggtggacgccatcgcggaggtggacctgtacaaggtggagccatgggacctccccgcccgctcccgcctccgcagccgcgactcccagtggtacttcttcagccgcctcgaccgcaagcacgccaaccgcgcccgcaccaaccgcgccaccgccggcggctactggaagaccaccggcaaggacagggaggtccgcaacggccccaccaccgtcggcatgaagaagaccctcgtcttccacgccggccgcgcccccaagggcgagcgcaccaactgggtcatgcacgagtaccgcctcgacggccaaaccaccatcccaccacaggattcattcgtcgtgtgccgtatcttccagaaagccggcccaggtccacagaacggggctcagtacggagctccttttgttgaggaggagtgggaggaggatgacgaggatgttggtttgctaccggtggaggagaaggacaactctgatgaccaggaaaaggaaatttctggtgctatggagaagggctatctccagatgagtgacctcgttcagaacttggttgatcaaaatgagaatggtaccattgccttgccagtttctgacaattcaaacaacagcaaccattctgaagacgtggatggaaattcaggggacattttaagtgaccaaaaccttgggtctaactttcttcaccatgttgagcctgtggagcaaaatggcctagtgcttaatgaaaatatgttttctagtgccaatgctggagacctttttaatatatctagccccaatgatggattcctagaactgaaggattttgcagatattgcagatttggagaatcctttagccaatgaatccaccatctggccttctgatggttggccctggaaatcaactgattccatggaggctgtgaatggggctagcaatgaattttctcccttagctggtgaacagatattccagccagaagaattggaacagttgttacagtcactgcaagaagactctcatatgggttcaactatctctgatcccccacattcatctataacaaatttagctaagccagaggaagattgtctaatgttctatgatgcaccctttgattcttcaatgtgtgatgatggttttagacagctcaatggatttcttggctccccatcgaccaatctatctggtattgacatggtggacgatggtatgccgtactatgatgcgatggatgataacttgtttaatgatcttctgagctcagtacagccatcagctggtagcagttcccatgcttttagtgggccagtccttactcaagaggtcaacaattcaacctatacatatagtccaactcaaaaggttttagaacctaattttgtagttggtgccccatcatctgctaggttacctgaagcgggtagtcagttaaattatgttgttttaccagattcccagaccaagagtagtctgatcgggaagcgttttgtaaagatactggattcaatctctgctccccctgcttttgcagcagcagagttcccagctagccttcgcaaatccttggctcctatttctggagctcatcacaacactatccgtgtctctgctgaagtaatcagcataggaagtttaactcctgattctcaagataagtggtcccttgagaaggatgaaggcatggagctgctcttctcggcaggttttgagcctgatacccgtgtacactttggctgcaacacaataaccgcagtactgcgtggtggcttctgcctcttcttcttttcagcaataatgctcttggtgagctacgaggtgggcatgtgcatctatggcaagtag

SEQ ID NO: 12589 - DNA, 495 bp, Oryza sativa
  Clone ID: TFbOSC414158j.C1.o9.fg
atggagtcatgtgtgcctcctgggtttaggttccaccccaccgacgaggagctcgtcggctactacctccggaagaaggtggcctcgcagaagatcgacctcgacgtcatccgcgacgtcgacctctaccgcatcgagccatgggatctccaagagcattgcaggatagggtacgaggagcagagcgagtggtacttcttcagctacaaggacaggaagtacccgacggggacgaggacgaacagggcgacgatgacggggttctggaaggcgacggggagggacaaggcggtgcgtgagaggagcaggctcatcgggatgaggaagacgctcgtcttctacaagggcagggcacccaacggccacaagaccgactggatcgtccacgagtaccgcctcgagtccgacgagaacgccccgcctcaggcaagatctccatttatctctctctcaatcaacaagatcgatctacagtttctagaaaagattaattag

SEQ ID NO: 12590 - DNA, 2661 bp, Oryza sativa
  Clone ID: TFbOSC400167j.C1.o22.fg
atggccaaggacaaggaggtcggcccgcctcctcccccctgcgtcgactccgaccacgaggacctcccgctcgccgagcgacggcggcggctgctccgcccgccggcggagtcaaagcctcccgctccggagaggcgggaggctagcgccgcggcggcggcggcggaggattccggcggagcggcgcagcagggttggccaggtcttcccagaggtgtagagtttaatcctaccgatagcgatctactctggcatctggctgcagaagttggaaatggtcaggctcgtcgtcatccttttatcaacgagtttattaaatctgttgatgaaaccataggatttggttatactcaccctcaagatataccaggtattaggcaggatggatgtgcatcatatttctttcacaaaaacttcaaggagtgcgccaatgagaacagtaaatgtatcagatggcaaaaaagtggaaatcctatatcaataactttggatgggaatcttcaaggttgcaaggaagtatttgtattgtatgcctacgagacagatggtaacaatcctcagatcactgactggagattacatcaatatcatatcgaaagcacagagaaagatgagggagaattggtggtgtcaaagatattctacgagttagaaaaaaatcaatttaaatgggctgagaaatctcacgctcagtcagcacagggtgcttctgcaatcgatgatgattccaaagaggaattacagttggacaatcattcttttaatatgattactgaaaatagttctgttcaaggcaatgaaaacaagcaaaagcagacgcaaacagggacatgtcctaatctggacaaactaagttatttcaatgtggtaagcaacatgcatattgggaaccaaattaatgatcatgatgaaatcgaggagcttgatcatatgtctctgcaagagcgctacagaattcttatggcagaaaatcattcttcctctgctgtagtatcttctgaacaatgtgcaattgatggtttggagaattcatgcaagcctggaactaatgggatgattcctaaaagaattcatgaagggactgccttcagggatggtatgtatagcatgttgcaggaaatttcttctgcaccggccattataggtagtatcgacaatgataacaacaggaggttgctaactgaaggtctttcaaacaaccagcaaagtcatgaggctggatgtgaatcaggtttcttgagtacatcatcttctgctgctccaccacaatgtcaagttgtgtgctctcatgatctattggtaaacggcaagactcttatttatagtcgcgacccttcttcaagttcaacaccaacttttggggataaaaacattcagttggaagggacagatgataggacccttttggttgacataaaattggaacctgcattggaaggggatttcacagagaaaattacatcttctgtacagagaacagatccaaatcatggcactgagggctctaatctagttgggtctataaactctgtttcttcagcgatctccaaaagaatatcagaagcagcaagatctaacccagagaattctcatgttgaaggcctactgccatcatcacgaataaaaagcgaagttaccgggagtgagttacctctagttgtgtgtggtctcacttctatcagtatcgcagagctcactgccaaaaaaaccaatactctaaaccatgacggggtccttgcttactgttctcgaaaaaggaaaaggaggaagactctgagggatccaagtgaaaagacgcttgaagaagattccctcagaaatgatgagggtactgcttacttttctcgtcaaaggcgaaggagaaaaacagcaacggattcaattgaaacggcacttgaagaagatgccccaggactactgcagattcttctggacaaaggaatactggttaaagagattaaactctacggtgttgaagaagaagatgatatggtcccagactgcacagaaagtgactttcaagatcttgaaaatgttattacaaaattgtttccgcaaagaacatccctgttgaaatctgcacttaggcatgagaagggggaaaaggctatatactgcttgacctgtttaatttctctcatcgagcagtcccgctatcttcagtttcgtgattgtcctgttgaatggggatggtgtagagacctgcaatcatttatttttatttttaaaagccataacaggattgttcttgagcgaccggaatatgggtatgcgacatacttctttgagattgtgaaatcactgccaatacaatggcagatccaaaggatggttactgcaatgaagcttagtggttgtggcaggacagctctgattgaaaataggccattattgattggtgaagatttgacggaaggagaggcgcgggttttggaagaatatggttgggtaccaaattctgggcttggcacaatgctcaattaccgtgaccgggtagttcatgacaggtggaacgagagatctggcacagattggaagacaaagataggaaagctcctgatgaatgggtattccgaggggcatttggtcctatctcactttccaactaaagttgggaaaatagaagatgacaccgaaatcaaacaggaggatcctctctga

SEQ ID NO: 12591 - DNA, 1281 bp, Oryza sativa
  Clone ID: TFbOSC417910j.C1.o16.fg
atgaacccgacaatagaaaacggcggcagcggcggcgatggatcggcggcggcggcagcggcggagggaagtgcgatctggaagagtgagctggtgccgcagctacagctacctccgggctaccacttcgtaccaacggacgaggagctcgtggacttctacctccgcggcaagatcgagggacgcgacccgcctcgccacttcatcagtgaggagaatatcatgcgttatgatccccaaaagctgattgagaaatacaagggctatggggaagacaggtggtactttttcatggtgagggagccgtcgaagacgaagaagaaggacgagccgaacaggaaggtggtggtggatggggtggaagagggaagctggagcgcgacggggagcgtggtgcagattcacagcaccaaggagacgaaccggaaggctatcattggcagcaagagggttctcacttataaatctgctcgttccgctgagaacgacatgtggagcatgcatgagtatgtcttggcaggcaaatcccagatgggtcagtatgtattgtgcgcgatacagctgaagcagacctacgagagagaagagaaggcccgggaggagcagaagaatgacaacaaacgcaataaaaaggccgcaaggaggaagaacatgcagcagcagcctactgcttgccaggcacaagacgagcagcaggaaacagcaccaacacctggagaagaaaccattgtggatcctgaccagttcatggatattgcccattccatgcatatgatgtttggaggagtagatcaagatgcaccaccattcatgccaagcttaattgctccttgcaacaacgatgatggcatgctgcaacttcaaccactccaattgcagaacccaaaccctgcaatgctgtacagtaaccagctggaaccatcgtacattggtgatcagtcgatgttcaccccatgctgctgcgatagaaactgtatttcttgtcgtcagctacaattttaccagcaacagcaagcagaggatggcagtgttgcatttgaaaaggctgatctatacaacaacatgatagggctttgggaaatattggtgtataccctgacaatgtttgggtggatggtaacatggcagattatgctcagcgtcagatttacaatgatcaagataatggtggttcttttcagggcaacatactggcttcggtcttgggctcaactactaaagtgtgatgaagaaatcaagtcggtgaaagctgcatgtcgtaatcttgagtcaatggtgtga

SEQ ID NO: 12592 - DNA, 1254 bp, Oryza sativa
  Clone ID: TFbOSC400477j.C1.o49.fg
atggagaaaggcaagctcgatttcctcctcgagctagggtttcgcttcaacccgtcgccggagcaggtcgtcacctactacctgccatgcctcgtcgccggccagcagcccaaggacaccgaggggtgcatccacagcgccgacgtctacggcgccgacgagcccagggacctcgccggcaagtacgcgcccgtggccaggagctccaacggcgaccggttcttcttcaccggttgcaagcggatgaaagggaagttctcccgctccgccgggggtggcacctgggtctctcagtccagcaaggatctcaagaacagggaggggatcaagatcggcgaggtcaagaacttccgcttcaagaaagatggcaagaacacggattggttgatggaggagtatcacctctgcgggcaagaatccggtgatgttgtcgagcccgtcgtctgccggatttacgtctcccctagggctgctcctgattcggtggcgcaccaagaatcagctgtcctgcagcctcaagaacccgcgccgctgccggttcctgcagcaccagcgccgccacgacaagtgcccgtggtcacgcagcaagcgccgccgccgccgccaccacttgttccggtgatcacgcaggacgcgccgcccctgaagaggcccgcgccggtcgccgcgccgccgtgcgccaagaagatgagaggcgatgtctcggcattccctgtggtgcgccagagctgcgtggcggcgccgcgatgtgcgccacgcgtcgtggcaccaccgccgcgtcatccacccatccagacctatccgacggatccgttcgagtcagcgccgctggatccgttcgagccgccgccagcagctgcctcggtgaccggcggacaccacacgcctcagccgtctgtccctgtccctgcgacgccagagcaagggttttcactggcagcttccaatagtccagaactcgatccggctaacatcggcattgacatggacgagcttatgagatatctgggcaatacaccattggacggcgttctcccttcccagctatttgttctgcccaccaacgacgatgaagacgtcgagctcgccaaagtactagaggacgggctacaaggaggaggaggacggcaatggcaatccaccgctgtgtgtgactcctcctcctccgcgaccggcatcttggcccgtcatggcgccaccgccgcctcatccacccatcctgacctgtcccaaggatccgttcgagcccaatga

SEQ ID NO: 12593 - DNA, 1704 bp, Oryza sativa
  Clone ID: TFbOSC401688j.C1.o13.fg
atggatggtgtggtagcagaagatcaagcaggcggcagcggcagcggtcaccgccgcctcatcggatcgaggatcgaggagcaccgcaagtacatgtcggaggagagctgctgcccgaggtgcggccacaagatcgaccggaagctggactgggtggggctaccggccggtgtgaagttcgatccgacggatcaggagctgattgagcatctcgaggcgaaagtccggcccggcggcgaggcggcggcacacccgctcatcgacgagttcatacccaccattgaaggggaggatggaatctgctacacccaccctgagaaattgccaggtgtcagcaaggacggcctgagcaggcacttcttccaccgcccatccaaggcctacaccaccggcacccgcaagcgccgcaagatccagccgccggcggccgccgcctcgtcgggcggcggcggtggcaacgcgtcgtcgtcgtcgtcggcgtcggcggctgcggcggtggcgcgccatggccatcagcagcagcagcagcagcagaggagcgagacgcggtggcacaagaccgggaagacgcgggcggtggtgggcggcgggcgtcagcgcgggtgcaagaagatcctggtgctctacaccaacttcgggaagcaccgcaagccggagaagaccaactgggtgatgcaccagtaccacctcggcgaggccgaggaggagcgcgacggcgagctcgtcgtctccaagatcttctaccagacgcagcccaggcagtgcgccgccgctgacgccgccgccaccgcctccgcctcggctgtagataggaggacaacgtcgttgagggaccgtgcggcggcggctgccgccgcagctgcagcggcggcgccaatggcttccgctaacgtcagcgtggccgcgttccacggcggcgccgccggcattgatgaattcagcttcgcgcagttcaggagtagcttcgaggaggcgggaatgggagcgtcgtcgtcggatcaccaaagtgctatggttgatcagcggcggcggcagcagcagcacgacgacgacgagcacgaccaccggcgcggcggcggcggccaccactacgtcgggcagcagcagagcgtcgcggcgacgttccacgtcgtcagctcgccggcggaccccatagccaggctgatgtcgccgccgccggctcaccagggcaccgtcatgctccggcagccggagccgccgtatatttaccatcaccaggaggatgaacggccacaccaaccgcgaaagtttgatgggaggtcgacctctggttctggactggaggaggtgatcatgggctgcacctcacggaggtccaaaggaggggaaacatcaggtggtaaggatggcacagaatggcagtacccatccttctggccatctgacagccaggatcatcatggagacaaagatgatattgaagcaaagcaaaagggagagacagaaaaagaaaaaggagaggaaaaacaaagtttctcaagatacacatttgccaagaaatattccatgaacaaggaaactctaaagatttctagtattttgcattctggcatcttgtcagaatcgaagttgccggagaatttcccagtgtgtgtagtggagggagaatatgatgagcatggcaatgcatggatgaacctgatactgcccttttcagattcctccaaactgagattaatgtga

SEQ ID NO: 12594 - DNA, 804 bp, Oryza sativa
  Clone ID: TFbOSC900391j.C1.o8.fg
atggcttccacgtcgaggaaacgttcggcgcgtagcctgcaagaagatgagcagacctcatcggcggcagaggcgccggcggcggtgcgagaggacgaggagcgggttgcggtggcgggcatggaggcgtggaggttcgggttctcgagattctcctggtttcccgcgttcaagttcgaccccaccgacgccgacatcgtcgcctcctacctcctcccgcgcgcgctctacggccgcggccacgccgccgttatccaggacgacgtgtcgaggtgcgagccgtggacgctgatgcgggagcacggccacgccaccagcgcgcacgccttcttcgtccacgaccacgagagcgtcggcggcggcggcggcggcggcaggcgcaaggtgcagcgcgcagtcaagaacggcggcggcgtgtggcggatccagaagggcgaggtggcgatcctcaccatcgtccgcggcggcggcggaggcggaggcgagctcgacgtggtgtacaagcggcgcaacctgagcttccaccgccgcggcgagagctcctcctccggatgggtcatgcacgagtacgagatcacctcgccgccgctccccgccaccgtgctctcccggatcagggccacccccagggccaaggacaagaagctgtgcatcaaggaggagccctcctgctccacctccgccgccggcgagcgctctggccctaacccagaccacaccgccgccggcgccggtgacagcgccactgccaaccacaacaatacaacgtcggcggcgacaacaactatggcagcggcggtgtag

SEQ ID NO: 12595 - DNA, 951 bp, Oryza sativa
  Clone ID: TFbOSC416913j.C1.o16.fg
atggcggcggcagtggctgtggctgggccgtccatggaggtggagcaggacctcccgggcttccgtttccaccccacggaggaggagctcctcgacttctacctctcccgcgtcgtcctaggcaagaagctccacttcaacatcatcggcaccctcaacatctaccgccatgatccctgggacctcccaggcatggcgaagatcggggagagggagtggtacttcttcgtgccgcgggacaggaaggccgggaacggcgggcggccgaaccggacgacggagcgcgggttctggaaggcgacggggtcggacagggcgatccggagctccggcgacccgaagcgggtgatcgggctcaagaagacgctcgtcttctaccagggtcgcgccccgcgcggcaccaagacggactgggtcatgaacgagtaccgcctccccgactacggcgccgcccgcgccgccgcgccgcctcccaaggaggacatggtgctctgcaagatataccggaaggcgacgccactgaaggagctggagcagagagcctcggcaatggaagagatgcagagaggatcaagtcacggagactacacggcgacgagagcatccctcgtccacgacgcctccgcctccaccggcgacgactacttctcgtcggacgacgtccacgacagcggcttcctgatccagtcctcatcctcgtcggcggcgccgtccggcagcagcagcaagaacggcggcgctggcgcaccaagggaagccaagaaggaagaagcagacgtcacggtcacggtggcgtcggcgacgagcctacagctcccggcggtgagccagctgccgagcctgcagcttccggcgatggactggctgcaggacccgttcctgacgcagctgcgcagcccgtggcaggaccagcactgcctgtctccctacgcccatctgctctactactaa

SEQ ID NO: 12596 - DNA, 1215 bp, Oryza sativa
  Clone ID: TFbOSC400477j.C1.o36.fg
atggccagcctcgatcttctcctcaagctagggtttcgcttcaacccgtctcaggaggaggtcatcacctactacctgccacggctcatcgccggccacccgcccaaggacaccgaggggtacatccaccgcgctgacgtctacggcgccgacgagcccagggacctcgccggcaagtacgcgcccgtggcgaggagccccaatggcgaccggttcttcttcaccggttgcaagcgggtcaaagggaagttctcccgctccgccgggggtggcacctgggtctcgcagtccagcaaggatctcaagaacagggagggcatcaagatcggcgaggtcaagaacttccgcttcaagaaaggtggcaacaacacggattggttgatggaggagtatcacctctgcgggaaagaagccggtggtgtcgtcgagcccgtcgtctgccggatttacgtctccccgagggcggctcctgattcggtggcgcaccaagaatcagccgccctgccgccgcctcaagaactcgtgccgccgccccaagaactcgcgccgccgccgtatcctgcagcacaggcggcgccgcaagctcctgcgccgccacgacaagtgcccgtgatcacgcagcagcaggcgccgccccagaagaggcccgccgcgccggtcgccgagccgccgtgcgccaccaagaagatgaaaggcgctgtctcggcaaaaccaatggcgccgcagagcagcgtgacggcgtccgcggcgccaccccggtgtgccgtggcgccatcgcagcatcatccaccattccagacctacccgacggacccgttcgagccaccggcgccagctgcctcggtgactcagccgtctgtccctgcgacgccagagcaaggccctgcttatgtacccgatccggctgacatcggcatggaaatggacgagcttatgagcttcctggacagtataccagtcgacggcatcctcccttcccagctatatgaatacgacgagctcgccaaagaactggaggacgcgctacaaggaggaggagaagaggacggcaatgacaatccaccgcgtcgtcgcggaagaggtggatgtgacaagcagtcgcaggggggctaccgtgtgcttctgaaggacatgggcgacgatcaaattgaccaacagtggctgaaggtgtctctgaaagactaccaccatctgatgaagagctgtaaattgtag

SEQ ID NO: 12597 - DNA, 1557 bp, Oryza sativa
  Clone ID: TFbOSC404859j.C1.o32.gm
atggcggcggcgaagatggcggggctgacgccggggttcaagttcgagccgagcgacgagcagctcgtgcagttcttcctcctgccctacctgcgcgagctgccggtgcccctgggcggcctcgtcatccgggacgacccgaggagcgtgccgccatggaagctcttcgcgcgcaacggccggggcgacgaggaggacgcctacttcctcgcgccagccgacggcgagggccggcaggcgcgcacctgcgacggcggccgcggcaggtggatcacccagcggctggagcgcacgggcaacctgcggctcgccggcggcggcggcagcggcgaggccgtcgtgttcgagaagcacaggctcaactaccacgccggcgaggggcggtgcggcagcacggggtgggtgatgcacgagtacgccgtcgtcaagcccgcggcgctcggcgcccgccacagggcgtgccacatcgccttcaccggccacggccagaagcggaagcgcgtgcccgacggctacgtcgacgtcgaggacgacggcagcaaggccagcaccaacgcggccgccgccgtccctccttcctcgacggcggcgatgtcggcgtgcccatcgaatgtcacctataaccaagggtgccatatctcgccggagcagagcatcgaacagcacttccccgcggagcataataatatccaaatccaacagcaagcttactaccaatcacaagaccacgagcagtgccagtacagcgacgaagaaaaatacctgttgcagcagatcaagcaagaacaatactactacaaccagcaaaactgcttcttgccaggccaaggcaaccaagaactgtactacaacgacgagcagcagcaaatattctcgttgccggagcatcagtgcagccaagaacagtactggcatcacgacgaccagcaagactgcgtcttgccggagcaacacagccaagaactacacgggtacaacaacgaagaccaaggatccctcttgccgccggagccgatcgaccaggaggaacaagccctcttcgtcggcggcgagccgcagcatgaacaacaacccttgacgtcaaccccgcggcaggctcttcttgattatgatgatgggaagctcctgccgccggtcggcgtcaacggcgccatcgcgatcccgccgcaggacgccgccgtggcgtccaacgacgacgacggtgggcaggctacggaagcgccggctgcgaagatgacggcggaggagaagaagtggttcatggaagagttattgaccgagggctgttggtctggacctcttctcttcgaccaaccgtactacgccgccgcgccgaccggccgctaccgcgccaccctccgcgtcgcgctggctgcctccgccacccccgcgccgcgccaggccgctgctgcgcgggctgccgctgccgcccccgcgccgcttcgctactgcctcttcgctaccactgccgtctctgcgaggaaagagtggataagagcaagaaaagaggagaggataagagcgaggagggagataaggagaaagactttgcgatag

SEQ ID NO: 12598 - DNA, 1557 bp, Oryza sativa
  Clone ID: TFbOSC418655j.C1.o1.gm
atggcggcggcgaagatggcggggctgacgccggggttcaagttcgagccgagcgacgagcagctcgtgcagttcttcctcctgccctacctgcgcgagctgccggtgcccctgggcggcctcgtcatccgggacgacccgaggagcgtgccgccatggaagctcttcgcgcgcaacggccggggcgacgaggaggacgcctacttcctcgcgccagccgacggcgagggccggcaggcgcgcacctgcgacggcggccgcggcaggtggatcacccagcggctggagcgcacgggcaacctgcggctcgccggcggcggcggcagcggcgaggccgtcgtgttcgagaagcacaggctcaactaccacgccggcgaggggcggtgcggcagcacggggtgggtgatgcacgagtacgccgtcgtcaagcccgcggcgctcggcgcccgccacagggcgtgccacatcgccttcaccggccacggccagaagcggaagcgcgtgcccgacggctacgtcgacgtcgaggacgacggcagcaaggccagcaccaacgcggccgccgccgtccctccttcctcgacggcggcgatgtcggcgtgcccatcgaatgtcacctataaccaagggtgccatatctcgccggagcagagcatcgaacagcacttccccgcggagcataataatatccaaatccaacagcaagcttactaccaatcacaagaccacgagcagtgccagtacagcgacgaagaaaaatacctgttgcagcagatcaagcaagaacaatactactacaaccagcaaaactgcttcttgccaggccaaggcaaccaagaactgtactacaacgacgagcagcagcaaatattctcgttgccggagcatcagtgcagccaagaacagtactgccatcacgacgaccagcaagactgcgtcttgccggagcaacacagccaagaactacacgggtacaacaacgaagaacaaggatacctcttgccgccggagccgatcgaccaggaggaacaagccctcttcgtcggcggcgagccgcagcatgaacaacaacccttgacgtcaaccccgcggcaggctcttcttgattatgatgatgggaagctcctgccgccggtcggcgtcaacggcgccatcgcgatcccgccgcaggacgccgccgtggcgtccaacgacgacgacggtgggcaggctacggaagcgccggctgcgaagatgacggcggaggagaagaagtggttcatggaagagttattgaccgagggctgttggtctggacctcttctcttcgaccaaccgtactacgccgccgcgccgaccggccgctaccgcgccaccctccgcgtcgcgctggctgcctccgccacccccgcgccgcgccaggccgctgctgcgcgggctgccgctgccgcccccgcgccgcttcgctactgcctcttcgctaccactgccgtctctgcgaggaaagagtggataagagcaagaaaagaggagaggataagagcgaggagggagataaggagaaagactttgcgatag

SEQ ID NO: 12599 - DNA, 1053 bp, Oryza sativa
  Clone ID: TFbOSC400138j.C1.o84.fg
atggcggcaccggaaggccagaacaagttcgcgggcgtccgcttcttgcccaaggacctggagctcctcgccatcctcgacgccaagctccgcggaagcccgttaggccccgtggaagccatcttccacgacacgcagatcctcgacttccacccgtacaagctctacgagatgtatgctgaggacgaggaggaggaaggctacatctacttcttcagcacgatgcagttcagatgcaggaagattgtggagcgcgcggcgcagggcggccggtggaaggtgaacaactgcgagactctggaggttggcggcgtcgccgttggccggaagttcaccatgaatttctacgagcatatcggcggcgacaacgacctcatctggaccaactggggcatgcaagagttcgccaggatcatcggcccaaacaaggagctcgcggatcttgccttgtaccgcctatacaagaagaaaataacaagggggacaggcgaggagaagccggaagacatcgccgcggctagcgatggcgataccgagagcagcatgaacaagcgtagacgtgtagaagcgtcggcggcggccatggcgctgccaccgccaccgccatcgccaggcctgcctggaacaatgatgttcatggcggcggaccaggcgaacgtggcctcgacctcgcaggaatggcacggccagttcgccaacggcgctgcggcggcgccgagtcctagcggctgctggccctgggcgccaccgccgacaccgagcgcagtggagcctttcagcttctgggccagcgcgtcggcggcgactcctcctgccgccgcgaactaccacccgtcgccgcagccgcagccgctgccgccgcagggcggcgagtactactccagacacggcgccttctcggtggcgcccgtgcccgcgtccgcctgctcgacgccgtccccggaggcggcgaccagctgcctcttggctacgacgtcacctctgccggcggcaggtactgagggcagtgacagtcagcagcaagaacccccctgcgaattgatggaattttga

SEQ ID NO: 12600 - DNA, 582 bp, Oryza sativa
  Clone ID: TFbOSC400773j.C1.o103.fg
atggcagaacaaccactaggaggaggcggcggcggcggcggcgatggcaacaacaatgggaagtggaaggggaaggagaaggtggtgcccgagtacggcaagaaccggcacggcatgcctgtcggctgctacttcgtccccaaggacctggagctcttcgccatcctcaggtgcaagctcgtccgcagccagctccccggcgccctcaacaacgtcttcgagcatatcaggatcctcgaattccaccctgccctcctccatgagacgtacatcgggaatgaggaggatgggtacatctacttctttagcaggaggcagttcacgacaaaggcaaggaacaagaggcggccgacacgggtggcgaagggcgggacgtggaaggcgtctggtgggagcaagacgttgaggagcaagaaggttggcggtatcgacgtcggccagaagctcaccatggtgttctacgagcgtaggttcgagggtgaccagaaccccatcaagaccaattggggcatgcacgagtttaccaagatcattgatggctcaaaaaaccaagtagtccttgttgatctaattcgaatttaa

SEQ ID NO: 12601 - DNA, 750 bp, Oryza sativa
  Clone ID: TFbOSC403854j.C1.o1.fg
atgggaggagctacaaacttacctccaggtttccacttcttcccctcggatgaagagctcgtcgtccatttcctccgtcgcaaggtctccctcctcccatgccaccctgacatcatcccgacgctgcttccgcatcggtacaatccatgggagctgaatggcaaagcactgcaagctgggaaccagtggtacttcttctgccatctaacacaaagtaggacctcatccaatgggcactggagccccattggagttgatgaaacagtaagaagcggcggccgcaatgttggcttgaagaaaacgctgctattctccattggagagccctctgaaggcatcagaaccaactggatcatgcatgagtaccatctgctagacggggattgcgtcgctggcggtagcagcaacttgactagctcgagctctaacaggaggtctcataggaagagaggccactcaagcatggagtccaacaactgggtgctgtgccgagtgttcgaatcgagctgcggttcacaagtgagcttccacggtgagggcaccgagctttcatgcttagatgaggtgtttttgtcactagatgactacgatgaattgcttgctacatcaaactatcttcgcatctgtatggacattgtgttctatcaccacaaagaaaaaaggaaggtgggtggagcttacgcgatcatatggccatctatgctgtcaatggaaatcatgcatgcttgtgtggaaatcgcgctcagatga

SEQ ID NO: 12602 - DNA, 657 bp, Oryza sativa
  Clone ID: TFbOSC900350j.C1.o4.fg
atggcgccggttggtctccctccaggctttagatttcatccaactgatgaggagcttgtgaactactacctcaagaggaaggtccatggcctcagcatcgacctcgacataatcccagaagtagacctctacaaatgtgagccctgggaattggaagagaaatccttcctgcctagtaaagactccgagtggtacttctttgggccaagggatagaaagtatcccaatggatgccgcacaaaccgtgcaaccagagcaggatactggaaatcgacggggaaagatcggcggatcaactaccagaacaggtcaattggtatgaagaagacactagtctactacaaaggtcgagctcctcaggggattagaaccagttgggtgatgcatgagtaccgcatcgaggaaagcgaatgcgagaacgccatggggattcagttacaggactcctatgcgctatgtcggattttcaagaagaatgtggtgttgggtgaatttgacaagaaaggggagtgcagttcatcacaggctaaaggaaatgaagaagttacagatttcggggatgctggacaatcctcgggagcaaatgagaatgataaagacaattcatggatgcaattcatagcagaggatctatggtgcaccaacaaactaaagtga

SEQ ID NO: 12603 - DNA, 1842 bp, Oryza sativa
  Clone ID: TFbOSC411286j.C1.o19.fg
atggacgcggtccagccaagcaatgccagcataaaccgcgtgcacctggtttatgtgctggtgcgccgcctcgccctcgtcggatccctagtagggaggggaggtctccgtctgccggcgggaggcgcgggcgccgccatgaccggatgcattgtcttgtttatgaggcccggtgttcggaccgcgtcatacattcgtggaacagtgtgctcatgccttcggacatcctggataattgacagccatagaattgcttcaaaaataaaaaatgcatctggatcggtggatgccagtaagcacaaatgggttagcaacccaactaaggcttgtccaaggtgcaaccacatcattgataacagtgatgttgttcatcaatggcctggtttgccaagaggtgtaaagtttgatccaactgaccaagaattgctttggcatttgcttgcaaagcatggcaaagttggtgcaaaagctcatccgttcattgatgaatttattccaacagtcgaggaagatgatggtatctgctatacccatccacagaaacttccaggtgtcaagcaagatggaagcgtatcacactttttccatagaacatttaaggcctataatactggaataagaaagcgccggaagataaacactggtgatcttgctgatgtccgctggcacaagactggtaagacaaggccagtagtagttgatggaaaacaccttggttgtaagaaattcatggtgctatatatgagcaccatgaaaggtggtaaacctgaaaagaccaattgggtgatgcatcagtaccacctaggaactggggaagatgaggtagaagggcagtatgttgtctctaaattattgtttcagcaacagtttaaacctggggagaagaacgcacaggacttaacctctgcagatgctttagaatctatagttgctgaagatcttccaaatattcctccacttcccctggaagaacatgtttttaccaaccaagaactagaagttcttgagaaatctgaaactatcactgaccagggaaaagagactagcgaaataaacaacgaagataacgctgtagaagatgttgcgcatatggctactgagaaacctgaggatggagataacccctcatcgcaagatccgaaatggtgggaaggtgaatcccagttcctgttagactctcagcaactggcagagaaccttgcgatttgcgatgagttccttcagagtcagagccagacctcatgcggcggtggagatgatgaaaccgataagataaagccccgtcttgctgtttatgcccagttgccagtagaggacttgaagaaggatctggaagaatgccagaggttggacccctcagatggcacaaatcttgagcttgaaaatgcgtctgaatttcgactgagccaaattgagttttcgcaggatagctttacgacggcatgggctggtggcaaggccctgttcccggtaagaaatctaccccgcgcattggctgagcgtcactgggttggtcccacagcccggccacgtgagactgagggcagcaacaagtaccgcgccgtgggtcggtcccatagcaccgggtctacaggccccatcgtttggccaagtaagtgtggtgtgtggataaaggtgggcccaagcccatggcgacgggcccaccacccagcggaggctgagagggacaccgtgggtctcggaaaaaaccgtaacggcgtctctctccgttacaacggagaatccttcgcaaacacgataaacacccctgggaatatttttcctttggcaaatcttatctgcaaggaattgagtgcaaggaaagccttagaaatgacatag

SEQ ID NO: 12604 - DNA, 1587 bp, Oryza sativa
  Clone ID: TFbOSC8412j.C1.o1.fg
atgcggagctcgcaccagcctctctgcacgagggcccaccaagcggccgccctcctcctcgtcgccgccaccttcttcctcacccgcctgctcgaccggtccccactctccgctccgccgcccccctgcgccgcaccatacagtccctggccgcaccgcgacctccgcatctacgtctacgccgaggacgaggtcgacggcctgcgcgcgctgctccgcggccgcaacgacgacgtcaccgctgcaacctgcatcaagggccagtggggaactcaggtgaagatccaccagctcctcctcagctcgagatttcgaacatttgacaaggacgaagcggatctcttcttcgttcccacctatgtcaaatgcgttcggatgacgggaaaacttaacgacaaggagatcaaccagacatacgtcaaggtggttctcagtcagatgccttatttccgcagatccggaggacgcgaccacatttttgtcttcccaagtggtgctggagctcacctgtttcgctcatgggcaaccttcctgaataggtctatcatccttactcctgagggtgaccgcactgataaacgaggtataagcgcttttaacacatggaaagatattattatacctgggaatgtggatgattctatggtgaagtctgacaggcttgctgtcaaaccgatcccattaacaaaaaggaagtatttagcaaacttccttgggcgtgctcagggaaaagtaggccgtctccaactggtgaagcttgcaaagcagtatcctgacaagctggagtctccggagctgaagctctctggaccagacaaattgggaaggatagattacttcaagcacttgaggaatgcaaaattttgcctagctcctcgtggcgagtcttcatggacacttcgcttctatgaatccttctttgtggaatgcgtgccggtaattttatcagatgaagttgagcttcctttccagaatgtgattgactacactgaagtatcgataaaatggcctgcgtccaagattggcccggggctccttgaatatctcgagtcaataccagatggaagagttgaggaaatgattggtcgcgggcgggagataagatgcctatgggtgtatgcggcggatacagagcggtgctcggctatgagcgctatcatgtgggaactgcagaggaagttcttaggccaagatgttgagttgactgtctattacctgaagagaaaattattgggcaaacacttacggtgcaatgctgtttcagagcttgatctatacaaatttgccccttgggatcttccagagaaatcttcgttgcagagtaaggatcgagaatggtatttcttttgcccacgtgataggaaatattctagtgggtcaagaacgaaccgatcaactgaagctgggtattggaaagctactggaaaagacagaccagtaatatataattctcagactgttgggatgaagcgaactttggtgtttcatcttggcaagccacctcggggtgatagaactgattgggtaatgtatgaatacaggctggaggacaaggaactgtctgcttctggtgttaaactggtatga

SEQ ID NO: 12605 - DNA, 711 bp, Oryza sativa
  Clone ID: TFbOSC414184j.C1.o4.fg
atggagagggcggctgcggcggcgccggtggtggtgaggcatggaggagtggtgttgccgccggggttcaggttccacccgacggacgaggagctcgtggtgcagtacctccgccgcaaggcgttcggcctgccgctccccgccgccgtcatccccgacctccacaacctcttcaagctcgatccctgggacattcctggtgcgagcagcgacggggacaagtacttcttcgccgtgcggccacctgcggcgagggggaggaggcagcatgtgacggcgagcggtgggtgctggaagccggcgggcgggcgggacaagccggtggtggtggcccggtgcggcgggagccacctcgtcggcgtcaagaagggcatggtgttcgtcccacggcaagggaggaaggcaccggcggcggcggcggcggccgccggcggtggctgctgggtcatgcacgagtacagcctcgccctgccgatgcacaagaagggttgcttggctgaggctgaagaatgggtagtgtgccggatatttcagaggagcagcagcggcagccggtcgccgaggaggcctgacaacgacgtgaggcgaacgatgccggccgtcgccgagctcggccggtcgccgtcgccatcgtcgtcgtcgtcgcaatccagctgcgtcacaagcagctccgaccaggaagagtgtaatgtaacgggaaggaagcactga

SEQ ID NO: 12606 - DNA, 1914 bp, Oryza sativa
  Clone ID: TFbOSC900216j.C1.o14.fg
atggcggcggcggcggatgggcttccgccgggcgtcaggttcgaccccgccgacgacgagctcgtctcccgctacctgctccggcgcctccggaagcagcccatcccgctccacggcgtcatccacgaggcggatcccctcggcgcgccgccatggatgctcctcgccgatcacggccggggcggcgacgaggccttcttcttcgccgaggcgcgcgccaagaacgtcaaggggaagcggcagaagcgtaccgtcgagggtggggggttctggcaggggcagcgggtttgcgtcgacggtgagaggctgagcgtcccaggcggcgacggcggcggcgaagtcggcggcgggttggagatcgagtggcggaagtacatgctgagcttcttcgccgagggggagaggggcagctcggggtgggtgatgcacgagtacgccatcacggcgcccgatgatctcgcctcgtggccgatccggctttaccgcgtccgtttcagcggccacggcaagaagcgcaagcgggagccggaacgcctgggcgcccgcgtccatgacgacgacgtcgacggtggacaacgcgccgcgccccggcgcgccgtgacagagaccgccctgttcgtgcagccgagcgccgtggattgcgccgaatccgctggtcagagcttctccggcgcgatcgagcctgtgttccacgatctccccgacatgatgccggagcaagctgatgccggagacactacagagactaccgcagcggtggtgaacctcacggacgccatgtccgagcagcccgttcttccgctagcagcagatggcgacgatcagagctcctacggtgtcatcgatccggcgttccgcgatcttgctgacctgatcgtcttgccacctgagccagatgacggtggcatggaacgcgccacgccctgcactcccatgtcagagaccgccctgttcgagcagcaagggcctcctggcaatgctgattgcgccgatcatcagagctcctacggtgtcatcgatccggcgttctgtgagcaagccgacgccggagaggcagagaccaccgtatccgcagcagtggtgaaccagaactactccatggcgttgtgtgatttcaattttccggaggtactcagctacgtcgacttcaccgccggcatggagccctcctggcaacagcgctggcctcccatgtcagagagcgccccgttcgagcagcaggagcctccgctcgcgcccgtggcaatggtggatctccctcctggcaatgccgattgcgccgatcatcagagctgctctggcgtgatcgacccggcgttccgtgatctccccgacatgaccgtcctgccaccagagcaagctgacaccggaggcggagcagagactaccacagcaatggtgagcctcacggacaagctgaaatactcctcctccatggacggcgaggcagcgcaggcgtggtgtgatttcgattttccagagagcactgatgaggcgctcagctacatcgacttcactgccggcgcccacactgacaacgacggtggcgtgtcagagaccgccatgttcgagcagctggggtctccgccacagcacgatcctctgccgatggatgctgatggcgccgatcagagctcctccggcccgttgatcgacacggtgttccgtgatcacgccgaaccgatcgtcctgccactagagcaagctgacaccggaggtggtgcagcagcggcggtgaacctcatggacaagcagaagtattcctcctccatggacggcgaggcggtgccggcgtggtgtgattcggatttcccggagagcattgacgaggtgctcagctacatcgacgtcagcaccgatgacacgagctgcatcgacttctccatggacgacctcttcgatcttgcagactag

SEQ ID NO: 12607 - DNA, 1818 bp, Oryza sativa
  Clone ID: TFbOSC416548j.C1.o4.fg
atggcggcgggtggtggtggcgctgatgggctccctccgggcctcaggttcgatccgaccgacggcgagctcgtctcccgattcctgctccggcgcctccagggtaagcccctcccgctcaatggcgtcatcctcgaggccgaccccctcagcgtgccgccatggaagctgctggcggagcacggccggggcgacgagggcttcttcttcgccgaggctcgggccaagaacggcaaggggagccgccagaagcgcaccgtcgagggtagtgggctctggcaggggcaaagggtctgcgccgacggcgagaagctgctcgtccccgatggcggcggcgtggaggtggagatcgtgtggcgcaagtacttgctgagcttcttcgccgagggcgagagggggagctccggctgggtgatgcatgagtacgccgtcacgtcccccgccgagctcgccgcgtcgccgatccggctctaccgcgtccggttcagcggccacggcaagaagcgcaagagagagccacaatccggcgaggacggtgtcggtcgagcacgcgcggcgccacagagcgctggaacagagactgctctgctcgaggagcgcgtcatgccgccacagccggcgccccagagcgtcggaacagaggatgccctggtcgaggagcgcatcccgccgccacagcccgttcccatccctcctatcgccggaacagaggatgccctggacgtcggcactgaggacgttcgaggacgagccgcgccacagagcgctggaacagagtctgctctactcgaggagtgcgtcctgccgccacagaccgcgccccagatcaccggaacaggggttgctctgctcgacgaggtcgttccaccgccacagaccgtgtcgatttcccctcccgcagcgctggtggacgctgtcgatgatgctgactgtgccaatcagggatgctccggcgtgatggacgattccacaatggtgttcagtcatcttccggacatgatcaccctgcccgcagaagaaggtgatgccgccggtggtgcagcgctggcgtcgatggactactcctgggctgattttgagttcccagagatcaacatggatgagttgcctaactgcatcgacttcaccacaactgaccccagctgcttggacattgagctctccatgggcgacctccatgagccccagagcactggaatagagtctgatctgctcgaggagttcgttccgcagccacagccagtgcttgttcctcctctggctgctctggttgaagttgccgatagctctgaaggccctgatcagggatgctccgttgtgatgcatgattcttctgcggtgtttactcatctgtcagacccgatcgtcctgccagaagaagaagaagctgatcgtcctgatgcgccggctgggactatgtcactagactatcagaactactccttgtctgatttcgagttcccagagtaccctctgctcgatgttgccggtgatgctgacggcgcagatcagtgctcttccaacgtgatggatgattcttccatggtgtttagtcaccttgaagacctgattaccctaccagcagaggaagcagaagccgatgcttgtagtgcagcgcctgcgccgtcgctggacaaccaaaaatactcctcacagggcatcatcgacagtgaggcgccggcattgtctgatttcgagttcccagagaccattgatgaggttctaaacagcatcaacttcacaatggccgacccgagctgcttggatatggagttctccatggacgacctcttagactttgatccgccggctgattag

SEQ ID NO: 12608 - DNA, 1155 bp, Oryza sativa
  Clone ID: TFbOSC400651j.C1.o2.fg
atgcctgcccttccaccaggcttccgcttccaccccaccgacgaggagctcatcgttcactacctcatgaaccaggccgcctccgtcaagtgccccgtgccaatcatcgccgaggtcaacatctacaagtgcaacccatgggaccttcctggtaaggctttgttcggcgagaacgaatggtacttcttcagcccgagggaccgcaagtaccccaacggcgctcgccccaaccgcgccgccggctcggggtactggaaggccaccggcaccgacaagtccatcctctccactccgaccagcgacaacatcggcgtcaagaaggccctcgtcttctacaagggcaagcctcccaagggcgtcaagaccgactggatcatgcacgagtaccgtctcaccggcacatcagctaacagcaccaccaccacaaagcagcgtagagcgtcatccatgaccatgaggctggacgactgggtgctgtgcagaatccacaagaagagcaacgacttcaattcctctgaccaacacgaccaagaacccgaggaatcaaccgtcgaacagcttgaagacatccatgacaacaactcctctgaacaacctccagctccagctgacatgaacaaccaacagtcagatttccagcccatgacggcgatgagcatgagcaagtcatgctccctcaccgatctcctcaacaccatcgactgcgccgcgctctcgcagtttctcctcgacggctcatccgacgccatcgctgagcctcctgctcctcccagccccctaatatacacaacacctcatccaaattaccaaacactaaactataacattaacagcaacagcagcatgccacacgccttcgagtcacgcctagatcatcacgatggttacgttaacaattataatgttaatggcctgaggaggaagagaatgatggcgtgtagtgcaacttcctttgatgatggcagcagcagcaatgactttgtgcatgccgttgtcaagaaaccgcagctgctgccaagtgattcgaggggtagtggttttggaggaggttactgcaaccagcagctttcagagactgcgactggctttcagtttcagaacggcaatctgctgagccatccatttcctctgaacaatcatctgcagatgcagtag

SEQ ID NO: 12609 - DNA, 1512 bp, Oryza sativa
  Clone ID: TFbOSC401083j.C1.o2.fg
atggcggcggcggcgaggtcgcagggtctctcgccggggttcaagttcaatccgagcgaccagatgctcgtggagctcttcctcctgccgtacctgatcgacggcgagctccccgtccgcggcctcgtcttcgtggaggacgaccacctggggggcctgccgctgccgccgtggatcctcctcgaccgccacggccgcggcgacgaggacgaggcctacttcgtcgccccgatgggtgccggcgatggggcccggcaggtgcgctccgtcgccggcggcggcaagtgggtgaagcagaggtcggaggggaaaggtgaggtggtggtggcccccggcggcgaggcgttcctgtgggagaatttcagcctcaacttccaccgcgacgatcgccggagcggcagcaccgggtgggtgatgcacgagtacatcgtctccccacccgccggctccgccgtcgccgcctcccaccgggccacccacatcgccttcaccggccacggccagaaccgcaagcgcgtccccgacggctacgtcctcgtcctcgacgacgccgtcccccccgccgccgccgctgcagcacctcctccggaatccgagcagagcaatcaagaggagcaagaatacgctgcttacaccgaccaaatccagcagcagtgcttcgtcccggagcagcagatgagcaaccaggaatacttcccggaggcggcggcggagcagagcaaccaacagttcttcgtgccggcggaggagcagagcagccatcagttattcttgccggcagaggagcagagcaaccaacagttcttcatgccggcggaggagcagagcagccatcagttcttgccggcggaggagcagagcagccatcagttcttgccggcggaggagcagagcaactaccaacagttcttgccggcgttggagcagatgacgcagagcaaccaagaatttgcttacggcgagcaaagccagtgctacattgtgccggagcagcagcagctgagcaaccaagaatacgcttacagcgaacaaagccagtgctacatcttgccggagcagcagcagctgagcgaccaagaatacgcttacagcgagcaaagccagtgctacatcttgccggagcagcaggagctgagcaaccaagaagcagaatatgctttcgtctgctacgacgagcagcagcagcagcagcaacagagcaatcaagaagcagaatacgctttcgcctgctacgacgagcagcagcagcagcagcagcagcaatacttacatggagatctcacatcgtggcaagaaccctttgtgacgtcgtcgtcctcgtcatcacagcagtttcttggtcaggaacagctgctgcctgatggcctcctcctcgacggctttggcgagatctcacagcagcagggcgaccaagaatacgcgtactgcgaggaaagccagtgctacatcatgcctgaacagcagcagcagagcaaccaagaagcagaattcgctttcgcctgctacgactag

SEQ ID NO: 12610 - DNA, 915 bp, Oryza sativa
  Clone ID: TFbOSC414142j.C1.o2.fg
atgagcgggatgaattcgctgagcatggtggaggcgaggctgccgccggggttcaggttccacccgcgagacgacgagctcgtgctggactacctggaaaggaagctcctcgacggcggcgtgggcggcgccgcggcggcggcggcggcggtcaccatctacggctgcccggtgatggtcgacgtcgatctcaacaagtgcgagccatgggaccttcctgagatcgcttgcgttggtggcaaggagtggtacttctatagccttagggataggaagtatgcaactggccaacgaacaaatagagcaaccgaatcgggctactggaaggccacaggaaaagatcgcccaataagccggaaaggattgctcgtcggtatgcgaaaaaccctggtgttctacaaaggtagagcccctaaggggaagaagaccgagtgggtcatgcatgaattccgcaaagaaggacaaggggatccgatgaagttgcctctcaaggaggactgggtcttgtgtagagtcttctacaagagtaggacaaccattgccaagctgccaacggagggtagctacaacaatattgacagtgtggccacaacttcactgcctcccctcactgacaactacattgcatttgatcagcctggttcaatgcaaaacctagagggttatgagcaagtgccctgcttctccaataatccctctcaacagccatcgtcgtcgatgaatgttccgttgacatcggccatggttgatcaagagcaaaacaatatgggtagggcgatcaaggatgtgctgagccaattcaccaagtttgaaggcaatgtgaagagggaggcccttcaaagtaatttttcccaggatggatttgattacttggctgagagtggcttcacacaaatgtggaactcactcagttga

SEQ ID NO: 12611 - DNA, 2331 bp, Oryza sativa
  Clone ID: TFbOSC900216j.C1.o13.fg
atggcggcggccgcggatgggcttccgccgggcgtcaggttcgaccccgccgacgacgagctcgtctcccgctacctgctccggcgcctccggaagcagcccatcccgctccacggcgtcatccacgaggcggatcccctcggcgcgccgccatggatgctcctcgccgctcacggccggggcggcgacgaggccttcttcttcgccgaggcgcgcgccaagaacgtcagggggaagcggcagaagcgtaccgtcgagggtggggggttctggcaggggcagcgggtgtgcatcgacggcgagaggctgcgcgtccccggcgacggcggcggcggcgaagtcggcggggaattggagatcgagtggcggaagtacatgctgagcttcttcgccgagggggagaggggcagctcggggtgggtgatgcacgagtacgccatcacggcgcccgctgacctcgcctcgtcgccgatccggctttaccgcgtccggttcagcggccacggcaagaagcgcaagcgggagccggaacgcctgggcgcccgcgtccacgacgacgacgtcgacggtggagaacgcgccgcgccccggcgcgccgtggcagagaccgccctgttcgtgcagcagtcgagcgccgtggattgcgccgaatccgccgatcagagcttctccggcgtgatcgagcctgtgttccacgatctccccgacatgatgccagagcaagctgatgccggagacactgcagagactacagcagcggtggtgaacctcacggacgccatgaccgagcagcccgttcttccgctagcagcagatggcgacgatcagagctcctacggtgtcatcgatccggcgttccgcgatcttgctgacctgatggtcctgccacctgtgctcgcgcagcaggagcctccgctcgcgcccgtggcaatggtggatctccctcctggcaatgctgattgcgccgatcatcagagctgctctggcgtgatcgacccggcgttccgtgatctccccgacatgaccgtgctgccaccagagcaagctgacaccggaggcggagcagagactaccacagcaatggtgagcctcacggacaagctgaaatactcctcctccatggacggcgaggcagcgccggcgtggtgtgatttcgattttccagagagcactgatgaggtgctcagctacatgaacttcaccgccggtgcccacgacaacaatgacggcagtgtgggacgcgccgcgccatggcgtcccgtgtcagagatcgccatgttcgagcagccgagcgccgtggatctccctcctggcgatgctgattgcactgaatccgccgatcagagcttctccggcgtgatcgagccggtgttccatgatctccccgacatgatccgtgagcaagctgatgccggagacaccgcagagactactgcagcggtggtgaaccagaactactccatggcgttgtgtgatttcgacagcggcattgacttcaccgccggcgcccacgacagcggcatggaacgcgccacgccctggactcccatgtcagaggccgccctgttcgagcagcaagggcctccgctcgctcccgcggcagtggtggatctccctcctggcaatgctgattgtgccgatcatcagagctcctacggtgacatgatcgtcctgccatcagagcaagctggcgccggaggcggagcagagactaccgaggccctgttcgaccagcccgttccgccgcttgcagcagattgcgccaatcagggctcctacggcgtgatcgacccggtgttccgcgatctcgccgacttgatcgttctgccaccagagcaggccgacgccatggacggcgaggcggcgccggcgtggtgtgatttcgattttccggagaacattgatgaggcgctcagctacgtcgacttcaccgccggcgcccacgctgacaacgacggtggcgtgtcagagaccgccatgttcgagcagccggggtctccgccacagcacgatcctctgctgatggatgctgatggcgccgatcagagctcctcctccggcgcgctgatcgacacggtgttcggtgatcacgccgaaccgatcgtcctgccactggagcaagctgacaccggaggtggtgcagcagcggcggtgaaactcatggacaagcagaagtactcctcctcctccatggatggcgaggaggcgccggcgtggtgtgattcggatttcccggagagcattgacgaggtgctcagctatgtcgacttcagcaccgatggcgcgagctgcgacttctccatggacgagctcttcgatcttgcagattag

SEQ ID NO: 12612 - DNA, 4806 bp, Oryza sativa
  Clone ID: TFbOSC101853j.C1.o5.fg
atgcggagacggaggtggaggcggcggctggctcccgtgttccgcttctacccgacggaggaggagctgatatgcttatacctccgcaacaagctcgacggtttccgcgacgacatcgagcgcgtcatccccgtcttcgacatctactccgtcgacccgttgcagctctcaggtaccagcacacgcgtgtacctacttttgcccgcggcgaggagggggagcggatggttctacttctgcccgcggcaggagcgggaggtgcggggcgggcgaccgagccagaccacgccgtcggggtactggaaggcggcgggcacgacgggggtcgtctactccgcggagccgtggccgcgcgccgttgggaacaaagaccgcgtggaagatgatgagagagagagagaggggggaagatggaagatgaggtcttacaggtgggtattccctattgcaaaaaggcagattacagttttggcagagaagtgtctgcccagggacacagatgaagatctaggtggggggcatgtcgatgacatgaccaaactgacttatcttaatgaaccaggtgttctatacaatttgaagagaagatatgcattgaatgagatatatacatacactggaagcatcttgattgctgttaatccattcacgaggcttcctcacctgtacaatgagtacatgatggagcaatacaagggtgtccgactaggggagttgagtccacatgtttttgcagtagctgatgcatcatacagggctatggtgaatgattcccggagccagtcaatcctggttagtggtgaaagtggcgctggcaagactgagacaacaaagtttatcatgcaatatcttacgtatgttggtggtagagctgctattgacgatcgaactgttgaacagcaggttcttgaatctaaccctcttctggaggcatttggcaatgcaaaaacagttagaaatgacaactcaagccggtttggcaaatttgtggagatgcaatttgatgcaaatggtagaatatctggggctgctattaggacctatcttttggaaaggtcccgtgttgtgcagattaatgatcctgaaagaaattttcattgcttttatcagttatgtgcgtctggaaaggatgcagaactgtacaagcttggtcacccagggagtttccattacttgaataaaagtaagacatatgaattggaaggaacaaataatgaagacgagtactggaagacaaaaagggcaatggatattgtcggaattagcagaaatgatcaggatgctatatttcggatactggcagccattcttcatcttggcaacattgagttttctcctggaaaggaaattgattcttcaaaaattaaggatccaacatcaaattttcaccttcaaatggcagccaaactattcatgtgtgatccagatctgttggtctcaactctatgtacacgcgccattaacactctcgaaggagcaattataaaagcattagactgttctgcagcagcagctaatcgtgatgctctagcaaagactgtatatgcaagactatttgactggcttgttgagaatattaacaaatctattggtcaagatgttgattccaaagtacaaattggtatcttggatatttatggttttgagagcttcaaaaataacagttttgagcaattctgcatcaacttcgccaatgaaaagcttcagcaacatttcaatgagaaaccgattggaattattgcactgctggatgaagcttgcatgttcccaaaatctactcatgagacctttgcaacaaagatgttcaggaatttctcttcgcatcataggcttgagaagacaaaattctcggagacagattttactatctcccattatgctgggaaggtgacgtatcaaacagaatcatttttggagaagaatagagattatattgttgcagagcactgcaatcttttatcttcgtcaagatgccctttagtttctggactttttggtacattaccagaagaatctttgagatcgtcgtacaagttctcatcagttgcttcaagatttaagcaacaacttcaagccctcatggaaaccctcaactcgacagagcctcactacgtacgctgcgtgaagcctaactctgttaatcagcctcagatttttgaaaatcagagtgtcctgcatcaactacgctgcggaggtgttttagaggctgttcgcatcagtcttgctggctatcctaccagaaggacttatgctgaatttgttgaccggtttggtgttctggttcccgagttgatgcttggaagttatgatgagagggcattgacaaagggaattcttgaaaagatgaagcttgataattttcaacttggtagcactaaggttttccttagagctggtcaaatcgcaattttagatatgcgtcgtgctgaagttttggagaacgctgcacgccacattcaaggtcgtttcagaacattcattacacgcaaagagtttgtgaaaacaagggaggcttcaatttctatacaagcatattgcagaggctgtttggcaaggaagaagtatatggttaaaagagaaacagcggctgctataattgttcaaaaatatgtcaggagatggcggcttcatcggacttaccagcaatctcattcagcagctcttcttattcaatcctgtattcgaggatttatcgctcgccattatttctcagttatcaaagagcagaaagctgctttggtgatacagtccttgtggagaaaacggaaggttatcattcttttccaacaatacaggcaagccactgtggcaattcagtgtgcttggagacagaaagttgcaagaagagaactaaggagactcaaaatggctgcaaatgaagcaggtgcactgcgtgaggcgaagaataaacttgagaaaaagttggatgatcttactctgagactaactctggaaaggagactgcgggctgctggtgaggaagcgaagtcagtagaaatattaaagcgcgacaaactgatagaatcattaagtgccaaatgtgctgctgccaagtcggctgctcaaagcgaacacgacaaaaatctgctactccagaggcagttggatgattcattgagagagataactatgttgcggagtagcaagattatgacagcagaagcagaaagggagaactccaatctgaagaacttagttgaatcattgtcaaagaataattcatcacttgaatatgaactcacctcagctcgtaaaggtagtgatgctacgatgaagaaattgaaagacgtagagggaaaatgcaaccatctccagcaaaatttggacaaattgcaggaaaaacttacaaacatggaaaatgaaaatcatgttcttaggcaaaaggcattaaacatgtctccgttgaacaatatgcccatgactacaaaggcttttcctcagaaattcgctacaccgattgggcttccaaatggcgagcagaagcacggatatgaaacaccaccaccagcaaaatatctcgcttcacttccacagagtttaactagatcaaggagaaccaggatgcctgttgaaaggcaggaggaaaatcatgaaatcttattacgatgcataaaggaaaatctaggattcaaggatggtaaaccagtcaccgcatgcattatctacagttgccttttacactggcgtgcttttgaatctgagaggactgctatttttgatcatgtcattgaagccataaataatgttctcaagggggaagaggctgacggtagattaccttattggttgtccaatacctcttcattgctatgccttctgcagaagaatttacggtcaaatggattatttgctacaccatcccgcaggtctggtggaactctagggattggtgacaagatagtgcaaacactcagatctccttcaaagcttatgggacgcagtgataatcttggacaagtggatgctcggtatccagccatattattcaaacagcaactaactgcgtgtgttgaaaagatttttgggcaacttagggataatctgaaaaaggaaatatcaccacttcttagtgtctgcattcaggctccaaaatcatcacgtgcacagcctggaaaagcaaccaaatcacctgggattggtgctcaaccaccatcaaactcccattgggacaatattgtcaaatttcttgacctgcttatggacactttacatgaaaattatgtgccatcattctttatacgtaaacttatcactcagctattctcttttatcaatatacagctttttaacagccttcttcttcggcgtgaatgctgtactttctccaatggggaatatgtcaaagccggtctgtcattgctggagaaatggattactgatgccacggatgagtttgcaggaacatctatgcatgagctaaattatatcagacaagctgtcggatttttggtcatacatcaaaaaaggaagaagaagcttgaggagattaggaacgaactttgcccgaacttgagtgtacgccaaatatacaggatatgctcaatgtactgggacgacaaatacaatacccaaggaatatcaaatgaggttgtttctgcaatgagggaggaagtaaacaaagatactcagaatctcgtatcaaattcctttttattagatgacgacttatgtataccgttttctacagaggatttgtcaattgccatccctgcaatagattatgtagatatagaacttccagaatctcttcatcactatgcatcagtacagctcctactcaagcatcatgatccacagcctgtctaa

SEQ ID NO: 12613 - DNA, 981 bp, Oryza sativa
  Clone ID: TFbOSC401648j.C1.o39.fg
atggaggcgaacctgccgccggggttccggttccaccccagggacgaggagctcgtcgtggactacctctaccacaagctctccggcggcggcgagttctacggcggcgtggccatggtcgacgtcgacctcaacaagtgcgagccgtgggagcttccagcatatttcttgcacaatctgatcatcttccctgcacgcgcacgcgcacgcgccgccggtcgccggcgacgagaagacgccgcgcgggtgggcgccacggagtggtacttcttcagcctgcacgaccgcaagtacgccacggggcagcgcaccaaccgcgccacccgctccggctactggaaggccaccggcaaggaccgcgccatcgtcacccgccgccgcgccgccgccggagaggccgtcgccggcggcgaggtggtcgggatgaggaagacgctggtgttctaccaagggagagccccccggggcagcaagacggagtgggtcatgcacgagttccgcgtggacggacatgccgttgccgaccacccctcctcgtccacctcctcctcctcatctaatcttctcaaggaggactgggtgctgtgcagggtgttctacaagagcagaacggctacaccaagggcagtagtctccggtgaggctgccgtgtcactgtccggtgagctcagcttgccgccgccgctgccgccgcccgttgcccccgccgtcgtcgacggctacaccggcggcggctattacgagcaagacagctcagctgggtaccaccaccaccaccaccaccggccgccgccgtcggcagcattgccgttcaaggacctgacggacttcagggacctgctgagcaacatggcacaaggcggcggcggcggcgctgccgccgccaagacggaggggttccatcttggctggagcgaggaggagtcctccggctacgtgcagcagagcgccatggcgtcgcaggcgtggaacccgttctag

SEQ ID NO: 12614 - DNA, 1266 bp, Oryza sativa
  Clone ID: TFbOSC400138j.C1.o82.fg
atggcggcaccgggagatggggaagagaagaaggccgggagcgggaggaacaagcacgggttcccgcgcggcttccgcttcgtgccccgggaccaggagctcctcgacatcctcgacgacaagctccgcggcgccccgctcgaccgcgcgctcgacgccgtcttccacgacacgcggatcctcgacttccaccccgccaagctctacgggatgtacgcggaggacgaggagaacggctacatctacttcttcagcacgatagagttcaaggcagccaagcccaagcagaagaagtggccgcggcgcgcggcgcagggcggacggtggaaggccgtcctcggctccagccagatggtggaggttggcggcgtccccgtcggccggaagctctccatggagttctacgtcaagggggtcaggaccaactggggcatgcacgagttcgtcaggatcatcggccccaacatcgaggttgcggatcttgccgtgtaccgcctacacaagctatggacgaacggcgaggagaagccgggagacctcgccgcggacgttgccaagagcacgaaccagagtggacaagcgtcggcggcggactactaccagacttaccagaacgcggtctctcaggcgtatgcgtatgcgccgccgtacgtcctccagccaggatggagccaagggtacccctacgatgtcgcggcggcgccaccgaccgcgccctggcctgtctgttgggcgccgccgtccgcgccgggatcctatgactgctgctacgcgtccacgttttcaaggccgccgccgccaccaccaattgctgcgagcacgctggacaaggcgccgataaccagtaccgaccacggcgcatcaacgaacacttcggcggcgacacccgtggcgaacaacaagccgccgccgccaccagttgctgcgacagcgaccacgctgggcaagaagggggagggcaagggcaaggcgccgacgaccaccagtaccgatcacgccggatcaacgaacacctcggcgccacccgccgcgaactaccagccgccgccgacgacgactacgccgccgctgcagggcacgcagcacgtcttcgcacccggcgtcgtcgtcgggcatgaggacgaggagggctacctcatcgtcgacgaggtcaacacgtggcgcaacacgcagcagctcgtgctcgaggatgacgacgacgacgacgacggccgtgccgccggcgccggtgcaggtgagggtggcgcttcagcctcagggcggtga

SEQ ID NO: 12615 - DNA, 783 bp, Oryza sativa
  Clone ID: TFbOSC400221j.C1.o12.fg
atggagacgacggcggcgaagaagctgccgccggggttcaggttcaggcccaccgacgaggagcttgtggtgcactacctccgccgccgcgcgctcggctcccctctcccgcccgccgtcgacatccccgatgtccgcctcctcgcgcatgacccctccgacctgcttcctccagggtggagtgagcaggagaggtacttcttcacgtgcaaggaggccaagtatgtcaaggggcgccgcgccaaccgcgccacgggcgccgggtactggaaggcgacggggaaggagaagccggtggcggtgtccgtggcggcggcgccgaggagccaggccgccgccgtcgtcgtcggcatgaagcgctccctcgtgttctaccgcgggaagccgccgaccggcaagaagacggactgggtcatgcacgagtaccgcctcgccggcgccggcctcgccccgtgccgccgcgccgccaccgccgaccacccggcgcgccccgccgagggctgggtgctctgccgcgtgttccggaagaaaggctccgcggccgcgtcgacagccagccccaccgccgacgccgacgacgacgacgccaccacggagcgcgccgacgacgccgcggcgggcgtccggttcatcgacttcttcgcccgcgccgacgcgcggcggcgccgcgcggcgtcgccggtgtcgtcgagctgcgtgacggatgcgtcggcggagcattgcagggagcaggagacgacgagccggaacggcggcgccgccgccggcgacgcctccgactaa

SEQ ID NO: 12616 - DNA, 1014 bp, Oryza sativa
  Clone ID: TFbOSC404770j.C1.o8.fg
atgggagagcagcagcagcaggtggagcggcagcctgacctgcctccgggctttaggtttcacccaacggacgaggagatcatcaccttttaccttgcacccaaggttgtggacagcaggggcttttgcgtggctgccattggagaggtggatctcaacaagtgcgagccatgggacttgccagggaaggcgaagatgaacggggagaaggagtggtatttctactgccagaaggatcggaagtatccgacggggatgaggacgaacagggcgacggaggcgggatactggaaggcgacggggaaggacaaggagatcttccgcaaccaccacatgctcatcggcatgaagaagacgctcgtcttctacaagggcagggctcccaagggcgacaagaccaactgggtcatgcacgagtacaggctcgccgacgcctctccgccacagccgccgccgccgccatcctccgcagagcccccgaggcaggacgactgggccgtgtgcaggatcttccacaagagctccggcatcaagaagccggtgcaggtgcccatgcagatgccgatgcagatgcagatgccggttgctcatcaggtgcccgccgccaactaccagcagcagatggccatggcctccgccagcatcatccaagtccccatgcagatgcagatgccctccatgtctgaccagctgcagatgttggacgacttctccaccggttcactcatggcgccgcctccgcctccgccttcctactccactctacctggcttcccgcttcagatcaacggcggcgccccagcagtttgttgggaacccgtcgatgtactaccagcagcagcagcagcagcagcagcagcagatggacatggccgccggaggcttcgtggtgagcgagccgtcgtcgctggtggtgtcgccgcaggatgctgccgaccagaacaacgccgccgacatctcgtcggtggcatgcaacatggacgctaccatctggaacaatatgtatgtgtgtga

SEQ ID NO: 12617 - DNA, 996 bp, Oryza sativa
  Clone ID: TFbOSC400095j.C1.o9.fg
atggggttgagggacatcgagctgacgctgcctccggggttccggttctacccgagcgacgaggagcttgtctgccactaccttcataacaaggtggtgaaccagcatcgcttcgccggagttggaggagccgccgccgccggcggcggcaccatggtcgaggtggacctccacacccacgagccgtgggagctaccagatgtggcgaagctgagcacgaacgagtggtacttcttcagcttccgcgaccgcaagtacgcgacggggctccgcacgaaccgcgccaccaagtccggctactggaaggccaccggcaaggaccgcgtcatccacaaccccaagctgcacgccgccgcccaccgccgcgcctccatcgtcggcatgcgcaagacccttgtcttctaccgcggccgcgcccccaacggcgtcaaaaccaactgggtcatgcacgaatttcgcatggaaaaccctcacacccctcccaaggaggattgggtgttgtgcagagtgttctacaagaagaaggcggagacggagacggagtcgtcgtacagcatggagaacgagcaggaggcggtgatcgccatggcacggagcgccgcggccatcaaggcgggtggatgctactccaactcctcctcgtctcacgacccagccgccgccggccatcactcgcccccgccattcccggcgtcgctcgccgcctgcagcagcagccaccactacagcagccacccaccgccgcctcccgatcaccaccaccaccaccacatgcccgtcaccggcggcggcggcggctccctcaacgagttcatccccaccaccagcatggcgctgtacagcagcatcttcgacttcagccagcatctcgacggcggcgccgtggcggcgtcggcgtcggcggcgggatcgagggtcgacggcggcgagcagtgcggtctgatggagctagggctcgaggagcactacaattacaacggcctgatgccgatgtga

SEQ ID NO: 12618 - DNA, 1080 bp, Oryza sativa
  Clone ID: TFbOSC400651j.C1.o8.fg
atggtggagactagtacatcccttgtgaaattagagcaagatggcagcttgttcttgcctccaggcttcagattccatcccacagatgcggaggtaatcttgagctacctcctgcagaaattcctcaaccctagcttcacctccttgccaatcggcgaggtcgacctcaacaagtgcgagccatgggatctcccaagcaaggcgaagatgggggagaaagaatggtacttcttcagccacaaggacatgaaatacccgacggggatgcgaaccaaccgagccaccaaggagggatactggaaggccaccggcaaggacagggagatcttcaacctgcagcctaccagctatggaggcagcagcaacaacaagaataataagcagctggttgggatgaagaagacgcttgtgttctacatggggagagctcccaagggcaccaagaccaactgggtgatgcacgagttccgtctccacgccaacctccacaacgacaacccgaaccttcgtctcaacctcaaggatgagtgggttgtgtgcaaggtattccacaagaagggagacgatcgcgaagccatcaacaagcagcaggcacaggctgcagctgttgatcagtactctgccggaacacccaacaacggcagctccgtcgaagccggcgacgacgacgacgacttgttccagctcgactccatcatcgaccccagcatctacttcagcaactcatcagctgccaacatcttgtcggcgccgcccaacatgtccaattccgtcgtcgctgccaactacggtgcaagtacgacgacgactggtactgctagtgctggtagcttccagcagcagccaaactactgcagcttgatcaacaaaagcatcagcagcagcaatgtctcctcttggaataatatgcctccacctcctcctgtagctgaaggaggagtccatggaattggaagcagctacagcttgcagcaccaggcagcaatggtgaaagccctacgagatgtcattcgtctcccaaatcctcttggcatgccgcagtacaagttagatgatgcttatctatgggactcatcgtaa

SEQ ID NO: 12619 - DNA, 657 bp, Oryza sativa
  Clone ID: TFbOSC29117j.C1.o1.fg
atggaaaaggttcaagcttcttgtgagggtgatcagggaatctgcaaaagaggagccaaaggtggccatccgatcgaccaaaatcttgtgggagggatgactatgtcgaccggtgtccctactactgtgcctcctaccccagcattagctgccttgaaaaacctacttataagggtggtggcagcagcagctgggaaaggcctcagcagcagcgcagaagaagcaaggtgtctttgggcaaagctgccggcgccggaggaggaggaggaggccggccagcagccggagaggccgccgtcgtcatatcggcggccaccgacatcgacgttgatggcgccggtggggctccctccggggttccggttccacccgacggacgaggagttggtgaactactacctcaagaggaagatccacggtctcaagatcgagctcgacatcatccctgaagtcgacctctacaagtgcgagccatgggagctcgctgagaaatcgttcttgccgagtagggatccggagtggtatttcttcgggcctcgggatcggaagtatccgaacgggttcaggacgaacagggcgacgagggcggggtactggaagtcgacggggaaagacggcgggtggtgcaccagcacggggggcgcgccatcgggatga

SEQ ID NO: 12620 - DNA, 1089 bp, Oryza sativa
  Clone ID: TFbOSC400510j.C1.o28.fg
atggtgaccagcaaggagtttgcaagggatcaggcggccatggatcagaagatcaagagcgacgtcggcgaggtggtgctcgccggagacgaggaagaagacggggacgtggtgctcccggggttcaggttccacccgaccgacgaggagctcgtcacgttctacctccggcggaaggtggcgaggaagtctctcagtatagagatcatcaaggagatggacatctacaagcacgatccatgggatctccccaatgcgagcacggtaggtggagagaaggagtggtacttcttctgcctgagagggaggaagtacaggaacagcatcaggcccaacagggtgacgggatccgggttctggaaggcgacggggatcgaccggccgatctactccgccgccgtcaacagcaactccggcgagtcgatcgggctgaagaagtcgctcgtctactaccgcggcagcgccggcaagggcaccaagaccgactggatgatgcacgagttccgcctcccgccggcgatcgccgccgccgacgcctccccgtgcatgcaagaagctgaggtctggaccatctgcagaatcttcaagagaagcatcacctacaggaagcagcagcagcagcaggcctggaggccgccggcgacggtgaccgtcaaggccccaccgccgggggactcgagctccaacaccggcagcttcgagtcggacggcggcggcgacgagttcatgaactgcggcctgactccggccatctcccagcagcagcagcacggcggccgtcatcagatgatgagcacgatgagctgcaacggcggctacttcttcaacgacggcatccatcacagccacagccaccacaagcttcatagtcaatggggctccctacaaatggcgccgccggagccgaagccggagccggagcagaagcctctgagctcgccggcgatgacgatcgccttccatcaaaacgaccatggcttccccgccgccgccgcggatttctacaaggatgggtacttggaagagattgcgaggatgatggaggtggctgatccaagtccaacaggattctatgactgtagatattga

SEQ ID NO: 12621 - DNA, 744 bp, Oryza sativa
  Clone ID: TFbOSC900128j.C1.o13.fg
atggcgacgccggggcagcagctgccgccggggttcaggttccacccgacggacgaggagctggtggtgcagtacctccggcggagggcgctgtgccggccgctccccgccgccgtcatcccggacgtccacgacgccaccgtgctcgacccctgggacctccccggcgccggcgatggtgaggcctacttcttcagcttccggcagctcgcggcggcgagcggcggcggcgggtggcggaggaggagggcggggagtgggtactggaaggcgacgggggcggagaagccggtgttcctgcgtggcttcgggtgcggcggcggcggcggcggcggcggccagcacctcgtcggcgtcaagacgacgctgctcttcctccgcgcgaagccgccgtcgcgcacccactgggtcatgcacgagtaccgcctcgccgccgccggcgctgtcgccgtcgccgccgccggacagacaaagcgcgggaaccatagttgcatggctcagccaggagaatgggtggtgtgccggatttttctgaagaacaacaggtcatcaagaaggcgagccggcgacgccgacggcgaaacgccggtcaccggtgtccacggtcaccgtcggcggcagccgtcgccgtcgccgtcgtcgtcgagctgtgtcacggctgaggtttcagacggagaaggagaagaagaagtcagcagtggcagcatcaatggtgctccatctgcctctcaaagagaggcctag

SEQ ID NO: 12622 - DNA, 1101 bp, Oryza sativa
  Clone ID: TFbOSC900350j.C1.o5.fg
atggaaaaggttcaagcttcttgtgagggtgatcagggaatctgcaaaagaggagccaaaggtggccatccgatcgaccaaaatcttgtgggagggatgactatgtcgaccggtgtccctactactgtgcctcctaccccagcattagctgccttgaaaaacctacttataagggtggtggcagcagcagctgggaaaggcctcagcagcagcgcagaagaagcaaggtgtctttgggcaaagctgccggcgccggaggaggaggaggaggccggccagcagccggagaggccgccgtcgtcatatcggcggccaccgacatcgacgttgatggcgccggtggggctccctccggggttccggttccacccgacggacgaggagttggtgaactactacctcaagaggaagatccacggtctcaagatcgagctcgacatcatccctgaagtcgacctctacaagtgcgagccatgggagctcgctgagaaatcgttcttgccgagtagggatccggagtggtatttcttcgggcctcgggatcggaagtatccgaacgggttcaggacgaacagggcgacgagggcggggtactggaagtcgacggggaaagaccggcgggtggtgcaccagcacggggggcgcgccatcgggatgaagaagacgctggtctactaccgcggccgcgcgccgcagggcgtccgcaccgactgggtcatgcacgagtaccgcctcgacgacaaggactgcgaggacaccatgcccatcaaggacacttacgcgttatgccgggtcttcaagaagaacgcgatctgcaccgaggtggaggagctgcaggggcagtgcagcatggcgctgctggagggcgcctgccagcagctgctcgccagcggcggcggcggcagccaggagcagtacgagacgccgtcgccgccggacgtccccgtcggatcaaccttcggtggggccgacgccgacgccgaggacgaccccgacaaggacgactcctggatgcagttcatctccgacgacgcctggtgctccagcaccgccgacggcggcgccgaggagagcacctcctgcgtggccctcgccggctga

SEQ ID NO: 12623 - DNA, 602 bp, Oryza sativa
  Clone ID: TFbOSC418825j.C1.o1.np
gacccatttgcgacgccggggttccgcttctacccgacggaggaggagcttctcggcttctacctccgccaccgcctcgccggcacgaggcccgacgtcgagcgcgtcatccccgtcgtcgacgtctacggctaccacccgtcccagctcgccgccctggccggggaggcgagcgcgcgcgacacggagcagtggttcttcttctgcccgcgcgccgagcgggagctccacggcggccggccggcgcgcaccacgccgtcggggtactggaaggccacgggatccccgtcctgcgtcatctcctccgccacaaacagggtcatcggcgtcaagcgcaccatggtgttctaccagggccgcgcccccaccggcaccaagacccgctggaagatgaacgagtacaaggccgtcgccgacgacgccgacgccgccgccgccgccatgctccaccagctgaggaacgagctgggagtgtgccgggtgtacatcagcacgggcacgctgagatcgttcgaccgccggccgctcgataatcaacgctgggacacgaacaaggccaagaaccagatcatcagcagcggccgcctcacgccggcgtcgtc

SEQ ID NO: 12624 - DNA, 1632 bp, Oryza sativa
  Clone ID: TFbOSC1203j.C1.o2.fg
atggcaacattgccacaaatggccgcgaccaaggagcgtcaagaggcggctaacccgaccacgacgaccaggacgctggtcgagtccgtcaccaactggatccgcgtctactccgacggctccgtcgaccgcctcggcccgccggaagccgccgcgttcatggtcctcgtcccgccgtacgacgacccacgggacggggtcaccgtccacgacgtcgccacggaccatggcgtcgacgtccgcctgtacctgacgacgacgacgccggccgggcgccgccctgttctcgtccatttccacggcggcggcttctgcttgtcccacgccgcgtggtcgctctaccaccgcttctacgcccgcctcgccgtggagctcgacgtcgcgggcatcgtctccgtcgtcctcccgctcgcgccggagcaccgcctccccgccgccatcgacgccggacacgccgcgctgctctggctccgtgacgtcgcgtgcggcaccagcgacaccatcgcgcaccatgcggtcgaacgccttcgcgacgccgccgacttctcccgcgtgttcctcatcggcgacagcgcgggcggcgtcctcgtgcacaacgtggcggcacgcgccggcgaggctggggccgaggctctcgacccgatacgcctcgccggcggtgtcctcctccacccgggcttcatcttgccggagaagagcccgtcggagctggagaaccctcccacgccgttcatgacgcaggagacggtggacaagttcgtcatgctcgcgttgccggtgggaaccaccagcagggaccacccgtacacgtctccggcggcggcggtgacggcggcggagggagcccagctgccgccgatgctggtgatggtcgcggaggaggacatgctccgcgacgcgcaggtggagtacggcgaggccatggcgcgcgcgggcaaggcagtggaaacggtgttaaacaagtttcccgcgcaatgcatacgtgttttcgtttctccgatccgcttacgaaatttcgatttgatggagaaacacgtcgagaagatgctcagtttaggctttcgtttcaacccgtctgcagaggatctcatcaccttctacctgccacggctgatcgccggcaagccaatgaaagacaccgagaaattcatctgccgcgctgatgtttacggcagcgagcccagtgacctcgccggaaagttcgcgccggtgcccaggtgcgagaaaggcggcaggttcttcttcactagctgcaagcggcacaaggggagtagcaccaagaaagagcgaacggcgggggctggcacctgggtgaggcagaacagcaaggaggtgaagaacaaggcgggggtcaaggtcggcgagacgcagaacttccgtttcaagaaggacgggagctacaccgactggctgatggaggagcaccactgctgccggcagcaagccgtcgccggcgacgaggagcccgtcatctgccggatgtacgtgtccccgcgggcgcctccggattccgcggcgcgccaggaatccgctgctttcgtgcagcagcagccggcgccgcaggtttccgagccgccgtgcgacaagaagaagagagatgatgtggcagaagaagcccctgccgcggcttag

SEQ ID NO: 12625 - DNA, 450 bp, Oryza sativa
  Clone ID: TFbOSC11898j.C1.o1.fg
atgcatccgagcggcggcgcgctgtcggtgccaccggggtttcggttccacccgacggacgaggagctcctctactactacctgaggaagaaggtggcctacgaggccatagatctcgacgtcataagggagatcgacctcaacaagctcgagccctgggatctcaaagatcggtgcaggatagggacggggcctcagaacgagtggtacttcttcagccacaaggacaagaagtacccgacggggacgaggacgaaccgggcgacgacggcggggttctggaaggcgacggggagggacaaggccatcttcctcgccaacgcctgccgcatcggcatgaggaagaccctcgtcttctacgtcggcagggcgccccacggcaagaagaccgactggatcatgcacgagtaccgcctcgaccaagacaacgtcgatgtccagttatgctag

SEQ ID NO: 12626 - DNA, 1131 bp, Oryza sativa
  Clone ID: TFbOSC406028j.C1.o19.fg
atgcatccgagcggcggcgcgctgtcggtgccaccggggtttcggttccacccgacggacgaggagctcctctactactacctgaggaagaaggtggcctacgaggccatagatctcgacgtcataagggagatcgacctcaacaagctcgagccctgggatctcaaagatcggtgcaggatagggacggggcctcagaacgagtggtacttcttcagccacaaggacaagaagtacccgacggggacgaggacgaaccgggcgacgacggcggggttctggaaggcgacggggagggacaaggccatcttcctcgccaacgcctgccgcatcggcatgaggaagaccctcgtcttctacgtcggcagggcgccccacggcaagaagaccgactggatcatgcacgagtaccgcctcgaccaagacaacgtcgatgtccaggaagatggttgggtggtgtgtagggtattcatgaagaagagctaccagcgaggcctcaacccggcggacatggcggcggtcgacgacgacgacctcctccaccaccaccaccaccccttcccaccggcccagctccacggcggcgccgccgaccacaagcacgacggcgccggcggccaccaccaccaccacctcatgcagccgcaccaccactacgacgacttcccttccttcgacccctccatgcagctcccccagctcatgagcgccgaccagccgccgccgccaccgccgtccctcctccccggcgtcccaccctccgccgccgctgccttgagctccctcgacgtcgagtgcccccagaacctcatgaagctaacgtcggccgccgccggaggcggtgccaccgggctgctccacgccggcggcgaccaccgcttcgccaccgccgccacggactggtccatcctggacaagctcctcgcctcgcaccagaacctggaccagctcttccagggcagggtcatcgccggagcgtcgtcgccggctgccatggctgctcctagccaccaccagcatctcatggatcagctcgccggcggcggcggcggcaccgcctcgtcgttgcagaggcttccactgcagtatctggggtgcgaggcagccgacctgctcaggttctccaagtag

SEQ ID NO: 12627 - DNA, 1191 bp, Oryza sativa
  Clone ID: TFbOSC1060j.C1.o1.fg
atggtggagtctactacatcccttgtgaaattagagcaagatggaggcttgttcttgcctccaggcttcaggtttcacccgacggacgctgaggtaatcttaagctacctcctgcagaagttgctcaaccctagcttcacctccttgcccatcggcgaggtcgacctcaacaagtgcgagccatgggatcttccaagcaaggcgaagatgggggaaaaagaatggtacttcttcagccacaaggacatgaaatacccaactggcatgcgaaccaaccgggccaccaaggagggctactggaaggccaccggcaaggacagggagatcttcaggcagcctgcagctgttaatacaagcagctatggaggcagcagcaacaagaagaagcagctggttgggatgaagaagacgctggtgttctacatggggagggctcccaagggcaccaagaccaactgggtgatgcacgagttccgtctccacgccaacctccacaaccaccacccaaaccttcgtctgaatcccaaggacgaatgggttgtgtgcaaggtcttccacaagaagcagggagacgaagccatcaacaaccagcagcagcaaccacagtatgcagccgtggatcagtactctgccgaaacccccaacagcggcagctccgtcgttcaagccggcgacatcgacggcggcgatgacttctttcagctagacgacatcattgaccccagcatctacttcgtcagcaactcttccaacatcttgtcggcgccgcccaacaacaacaacgcggtttattccgtttctgcaagtacgacgacgactaatactactgccgttagcttccagcagcagccaaactactacagcttgatcaacaaaagcagcagcagcagcagcagcaactatagtgctcctctgcagcagcacgtctcttcttggaatattacgcctggagctggaggagcccatggaattggaagcagctactacaacttgcagcagcagcaggcagcaatggtgaaagccctagaaaatgtcattgctgtcccgaattttggtactctactgccgagcagcaacaagctgaagggtttatcgaagtcggcgatggctgggcttacgcagcagaatccccttggcgtgccgcagtacaagatagagaattatggggatcattacatatcacgacagtaa

SEQ ID NO: 12628 - DNA, 1059 bp, Oryza sativa
  Clone ID: TFbOSC33262j.C1.o4.fg
atggctatgggaatggaaggatcgggaggaggagggtcggcgaaaaagaaagaggagagcttgccgccggggttcaggttccacccgacggacgaggagctcatcacctactacctgcggcagaagatcgccgacggcggcttcacggcgagggccatcgccgaggtcgatctcaacaagtgcgagccatgggatctcccagagaaggcaaaaatgggagagaaggaatggtacttctttagcctaagggatcgaaagtacccaactggcgtgcgcacaaaccgagcaactaatgctggttattggaaaacaacgggaaaggataaggaaatcttcactggacaaccaccagcaacaccggagttagttggaatgaagaaaaccctagtgttctacaaaggaagggctccaagaggtgagaaaaccaattgggtcatgcatgagtaccgactccactccaaatcaatccccaaatcaaacaaggatgagtgggtcgtctgtcgcatatttgccaagactgccggcgtcaagaaatacccctccaacaatgctcattcccgatcccaccacccatacacactagacatggtcccacctctcctcccagctctattgcaacaagacccatttggtcgtggacaccacccttacatgaaccccgttgacatggcggaactctcccggtttgctagaggtacgccggggttgcacccacacatccaaccacaccccggttacatcaacccggctgcgccttttacactatcaggccttaacctcaaccttggatcctcgccagccatgcctccaccaccaccaccgccaccacaatccatcctccaagcgatgtcgatgccgatgaaccaaccaagaagtactacaaaccaggttatggtaacagagcaaatgattccaggactagccaatggtgtcatcccacagggaacagatggaggttttaccacggatgttgttgttggaggcactggcatcagataccagaatttggatgtagagcagctggtggagaggtactggcctggtagttaccaaatgtag

SEQ ID NO: 12629 - DNA, 1161 bp, Oryza sativa
  Clone ID: TFbOSC1062j.C1.o1.fg
atgcctgcccttccaccaggcttccgcttccaccccaccgacgaggagctcatcgttcactacctcatgaaccaggccgcctccatcaagtgccccgtgccaatcatcgccgaggtcaacatctacaagtgcaacccatgggaccttcctggtaaggcgctgttcggcgagaacgaatggtacttcttcagcccgagggaccgcaagtaccccaacggcgcacgccccaaccgcgccgccggctcggggtactggaaggccaccggcaccgacaagtccatcttgtcaactccgacgagcgacaacatcggcgtcaagaaggccctagtcttctacaagggcaagccccccaagggcgtcaagaccgactggatcatgcacgagtatcgcctcacaggcacatcagctaacaacaccaccaccacaaagcagcgtagagcatcatccatgaccatgaggctggacgactgggtgctgtgcagaatccacaagaagagcaacgacttcaattcctctgaccaacacgaccaagaacccgagggatcaaccgtcgatgaacagcttgaagacatccatgacaacaactcttcctctcaacaacctcctgctccacctgacatgaacaaccaacagtcagatttccagcccatgacggcgatgagcatgagcaagtcatgctccctcaccgatctcctcaacaacctcgactgcgccgcgctctcgcagtttctcctcgacggctcatccgacgccatcgctgagcttcctgctcctcccagccctctaatatatccaaaccaaacactaaactataacatcaacaacaacatgccacacgccttcgagtcacgcctagatcatcacgatggttacgttaacaattataatgttaatggcctaaggaggaagagaatgatggcgtgtagtgcaacttcttttgatgatggcagcagcagcagcagcagtgactttttgcatgttgccaagaaaccgctgctgctgccaagtgattcaaggggcagtggttttggaggaggttactgcaaccagcagctttcagagactgcgactggttttcagtttcagaacggcaatatgttgagccatccatttcctctgaaccagcagctactgctgaacaatcatctgcagatgcagtag

SEQ ID NO: 12630 - DNA, 981 bp, Oryza sativa
  Clone ID: TFbOSC422386j.C1.o8.fg
atgactctgcccccgggtttccggttccacccgaccgacgatgaattggtcggctactacctcaagaggaaagtcgacagcctcaagatcgagcttgaggtcatccctgtcattgatctctacaagttcgagccatgggagctaccagagaagtcgttcttgccgaagcgtgacctggagtggttcttcttctgcccacgagaccggaagtatccgaacgggtcgcggacgaacagggcgacgagcaccgggtactggaaggccaccggcaaggatcgcaagatcgcctgcgccggcgaggtcttcggcctccgcaagacgctcgtcttctacaagggtcgcgctcccggcggcgagcgcaccgactgggtcatgcacgagtaccgcctctgccaggacctcgcccatggcgtctccaacttcatcggggcgtacgcgctgtgccgcgtgatcaagaggcacgaggcgggcctccatggcgagccgccggcggcgaaggcgaaaggaatgatcagcaaggtgtcgagcagctcgtcccttgtcaccgtcgaacaccagctcagcagccggggcaacgcctcgccgtcgttcacgcccaccaacaatggcagcccgctcgtcgacgagatgttcgtcggcggcggcggcggcgacccgttccagctgcttccgagctgcgtcccgtaccatggcggcgacgcgtgcgggttcgacttgccgccgctgtgcatgcctcagactcaggacccgttcttctccgacgccggcttcacgcaggcagcgcctcctctctacggcgacgtcatgggaagcgtgtcggagcacgagctcaagtgggacaccctgggcggctactccggcggcggcggtggggagctctggaacgcggcggcggcgccgctgctgtgcaggcaggccagcgacggcgacgacctcacggcgtggttcacggccgccgacgacaacatgtccgtcttctga

SEQ ID NO: 12631 - DNA, 318 bp, Oryza sativa
  Clone ID: TFbOSC21481j.C1.o1.fg
atggcgtgtgcagagacgtatatcgagaacatggaggacagatgcatctacttctttagcaggaggctattcgcagcgaaggctaggaacaagaggcagccgatgagggtggcaaacggtgggacgtggaaggcatctggtgggagcaagacggtgaggagcaagaaggttggcggcatcgatgttggtcagaagctcccatggtgttctacgagcgtaggttcgagggcgaccaaaaccctgtcaagaccaactgggccatgcacgagtacaccaagatcattcctagctccaaaaaccagtgtatttacaatgtaa

SEQ ID NO: 12632 - DNA, 1026 bp, Oryza sativa
  Clone ID: TFbOSC401316j.C1.o17.fg
atggagcagcatcagggccaggcaggcatggacttgccccctggcttccgcttccacccgaccgacgaggagctgatcacgcactacctcgccaagaaggtcgccgacgcccgcttcgccgccctcgccgtcgccgaggccgacctcaacaagtgcgagccctgggacctgccatctctggcgaagatgggggagaaggagtggtacttcttctgcctcaaggacaggaagtacccgacggggctgaggacgaacagggcgacggagtccgggtactggaaggccacggggaaggacaaggacatcttcagacggaaggccctcgtcggcatgaagaagacgctcgttttctacacggggcgcgctcccaagggggagaagtctggctgggtcatgcacgagtaccgcctccacggcaagctccacgccgccgccctcggcttcctccacggcaagcccgcgtcgtccaaggtacacgaacgcacggtgttcaagaagagcctcgtggaggtgggcgcggcgggagggaagaaggcggccgtggtgacgatggagatggcgaggggagggtcgacgtcgtcgtccgtggcggacgagatcgccatgtcgtccgtcgtcctccctccgctgatggacatgtccggagccggcgccggcgccgtcgacccggcgacgacggcgcacgtgacctgcttctccaacgcgctggagggccagttctttaacccgacggcagtacacgggcacggcggcggcgactcctcgccgttcatggcgagcttcacgcagtacgggcagctgcaccacggcgtgagcctggtgcaactcctggagagctgcaacggctacggcggcctcgtcgacatggcagcgtccggcagccagctgcagccggcggcgtgcggcggcgagcgggagaggcttagcgcgtcgcaggacaccggcctcacctccgacgtgaacccggagatctcgtcatcctccggccaaaaattcgaccacgaggccgcgctatggggctactaa

SEQ ID NO: 12633 - DNA, 603 bp, Oryza sativa
  Clone ID: TFbOSC101556j.C1.o16.gm
atgagccaatcgccgccggactcctcctccgcggcggcggtgcccctggcgccggggtttcgcttccaccccaccgacgaggagctcgtctcctactacctccgccgccgcatcctcggccgccgcctccggatcgacgccatcgccgaggtcgacctctaccgcctcgagccgtgggacctcccctccctctcccgcatccggagccgcgacgcgcagtggtacttcttcgcccgcctcgaccgcaaggtcaccggcgccggggccggcggccgcggcggccccgggaacaggaccaaccgcgccacgccgcgcggctactggaagaccaccgggaaggaccgcgatgtccaccaccgcggcaagctcgtcgggatgaagaagacgctcgtcttccactccggtagggcgcccaagggccagaggaccaactgggtcatgcacgagtaccgcctcctcgacgccgacggcacccagcaacaagccaagtctgaagaagaagaactagtcatcgcttgccaggtccacctcaaacgccgcgtctcactggcaagtgggccccaggacatcaccggccccacagacagtgacactgatgtttaa

SEQ ID NO: 12634 - DNA, 603 bp, Oryza sativa
  Clone ID: TFbOSC101918j.C1.o4.fg
atgagccaatcgccgccggactcctcctccgcggcggcggtgcccctggcgccggggtttcgcttccaccccaccgacgaggagctcgtctcttactacctccgccgccgcatcctcggccgccgcctccggatcgacgccatcgccgaggtcgacctctaccgcctcgagccgtgggacctcccctccctctcccgcatccggagccgcgacgcgcagtggtacttcttcgcccgcctcgaccgcaaggtcaccggcgccggggccggcggccgcggcggccccgggaacaggaccaaccgcgccacgccgcgcggctactggaagaccaccgggaaggaccgcgatgtccaccaccgcggcaagctcgtcgggatgaagaagacgctcgtcttccactccggtagggcgcccaagggccagaggaccaactgggtcatgcacgagtaccgcctcctcgacgccgacggcacccaggtacctgtgaaatcatttgatccatctcaaatttcgcaggatctaccgtaccacgagatcacgagattagcggtagcaccaaaaaaattctgttcttttagcttgtctcctgctaggcttgtgtga

SEQ ID NO: 12635 - DNA, 1899 bp, Oryza sativa
  Clone ID: TFbOSC402917j.C1.o4.fg
atgagccaatcgccgccggactcctcctccgcggcggcggtgcccctggcgccggggtttcgcttccaccccaccgacgaggagctcgtctcctactacctccgccgccgcatcctcggccgccgcctccggatcgacgccatcgccgaggtcgacctctaccgcctcgagccgtgggacctcccctccctctcccgcatccggagccgcgacgcgcagtggtacttcttcgcccgcctcgaccgcaaggtcaccggcgccggggccggcggccgcggcggccccgggaacaggaccaaccgcgccacgccgcgcggctactggaagaccaccgggaaggaccgcgatgtccaccaccgcggcaagctcgtcgggatgaagaagacgctcgtcttccactccggtagggcgcccaagggccagaggaccaactgggtcatgcacgagtaccgcctcctcgacgccgacggcacccaggatctgcatgtggtgtgtagaatcttccagaaaaatggatctgggccacaaaatggtgcacagtacggtgcgccatacttggaggaagattgggaagaggaggatgatgcaattgagaacatgcctgccagtggcgctttcgctgaaatggctgcagtcacagatactgcagatgagtcgactgaggaagatgggaatttctcccttaaaactaatgatgagcctttacaaacccaagaataccagccagagataactcctgtgaaagctcaaggttcaaatgaggagaccaatggcggtggttacagttgtgatgttttttctctggatgagattttgcaggaacctgaaaatgtctgcaaaaatgaagagcagaatgccattgatgacaagttcactatcgcagagttatctggatacccaaggcaagatgatggctatgtaggcgagaatggtcctgtgaattggattgacccttcaaatggtgataatacaaactggcctttgagagcatatagtactcagaaccatgtcaatggaacacttagcgctgatggtttctttgacacggtgaatggtaccaactcatattcaggtccttcagataaccagaacctgtatttgcaagatgatggcttgacttcttctcatcaagtgggcgataacatgccattttatgacgcatcatctaatcacaaatgggtagatggaaaggatgattatttgaatttgaatgacctcctctacccgccagcagaaaatcaacccctgtttgatgctggggatgacctgatggcttacttcgatgccacggaggatgatttcaaatttgatattatgggcacagaagattctaattctcaacttccagacatgtcgaactttgtccaaaaggatgataacaacaataagtttacattagatgggatctctaataccgctttgtatggtgcttcttcatctggatcccatggcaatatgtatccagacactgcagtaccagatatgccgatggatgacactgttgacaaaagtttcggaaagcgccttgccagcatgctgggttcaattccagctccacccgcaatggcttcagagttcccgccgagcacaggaaaatctgttgtcccacttagtgctgtcaacccgagtagctctatccgtgtcactgcaggcattatccaactcggtggtatcacttttactggtagcaccgagcacctgcagaagaatggagatttcaatttgctcctctctttcactgtcgagggcgacgtctcaaccaaatccattggttttgaaccggatacgcagatgagcaccacgccaatggtgttgcgcagcggcatgtatcttttcttcgtatcggcgatgattctcatgttgagctacaaagttgggctgtgtatctacagcaggtaa

SEQ ID NO: 12636 - DNA, 975 bp, Oryza sativa
  Clone ID: TFbOSC400500j.C1.o36.fg
atggccgggctgagggagatggagtcgacgctgccgccggggttcagattctgccccagcgacgaggagctcatctgcttctacctccgcaacaaggtcgccaaccaccgcgtcgcctccggcaccctcgtcgacgtcgaccttcacgcccgcgagccatgggagcttcccgaggtggctaagctcactgcagaggagtggtacttcttcagcttcagagaccggaaatatgcgacagggtcacggacgaaccgtgcgaccaagacaggttactggaaggccacggggaaggaccggattgtccatgagggtacaacacgagcggtggtcgggatgaggaagacgctggttttttacctcggccgtgcccctaatgggcaaaagacgacatgggtcatgcatgagttccgccttgaaacacctaactcccaacctaaggaggattgggtgctatgtagggtgtttgacaagaagaagccatcgacaatagaagccgagggtggcggaagcagtggcagcgaccttttcattcccggtgccaccgatggctctactgacccctcctcgccgacgacgatggcacctctccttggctcatcgcccgatccgacagtggtggacaggttcgaccaccggtcagcggcggtgccaccattaatggtactcatgcaaggtggtggggaccaaatgatcagtggtagcggtgtccactgcagcaacaacgacaactccggtagtagcagcgcactgcttaacctgacgatgctgcaatacagcttcctagaacatcggccaactggtgacgacatggcggtgggggcccactttggaacatgccagggtggcaacaacgatgccacgatggcacttgggatggggtttgaggagcatggcatgggagagatcatagagatggaaccagcatggcgccaaggtggtagcaactgcgtgtacagggacgagctctacttctag

SEQ ID NO: 12637 - DNA, 1056 bp, Oryza sativa
  Clone ID: TFbOSC101628j.C1.o7.fg
atggcgggcgcggatgggctccctcccggcctcaggttcgaccccagcgacgacgagctcgtctcccgctacctcctccgtcgcatccagcagaagcccctcccgctcgacggcgtcatcgtggatgccgatcccctgagcgtgccgccatggacgcctcttgcggatcacacccgaggcgacgaggccttcttcttcgcgggggcacgcgccaagaatggcaagggaaagcgacagaagcgaaccgtggagggcggagggttctggcaggggcagcggatggccgtggatggcgagcggctggtcgtcccaggcgacggtggaggcggcgtcgacggcagcggcggcggcggcctggagatcacgtggcgcaagtatgtgctgagcttcttcgccgagggtgaacagggcagctcgggctgggttatgcacgagtacgccgtcacgtcgtcggctgacctcgcctcgtcgccgctccggctgtaccgcgtcagaatcgatgacgatgacctgtctgtgtcgcaaacagagggcaccgagctgtccgagcagggctcctccggcgtgatcgacgacgattattggcgggaagccgatgccaccggtggtgcagagagagaagagatcgctctgctcgacgaggagcgctgcccgcaaccacagcccgctcctcctactgatgctctagtgccaccactgcagggccagaactcctacgacgtgatggccgattcgtcactgctatttgctgatcttcccgggagaatcgatgacgatgagctacagcgatctctgcgtgtgtcggacatgcctgacctgttcttgtcgcagacagaggaagccggtgccggtggtggtggtggcgcagctccagtgctgaacaagcagagtaactcctcacctttgggcgtcatggacagcgaggtgccgattgtgttgtctgatctagagttcccagagagcattgatgaagtgcttagctacattgacttcgccacggatgactgcctcgatttcgacatggacgagctgttttccgatatgccagcagactag

SEQ ID NO: 12638 - DNA, 867 bp, Oryza sativa
  Clone ID: TFbOSC419079j.C1.o12.fg
atggtggaggcgagaatgccgccggggttcaggttccacccgagggacgacgagctggtgctggactacctcctgcacaagctcgccgccggcggccggggaggaggggtgtacggcggcggcggcggcgtcgccatcgtcgacgtcgacctcaacaagtgcgagccatgggaccttccagacgcggcgtgcgtgggaggcaaggagtggtacttcttcagcctccgcgaccgcaagtacgccaccggccaccgcaccaaccgcgccacccgctccggctactggaaggccaccggcaaggaccgctccatcacccgccgctcctccatctcctccggcgagccctcctcctccgccgccgccgccgccgtcggcatgcgcaagacgctcgtcttctaccgcggccgcgcccccaagggccgcaagaccgagtgggtcatgcacgagttccggctcgaaccgcagcctctccacctcaaggaggactgggtgctatgcagggtgttctacaagaccagacaaacaattccaagcccatcatctgaagaggccgtcacactgcccaatgagctagacctgcctgccacgccttcgctcccgcccctcatcgatgcctacatcgccttcgatagcgcaccgacgacgacgccatcgatggtcgggagctacgagcaagtgtcctgcttctccggcctgccggcattgccaatgaagggctccatcagctttggggacctgctggccatggacacctctgcagagaagaaggccatcagggtactgcacaacagcaacactgcaaagctggagctctccccagattggggacaggagagtggcctgtcacagatgtggaacccccaataa

SEQ ID NO: 12639 - DNA, 1479 bp, Oryza sativa
  Clone ID: TFbOSC401860j.C1.o13.gm
atggcagttgagggttttgaggaagcaattaaatgccttgagaatttgaagctggaatctggagaggccagtcttgagcagcggcttccggcggcggcgtgcggtgatcatcacacagcagcaggggcagggctgccgccgggattccggttccacccgacggacgaggagctcctcctccactacctcggcaagcgcgccgcggcggcgccctgcccggcaccggtgatcgccgaggtggacatttacaagtacaacccgtgggagctgccggccatggcggtgttcggggagtcggatggcgagtggtacttcttcagcccacgcgaccgcaagtaccccaacggcgtccgtcccaaccgcgccgccggctccggctactggaaggccaccggaaccgacaagcccatctccatctcggagacgcagcagacggtactgctgggcgtgaagaaggccctcgtcttctaccgcggtcgcccgcccaagggcaccaagaccagctggatcatgcacgagtaccgcctcgccaacgccgccgcctcctcctcctcctcctatactagtaacatgaagcagctggcctcatcatcatcgtccagctccagcagcgccagcatgaggctggacgagtgggtgctgtgcagaatctacaagaagaaggaggccaaccagcagctgcagcactacatcgacatgatgatggacgacgacaacgatgacgaacacaacctgcaggtgcagcagcagcagcagcagcaggctcaaagccaccggatgccaaggcctccatccatctcagactaccttctcgactactccgacgacctcccgccgtccaccgatcagacgccatctctgcaccttggattcacggcggtgaacgagggcaacaacaagaggcacaaaactatggaggaatattattctatttccatttccactgcagatatgctgcatgcgtcgtcgtccacgtccaacaacaagtcgacgcaaatcaacttctcctccatatttgagccgcagacgcctgcagctgcgggccatcagctgatcgatgaagggcggtggccgggtggggcttggagaagtggccctcaagtgcaaacgagcgacggcaggaagagcagcggttgggctctcagcgtggaggcggtggaactttggatttggggatttggggcggcggtggtggccagatttggggaaaacaatggtggtggtcattgggcgccggcgaggagtgaaatggggtcatggagagacaaggagcttggtgatttcgtcatagaaatgcttctatccatgataaaggtgctcgtcacagaattgctttccagctggctagtgacaagcatcgtccaagccacgtggctgccatacgtggaatccacattggatgtgacatggcagatgacggcggttgatgtagagcatggtggcagcgacatggagtgcgcgcgcgtgctggctttatag

SEQ ID NO: 12640 - DNA, 1095 bp, Oryza sativa
  Clone ID: TFbOSC401559j.C1.o11.fg
atgagcgacggcaaggactccctcgacctctccggcctcggcgccgccgtccccaacgccaaagagctcagcgcggaggacaaggccaacctcgtggagtcgattaagaacacgctgcagggattggcggcgcggcacacggacgtgctcgagagcctcgagcccaaggtcaggaagcgcgtggaggtgcttagggagatccagagccaacacgatgatctagaggcgaagttctttgaggagagagctgcacttgaagctaaatatcagaagatgtatgaaccactttactccaagcgttatgaaatcgtgaatggtgtggttgaggtagatggtgtcaccaaagaagctgcagatgaaacccctgcagagcagaaagaggagaagggtgtaccagagttctggcttaatgccatgaagaaccatgaaattctgtctgaggagatccaggagagggatgaggaagctcttaagtacctcaaggacatcaaatggtacagaattagtgagccaaagggtttcaagcttgaattttacttcgatactaatccattcttcaagaactcggtgcttaccaaaacataccacatgattgatgaagatgaaccaattctggagaaagccattggtactgaaattgaatggttccctgggaagtgtttgacacaaaaggttctcaagaagaaaccaaagaagggctcaaagaacactaaacctatcacaaaaactgaaaactgtgagagcttctttaacttcttcagcccacctcaagttcctgatgatgatgaggaaattgatgaggatacagctgaacagttgcagaaccaaatggagcaagattatgacattggatctaccatcagagacaagatcattccacatgctgtttcatggtttactggagaggctgctcaagatgaggacttcgaaggcattatggatgatgaagatgatgacgatgaagatgacgacgatgatgaagatgaggatgacgagggtgatgatgaagacgacgaggatgaaaagaagggcggacgagttcctgcaggggaagggcagcagggagagcgacctgcagaatgcaagcaacagtaa

SEQ ID NO: 12641 - DNA, 1227 bp, Oryza sativa
  Clone ID: TFbOSC400419j.C1.o15.fg
atggtgagagaacctcaggatcttcggctaggggagcgggacctccttgaagagatgtcgatgaacgaagaggttgaagatggcgaagtcaagccgctgggtagggtcgaatccatggacgaaactcctggagaggtggccaagctccggtgtcgacacggggctcggggagcggcggtggtggccagcgcgtggagagggagcaacaccggttcgtttgttcttgttcgatcctacattaccatcaccttccgcggcttccgtcctccccgtcttgctcgcctaatccgaagcccaagttctccttgctcgaaaacttgccgcctcatcacgccggagagtatcatcgccaccatctcccaccgcagcaccatgaacgggatcgagctctcatcggaggacaaggctatcctcgtggagacgctcaagaacaagctgcaggcgttggcggagcaacatgttgacgtgctcgagagcctggcaccctcggtcaggaagcgcgtcgatgtgctcatggagattcagagccaacatgatgaactagaagtgaagttcttcgaggaaaaagctgctctagaagctaaatatcagaagctttatggaccattgtactcaaaggaaaagggtgttccagatttctggctcaatgcaatgaagaacaatgagattcttgctgaggagatccatgagagcgatgaggaagctctaaagtaccttaaggacatcaaatggtgtagaattgatgatccaaagggttttaagttcgaattcttcttctatacaaatcccttctttaaaaatcaagtgctgactaaaacataccacatgatcgatgaagatgatgaacccatcctagagaaagcaattgggactgaaatcgaatggcatccaggatattgtttgacacaagaggtgctaacaaaggagagttcagagagcactaaacctataacaaagactgaagaatgtgagagcttctttaatttctttagcccccctcaagttccagatgatgatgcaaaaatagatgaaaataccgctgaagaattgcagaaccaaatggaacgagattatgacatcgcatctactctcagggataagattataccacacgctgtttcttggtttactagagaggctgttcaagacgaggattatggagcttcttgggtggatgatgaagaagaggatgacaataatgatgaatatagtgatgaagaagcataa

SEQ ID NO: 12642 - DNA, 561 bp, Oryza sativa
  Clone ID: TFbOSC25825j.C1.o2.fg
atgaacgggatcgagctctcatcaggggacaaggctaaactcgtggagacgctcaagaacaagctgcaggcattggcggagcaacatgttgacatgctcgagagcctggcgcccgcggtcaggaagcgcgtcgatgtgctcatggagattcagcgttctaaaattgtgagtggtgttcttgaagtagagggcgagaccgaagaaagagaggaaaagggtgttccagatttctggctcaatgcaatgaagaagaatgagattcttgctgaggaggtgctaacaaaggagagttcagagagcactaaacctataacaaagactgaagaatgtgagagcttctttaacttcttcagcccccctcaagttccagatgatgacgcaaaaaatgacgaatatacccttgcccatgttgccagatctactcttagggacaagattataccacacgctgtttcttggttcactagagaggctgttcaagacgaggattatggggcttcttgggtggatgatgaagaagaggatgacgacgatgatgaatatagtgatgaagaagcataa

SEQ ID NO: 12643 - DNA, 1125 bp, Oryza sativa
  Clone ID: TFbOSC23522j.C1.o5.fg
atgggcggcgacaaggagaacctcgacctctccgacctcaacgcctcgctgcccgccgccgccgccgctctcagcgccgaggaccgcgccggcctcgtcaatgccctgaaggataagctgcagagcttggcgggtcagcacacggacgtgcttgaggcgctctcccccaatgtcaggaagcgtgtcgaatatttgagggagatccagggccagcatgatgaaatcgagttaaaattctttgaagagagagctgcgcttgaagcgaagtaccagaagctttatgaacccttgtacacaaagaggtataacatagtaaatggagttgttgaggttgatggtggaaatgacgaaccagccagtgaaaatgctgctgagggtaaagatgcagatgctaaaggagtcccagatttttggcttactgctatgaaaacaaatgaagtgctttctgaggagatccaagagcgtgacgagcctgctttgaaatatctgaaagatatcaagtgggctagaattgacgatcctaagggtttcaagctggattttttctttgatacgaaccctttcttcaagaactctgtcctaacaaaaacgtaccacatggttgatgaagatgaaccaattttggagaaagcaattgggactgaaattgagtggtatcctggtaaaaacctgacacagaagattctaaaaaagaaacccaagaaaggttcaaagaatgcaaagcctattaccaaaactgaagtctgtgagagcttcttcaactttttcagtcccccgcaagtacccgatgatgatgaggacattgatgaagacactgctgatgagcttcagggtcaaatggaacatgattatgacattgggaccaccataagggataagatcatcccacatgctgtttcctggtttactggtgaggctgtgcaagccgaggattttgacgatatggaggatgatgaagaagatgatgaagacgatgatgaagatgaggaggaggaagaagaggatgaggatgaagacgaagacgatgaggaagaaaaaagcaagccaaagaagaagtcggcaggcaaaccgaagtattttgcgttgaactgcccaggaaattattggttggttgtgcacgggtga

SEQ ID NO: 12644 - DNA, 906 bp, Oryza sativa
  Clone ID: TFbOSC400044j.C1.o55.fg
atgagcaatcccgagctcttgtcagaggaaaaggccatcctcgtggagacgctgaagaacaagctgcaggcgttggcggagcaacatgttgacgtgctcgaaagcctggcgcccgtggtcaggaagcgcgtcgatgtgctcatagagattcagagccaacatgatgaactagaagcgaagttcttggaggaaaaagctgctctagaagctaattatcagaagctttatggaccattgtactcaaagcgttctgaaattgtgagtggtgttcttgaagtagagggcgagactgaagaaagagaggaaaagggtgttccagatttctggctcaaagcaatgaagaacaatgagattcttgctgaggagatccatgagagcgatgaggaagctctgaagtaccttaaggacatcaaatggtgcagaattgatgatccaaagggttttaagttcgaattctttttcgatacaaatcccttctttaaaaatcaagtgctgactaaaacataccacatgattgatgaagatgatgaacccatcctagagaaagcaattgggactgaaatcgaatggcatccaggaaattgtttgacacaggaggtgctaacaaaagagagttcagagagcactaaacctataacaaagactgaagaatatgagagcttctttaacttcttcagcccccctcaagttccagaggatgatgcaaaaattgacgaaaataccgctgaagaattgcagaaccaaatggaacgagattatgacattgcatctactctcagggacaagattataccacatgttgtttcttggttcactggagaggctgttcaagacgaggattatggtgcttcttgggtggatgatgaagaggatgatgacgatgaatatagtgatgaagaagcatag

SEQ ID NO: 12645 - DNA, 702 bp, Oryza sativa
  Clone ID: TFbOSC420713j.C1.o28.fg
atgacggcgccggcggacaaggggaagaaggccaagaccgacgccgacggcggcgccgccgaggagaacgagcagatcgacggcgccctcgtcctctccatcgagaagctccaggagatccaggacgagctcgagaaggtcaatgaggaagctagtgacaaggttttggaggtcgagcagaaatacagtgagattcgcagacctgtctatctccgaaggagtgacgttatccaaacaatccccgacttctggctgacagcgtttctgagtcatcctctacttagtgagcttttgaccgaagaggatcaaaagatgttcaagtacctggagtctgtcgacgtggatgattctaaagatgtcaagtcaggctactccataactcttaccttctccgagaacccgtactttgaagacaaagagctcacgaagacatatgccttcgctgatgacggaacaaccacaataaatgctactagcattaagtggaaagaaggaatggaaattgcaaatgggaatgccaagaagaaagggagcaagcgaccattggttgaggaaagtttcttcacctggtttactgatacagagcacaagagtcttgctgatggtgtgcaagatgaggaggctgaagagttaggagaggatgacgacgaagaggggtctgatgctgatgagggtgaagaggatgaggaggaggagaactga

SEQ ID NO: 12646 - DNA, 1782 bp, Oryza sativa
  Clone ID: TFbOSC401316j.C1.o10.hg
atggcggcggcggagcagaaggggaagaagccgaggaccgacggcgcggaggccgagcccgtcgacgccgccctgctgcagtccatcgagaagctccaggagatccaggacgagatcgagaaggttaatgaggaagcatgtgataaagttctggagttggaacagaaatacaacgaggttcgcagaccagtttatgttcgacggaataaaattatcaagcaaattcctgacttctggctgacagcgtttcttagccatcctatgcttggtgaactattaactgaagatgatcaaaagattttcaaacacttggagtctatcgacgtggatgactcagaagatatcaaatcaggctactccattactctcacattctcccccaatccatattttgaagatacaaagcttacaaaaacatattcctttagtgacgatgaagcagtcaaagtaaaggctacctccatcaggtggaagaaaggaatggatattgccaatgatcgtgcgtacacgaagaaaggggacaagcgaatcttaattgatgaaagtttctttacttggttcaatagtgaaaagaacagaagttttgctcatggagctatggatgaggtggcagatgtcatcaaggaagatctgtggcctaatcctttgaagtacttcaacaatgaatttgaagaagaattagagctactggatgacgatgacgagcaatatttttttgcgcttgactggtatctgatgatgacgatgaggaggaggatgatgaagaccaaggtgaaggagaggaggatggagaggagaactgagctctctgtcatgtcagattcttttggcctggacaacttatgtctgcagaaagcggagaccgggcctcctggagggctgaaacagcagggcgtccccttttgcggcgttgtggtgctcgacttagctggcagtttgaattcaggcggccgcgtgagatgggccgctcgcttcgccggcccgtccgggcctccgagcgtccccgctcgtcgcctcgtcccctgcctgcgccgcagtggagcaaccggcactaccgaaccgctcggcgtagcatccacgcagcgcaggggaaggaaagccgaagcgcggccgccgcgcgtgagatcgacgcgcggcgacttcgccaaccttccctataaagcgctgccccaatcgccaagcccaccgacctcctcctcctctccagaccggaggatgtccggcgagagatgcgccgggcggccgctgttcggcggcgccatctccagtaccttccccgtccggttccaggaggtgttcgttgacccggcccgcgacgagagcctcatcttcgagctgctcgacctcaagggcgaggtagaggacggcggcagcgcgctctggttcctgcgcgacatcgccaacgagcaggacgcgggggacaacttggtagttgagcattctgggacgatcgagctaggtggtctgcgatttggagatgctcctgcagtggctggaactgcggttggtcagctggctatctcaaaaggaaggcaaggcagagaagcacagaacattgttcgactttacttggccaatatacgcctcaagaatgcagctactgatgtagttattactgcatatgagccactgttgataaaccccttgagtgaaagcgccagtgcagttgcagccggtccagcagtaccagcagaacaagcaggatgcttagcaatgtctgagatcttcaagctcgccgtgatgaacttcaatgcaccaaggatcaggatgacgaacatgtga

SEQ ID NO: 12647 - DNA, 5095 bp, Oryza sativa
  Clone ID: TFbOSC4252j.C1.o2.fg
atggaccatatagctgaagaagagactgtgggagttgcggaagaccctggtttggctgatgttggcaaggctgatgagaccaaggaagaaggtggtggtgctggagtgcacttggatgaaactagggttgcagtggatgatcccacggaggtgcgtgcttcgcagattgacgatggtacggctatggtgtccgtattaggtggcgatggcgatagctttgttgagcaagatggtcaggatactagcggcggcggtgcttgcaatgaaggtaatgagcctgaggaagatgctcgtgttcaggtgcgtttggatgatactagtgccgctgtggatgaggggggtgcttccttgattgatgatgttatgaatacgctccccgttggaggtgtggctagctttgatgatggtcctcagacggacaagaatgcgcaggatgagggggcgcttatagatgtagtttcctcaactgtgctgaatgatgcgagcatagatcttgtcaaagctagtgatagtgtctcggaggaaggcacagggatggatatacttgtccaaccgggagaggacattaaggaaatggttacaatagcctgtgatgcggccacagatgacgagggcaggaaggtggatgcagtttccagctccagtgatcgcaacgaggaagtggttggtgcagctggtcttgatgagacagatgaagacatgcgattgggtacagttggcctgtctggtgatgacaatgtggcaaatgaggctgctgccgcagctgctggtggtgcagatgatgaggacttgaagatggatggggtcattaccgccggagataaggatgtggaaaatggcaaggctgacaatgctgatggtgttccggaagtgaatgtagttgccattagtagagataatagtgcggaaaatgaggctgctgcagctggtgatgatggcgcagatgaagagggcattcagatgaatgtgctaaacacaactagaggtgagggtgaagaagatgatgaggctgctcaaaatgttgttgaatatgctgttgatggtacagaagaactggaaactataggcctgactggagatgataaggcggaaaaagaagctgccccagctggtaacaatagtgcagatgaggagggcatgcagatggatgcggttaccacaactggagctgaagatgaagatggcaaggctgatgaaaatgttgttgaagatgatgatggtgtttcagaagaagctgtggctgacacagttggtgaggatatccctgaagaagatgcagtgcagatagatgaggacgaggatgatgatgacgtgcctccaccattgacaaggaaaggcggggggcgccggaagcgaggtcgtgcatcttccaaggctcaggttgtggtgaaaccacctgttaggaagaaggatgatgaggaagtttgcttcatttgctttgatggtggtgaccttgttgtgtgtgatcgtaggggttgtcctaaggcttaccacccttcttgtgttaatcgggatgacgagttcttcaaatcgaagggtcgttggaattgtgatagtgggatgccggatgtagattttgacgacaaaacaagctggtggtatttgttcaaggattattggttgaatttgaaaacaaaattaccattgacgtttgaagaaatatcagcagccaagtctcaaaagaatggttcttctttggttattcgtgacaatgatctcagtgaaccacatgatacaaatgatgaagaagagggtaattcagacagctcatctgtgcgccatctagaaggcaattcaaagaggaaaggaaggaagcgatcaaagcaagctgctaacgatgacagttctgtagttaaagatagcactaggaaatctacaaagcgaggcctgacaggtggccgtgatactaaaagttctacagggagaaaggttagaaaattgtccaagcgtgctttgagcagtgaccatcgaccaagagaatctgaaagcgtagggacatctacatcgtcagctgaagagaccagttgggcttcgaaggagctcttggattttgtagcaaatatgaaaaatggtgacaaatctgtgctgtcccaatttgaagtccaatcccttttacttgattatattaaacgtgaaaacctccgggatcctcgcaggaaaagtcagataatttgtgattctatgctcaaaagcctttttgggaaagcacgtgttggtcattttgagatgctgaagcttcttgaatcccatttcctcatgagcgaggtctcgccagttgaaattgatgacaaccatggtggtgttgtagaccctgatcctagtctggatgctgatggcaacagtgaagcatcaatggtgatgagctcagaaaaaaggaaaaaatctcgcaagtatgaccagaaagctctgcaaacaaaccttgacgactacgcagcaatagataaccataacatcagtttaatgtacctgcgtcgcaacctgttagaagaattgatcagtgaagttgacacatttgatgagaaagttcttgggtcatttgtgagaataagaatatctggaacaggtcaaaggcaagacatctaccggctcgtgcaaattgttggcacaggaatagcgccagaacaatataaatgtgggaaaaagtcgactgatataacactggagattctaaacttagacaagagagaggttattactattgatataacctcaaaccaagagttcactgaggaggaatgcaaacgcttacggcaaagcataaagtgtggattcattccaaggctgacagtgtttttttggcatatgtgcacagtttcgctgtttctaaactatcttaccattcagggagaggtttatgagaaagcaaaggttctacaatctctcaaagtcaacgattggattgaaatatttacgcttagagaatgtgtagagaagctgaagcttctaagtacccctgaagagcgtgttcgtaggctgaatgaagaacctgaagttcatgctgaccataccatggatccagattatgaatctccagaggaacaagagcaggatactggaagaagcagcttcaataagtcaagaggatctttctctaagaaagataataatcctgtatctccaggtaaaggagagggtaggagtcctgcacaaagagatttaaaaaccaactgggagtctaatcgaaacacatggggcgaatccagtacacatatcgagtcaccccttggacgcagacctgcattttcgtctcacggtgaaagtgctggttacacaagtaaatcagatagcccaaacatcggtacacacgcagttaaagtgggagctactgcaggagccaatatagggtcagggggaacacatgcatcacagtcagttattaatgagtctgaaaaaatctggcagtacatggatcctaccggtaaaatccagggtcctttctcaatagtgcagttgcggaaatggaatggcagtgggtacttccctccgaatttaaaaatatggaagtctactgagaagcaagatgattcaatattattgacagatgctttgctcgggaggtttgagaaagacctaccgccgtgggaaccgccagttggaagcagttcagatgttgatggtaggccccgtaatgattcccttcttgaggaaggaacaagagctggagaacaaccttcaaaatcagcagttctaagtagcacacagtctttctcaggaagggctggtcagggaaacgatgcggcaaatcttggaccagccactatccaatctagtacacaaggttattatggaatgcaaaactctcaagcagcgtatgcagtccaacaatctcttagtggaagttggaacgcctcaagtcagtttggaactgcaataaatcctgtgacactttctcagcctgccatgggtagctttgtagttggacaaaatgcagctttaggaagtgcaggtcagctaactcctgtaccaggtcctgcgacagtgagtgcagaagtagttaattcacagttgcagtcccagaaccagatagcatcttttttatcacaaagtgatggcagattagctgatggaaacgattcaaagttgggggaagatgcttcgcgtgaaaggatgaggtcatcgggtgaagatcttggactatctggtgcacaacctggaggggtgcaatcaaatactcaacaacttgaagatgcaaggaaccagttacaaactgatgcttccaactcggtaaagccatctcagctgatatcaacaccatctgctgaagcagtgcagccctcgtccacagccatggctggtggtgataatcaaaacactgcttgggcacaattggcaagcacatctggccaatctcagcctcaggcggctggaaatatgacctggggagctactctccagggtaatgcaaacatgggctggggaatggttggacagaacaacatgaacatgtcttggggaggaacagcacaaagtgccacaggctacaacatgggtttggctatgcaagcacagccaaatgcagttccaaacatgggctgggttacaccaaatcctggaaacaccaatatgaatatgatgtgggcaactcaaggccaaggcactccaaatgcagcagcaatggtgggaactcagatgcaaggagttgcaatggctccatggggggccattgcacaaggaaatacaaattcttatcctggttgggggggccaagttggaaacatgaaccaaaatgttggatggggtgctcccatgcaggttaatccaggtcccagtactggaaatgggacaggccaagataataacaatatgaactggaattcaccaagcgggaacccaaattggaataaccagcagcgagacaatggaggcaggcattctgggcatggtggtgattttaatggcggtgactctggtgggaggtcttggaggtcgcagtcaggtggtgatggagggtcgtggaggcctaaaaggggagtctgctattctatactcgacaagggatactgcaagaatggtgagcactgcaacttttcccattcaataccgaatgatggatatccatcaagaaacagtcggcacttcgataggcaaaattcag

SEQ ID NO: 12648 - DNA, 5334 bp, Oryza sativa
  Clone ID: TFbOSC900152j.C1.o16.fg
atggaccatatagctgaagaagagactgtgggagttgcggaagaccctggtttggctgatgttggcaaggctgatgagaccaaggaagaaggtggtggtgctggagtgcacttggatgaaactagggttgcagtggatgatcccacggaggtgcgtgcttcgcagattgacgatggtacggctatggtgtccgtattaggtggcgatggcgatagctttgttgagcaagatggtcaggatactagcggcggcggtgcttgcaatgaaggtaatgagcctgaggaagatgctcgtgttcaggtgcgtttggatgatactagtgccgctgtggatgaggggggtgcttccttgattgatgatgttatgaatacgctccccgttggaggtgtggctagctttgatgatggtcctcagacggacaagaatgcgcaggatgagggggcgcttatagatgtagtttcctcaactgtgctgaatgatgcgagcatagatcttgtcaaagctagtgatagtgtctcggaggaaggcacagggatggatatacttgtccaaccgggagaggacattaaggaaatggttacaatagcctgtgatgcggccacagatgacgagggcaggaaggtggatgcagtttccagctccagtgatcgcaacgaggaagtggttggtgcagctggtcttgatgagacagatgaagacatgcgattgggtacagttggcctgtctggtgatgacaatgtggcaaatgaggctgctgccgcagctgctggtggtgcagatgatgaggacttgaagatggatggggtcattaccgccggagataaggatgtggaaaatggcaaggctgacaatgctgatggtgttccggaagtgaatgtagttgccattagtagagataatagtgcggaaaatgaggctgctgcagctggtgatgatggcgcagatgaagagggcattcagatgaatgtgctaaacacaactagaggtgagggtgaagaagatgatgaggctgctcaaaatgttgttgaatatgctgttgatggtacagaagaactggaaactataggcctgactggagatgataaggcggaaaaagaagctgccccagctggtaacaatagtgcagatgaggagggcatgcagatggatgcggttaccacaactggagctgaagatgaagatggcaaggctgatgaaaatgttgttgaagatgatgatggtgtttcagaagaagctgtggctgacacagttggtgaggatatccctgaagaagatgcagtgcagatagatgaggacgaggatgatgatgacgtgcctccaccattgacaaggaaaggcggggggcgccggaagcgaggtcgtgcatcttccaaggctcaggttgtggtgaaaccacctgttaggaagaaggatgatgaggaagtttgcttcatttgctttgatggtggtgaccttgttgtgtgtgatcgtaggggttgtcctaaggcttaccacccttcttgtgttaatcgggatgacgagttcttcaaatcgaagggtcgttggaattgtgatagtgggatgccggatgtagattttgacgacaaaacaagctggtggtatttgttcaaggattattggttgaatttgaaaacaaaattaccattgacgtttgaagaaatatcagcagccaagtctcaaaagaatggttcttctttggttattcgtgacaatgatctcagtgaaccacatgatacaaatgatgaagaagagggtaattcagacagctcatctgtgcgccatctagaaggcaattcaaagaggaaaggaaggaagcgatcaaagcaagctgctaacgatgacagttctgtagttaaagatagcactaggaaatctacaaagcgaggcctgacaggtggccgtgatactaaaagttctacagggagaaaggttagaaaattgtccaagcgtgctttgagcagtgaccatcgaccaagagaatctgaaagcgtagggacatctacatcgtcagctgaagagaccagttgggcttcgaaggagctcttggattttgtagcaaatatgaaaaatggtgacaaatctgtgctgtcccaatttgaagtccaatcccttttacttgattatattaaacgtgaaaacctccgggatcctcgcaggaaaagtcagataatttgtgattctatgctcaaaagcctttttgggaaagcacgtgttggtcattttgagatgctgaagcttcttgaatcccatttcctcatgagcgaggtctcgccagttgaaattgatgacaaccatggtggtgttgtagaccctgatcctagtctggatgctgatggcaacagtgaagcatcaatggtgatgagctcagaaaaaaggaaaaaatctcgcaagtatgaccagaaagctctgcaaacaaaccttgacgactacgcagcaatagataaccataacatcagtttaatgtacctgcgtcgcaacctgttagaagaattgatcagtgaagttgacacatttgatgagaaagttcttgggtcatttgtgagaataagaatatctggaacaggtcaaaggcaagacatctaccggctcgtgcaaattgttggcacaggaatagcgccagaacaatataaatgtgggaaaaagtcgactgatataacactggagattctaaacttagacaagagagaggttattactattgatataacctcaaaccaagagttcactgaggaggaatgcaaacgcttacggcaaagcataaagtgtggattcattccaaggctgacagtgtttttttggcatatgtgcacagtttcgctgtttctaaactatcttaccattcagggagaggtttatgagaaagcaaaggttctacaatctctcaaagtcaacgattggattgaaagtgaaaaaatgcggcttgggcatcttcgtgaccgtgcaagcgatatgggccgtagaaaagaatatccttcttcattatttacgcttagagaatgtgtagagaagctgaagcttctaagtacccctgaagagcgtgttcgtaggctgaatgaagaacctgaagttcatgctgaccataccatggatccagattatgaatctccagaggaacaagagcaggatactggaagaagcagcttcaataagtcaagaggatctttctctaagaaagataataatcctgtatctccaggtaaaggagagggtaggagtcctgcacaaagagatttaaaaaccaactgggagtctaatcgaaacacatggggcgaatccagtacacatatcgagtcaccccttggacgcagacctgcattttcgtctcacggtgaaagtgctggttacacaagtaaatcagatagcccaaacatcggtacacacgcagttaaagtgggagctactgcaggagccaatatagggtcagggggaacacatgcatcacagtcagttattaatgagtctgaaaaaatctggcagtacatggatcctaccggtaaaatccagggtcctttctcaatagtgcagttgcggaaatggaatggcagtgggtacttccctccgaatttaaaaatatggaagtctactgagaagcaagatgattcaatattattgacagatgctttgctcgggaggtttgagaaagacctaccgccgtgggaaccgccagttggaagcagttcagatgttgatggtaggccccgtaatgattcccttcttgaggaaggaacaagagctggagaacaaccttcaaaatcagcagttctaagtagcacacagtctttctcaggaagggctggtcagggaaacgatgcggcaaatcttggaccagccactatccaatctagtacacaaggttattatggaatgcaaaactctcaagcagcgtatgcagtccaacaatctcttagtggaagttggaacgcctcaagtcagtttggaactgcaataaatcctgtgacactttctcagcctgccatgggtagctttgtagttggacaaaatgcagctttaggaagtgcaggtcagctaactcctgtaccaggtcctgcgacagtgagtgcagaagtagttaattcacagttgcagtcccagaaccagatagcatcttttttatcacaaagtgatggcagattagctgatggaaacgattcaaagttgggggaagatgcttcgcgtgaaaggatgaggtcatcgggtgaagatcttggactatctggtgcacaacctggaggggtgcaatcaaatactcaacaacttgaagatgcaaggaaccagttacaaactgatgcttccaactcggtaaagccatctcagctgatatcaacaccatctgctgaagcagtgcagccctcgtccacagccatggctggtggtgataatcaaaacactgcttgggcacaattggcaagcacatctggccaatctcagcctcaggcggctggaaatatgacctggggagctactctccagggtaatgcaaacatgggctggggaatggttggacagaacaacatgaacatgtcttggggaggaacagcacaaagtgccacaggctacaacatgggtttggctatgcaagcacagccaaatgcagttccaaacatgggctgggttacaccaaatcctggaaacaccaatatgaatatgatgtgggcaactcaaggccaaggcactccaaatgcagcagcaatggtgggaactcagatgcaaggagttgcaatggctccatggggggccattgcacaaggaaatacaaattcttatcctggttgggggggccaagttggaaacatgaaccaaaatgttggatggggtgctcccatgcaggttaatccaggtcccagtactggaaatgggacaggccaagataataacaatatgaactggaattcaccaagcgggaacccaaattggaataaccagcagcgagacaatggaggcaggcattctgggcatggtggtgattttaatggcggtgactctggtgggaggtcttggaggtcgcagtcaggtggtgatggagggtcgtggaggcctaaaaggggagtctgctattctatactcgacaagggatactgcaagaatggtgagcactgcaacttttcccattcaataccgaatgatggatatccatcaagaaacagtcggcacttcgataggcaaaattcaggtaacgagagacggtacgacaggcaaaacgagaggactgatcggcagtttgatcggcaatcgtcaggcaacgagaggcgtgatgacaggcacaacggcagggatagtgacaggcatgatgacaggctgactgatactaggtcacaatcaagagagaggcagtag

SEQ ID NO: 12649 - DNA, 565 bp, Oryza sativa
  Clone ID: TFbOSC27143j.C1.o2.gp
gttccatccatcttgtatgggaatgaccattgagcaggccaaaaaattagatcatttcctgtgcgcagattgtgtcaaagaaaatggcacgaagagaccttcaaattcatatccagcatcatcaaattctgattctaaggttgagccaaaaaagcggaagaggtaattgctgtgacacgagccatccgtggtgaggagatgcactgtttatggcgtcagctcttcattgctggtgcaaagtcaaaacgtggagggtgtacagtgcagatgaagagctaggctaggtccaagatcgcgttaacttatcatttgcccgaatttgggaacgtttccatcagtctaggcaaaagaacgaacttcattgatgctgttggctcgttcagttgtagccagtgtggactggatgagtgtcagcgtgttttagctttttgcctggtacaggaaaacgttcccagcgtggatgatgttgatgatagcttaactgtagtttcataatttgggtgtccctgagttctgtgacctgtttattgataagtgaatgccgcatgatgatgctgttgctgca

SEQ ID NO: 12650 - DNA, 2064 bp, Oryza sativa
  Clone ID: TFbOSC400970j.C1.o1.fg
atggaagaagtcaaggaatctccagtacagccaacgactagtacagctcaaacaatcacttcaagtggcacagctgatttccaaggttttcatggagctcccaagtttgctgtcggagttcctaggaatctaccagctgttgctgccttgcctgctactgccccagtgacttctgcttccctggttaccttgaaaccacctggatcatctcctgtaaaatcagttaacaacccttcagttgttacaatgccccatatggctccatcgcatcttaaatcggataaaggagttaatggtcctcctaatctagtacgcaccggagcaacctatggcaacttgaacaaatcatttcatgatacatgtgctaggtccaatctgaacgctgtacagagttccaatccggtggcgaaaaatcaggacacaaagacagcatcaattgatgctacagcaggaaaccctcttacaggtcatcatgctacaccaagcgtggcacctgttcctccaaaacctacttttgctaaccacagtgaaatagcaaaaagtgttcaacgtgttctgcaccaaccagctaatcatcctagctggattccgccatcaactgagtacatgcgttctcgtttggactgtcaaatatgcaaagtagctatcatggatatggaaagtttgcttgtttgtgatgcttgtgagaagggagcacacttgaaatgccttcagcattatggtaataaaggtgttcctaaagctgagtggcattgtccaacatgcctgacaaagagtaagggcaagcctttgccaccaaaatatggcaaggttacaagaactgctgtcgaaccaaaggctactccaccaccagctggaacgcaggtttcttcgcaaggagcggcagaaaatattgctgtaaaggaaaatcaccaaaaagtggctgtaaatggtaatcttctgaatcaaaactccacgcaagctggcagtgttgctcagagcagtactgttttggctctaggtgttactgctgctgttgcacaatcacagccgctttctatatccagacttccagaaggaaatttaaataatgatgcagccttatctagtgaaaagacggggaatgtgggtccttgcagtagcattgcacatcgtaatgaaaagccccctgatgaactacagagcagtggactgcctgctaacagtaagactggaacccaatcagggaaatctcctaatgaagaagtgtccagtgtattagtttcaggcagtgcggattcaacaaatgataccttgcatgagcagaaatctcatgaaatttctggggaaaaatgctcagacaactcttctattgttgcttctgaagcaaatatcaagtcaaaagcagactctgagctcatttcgggcagagatgtggaaatggttgataatgatataccaccaaaggatcaaaccaacaacattgccactgaggacaaacccagtactcaagaaacctctgaagcacataaaatggaagttgtggaggtgagcgccaatactggaatacaaataagccagggtgacagtgctggcactgaagagaatctccacactgaagtaacttctgttccacacatgatcaatgatgtggcaatggctaccaatgctggaacaccaatatgtccaagcaacaacgttgccattgaagaaaagcccaagtctactgtaatttccgaggtatgtacaaccaaagatacggaaatgactactgatgccactttagatcaaaacaccaatgttgctacagaagaaattcctttgcctgaatcaatttctgcaactgaggatgctgacatgactactgatactggaataccaacaaatcaaagacaggaagtaaatggattggctgaaaatggcagaaaagaacatcccctgggagaaacagataaacacaaatctgaccatagtacgatgcctgatatgtctacagccccacagataacatcaaatggagttatgcattcaaaagatgaagctgcatgtggccatgaaggtgaaattgtggacatcagtgcagcagcaacagaggaaaacaattag

SEQ ID NO: 12651 - DNA, 2610 bp, Oryza sativa
  Clone ID: TFbOSC401107j.C1.o34.fg
atgacgataccgagcgccgaggggttcctccacgccgcgagctgcctcccgtgcacggcggaggaggagcgggacctcgtcgtcgcgctcaccagggaggccgaggagaatgtcaaggacggcgatctccgctacctcgtctcccacagctggtggcttaactggcaaagctatgtgggcttaatcaaacctgatgagaatgatgctgacatgcttcctcaagctccaagtagaccaggagagatagataactcaaagctagtttcagaggaaagcagcagtattggtgatgagccagagcttcaaagaaccctgagggaaggagatgactacgctttggtgccccaggaagtatggaggaagctacatgaatggtacaaaggtggaccagaactctcaagaagagtaatttgtagtagtccaacttccagaagttacattgtggatgtctatcccctccgtctgaaattatttgatggaagagacagcttggagagaattatcagaattagtagaaaggccaaagttagtgagctctatagcttggtttgctcacttttgtccgtcgaacagtctaagatcgacatctgggatttttaccaaaagacaaagggaaaaaaactgataaatcttaatgagacggttgaggaagctcaactgatgatggaccaggagattatcatagaggcaaaggcagatgatgcttggtgttcggatcttggtacaagatcaaataatgaactagcattaattccgttggaaccctcaacatcatcgttttcaattgctggaggtcctgcattttcaaatggtttttcatctggatttggttccagtttttcccaagataatagctttagtcctttattaagggacgcagaagatggttatagtttctccaatggcacaaaggatgatatccatggactgagtggtttacataacttgggaaatacatgtttcatgaacagtgctatacaatccttggtgcatacacctccattggtggagtactttttacaggattacagtcgggagataaatacagaaaatccacttgggctacaggagttacttgcatttctattggatggtctgcatgaagatctcaaccgtgtgaaaaagaaaccatatattgaagcaaaggatgccgatggccgtcctgatgaagaacttgctgaggaatgctggaattaccataaagctcgaaatgattctataattgttgataaattccaggtttatgtatgctcacaactattcaccactcatcagtataccttttccattgcttgctgcttttgcaatgattatcttcttgagactaggcctgaaagattaggccagggtcagtacaagtccactttggtttgcccagattttactcgcatgattaatgtaactgtatttagtggtactggagatgcccttcccatgccttacactgtgaaggtatatgatcatcggatttaccgctattggaacccatcagaaccactttgtcatgtaaaagatgaagacaaacttgttgcttacaggctaccggttggctctgaaaatctcttgagggtagagatcctgcatcgggtggttgatagatatacttcagagtccatgtttaatcttagtcggaagctaattggaagccctcttgtgacttgtattccaagtgactctacaagaaaagctgatatttatgcaactgtctcttcacttctggctccatttgtgcgggcaaaagtacatactctggatgaatctgcaaccaagttaaatagcaatggacctagcctggatggtattgtactgacagacaatggtgtcacctgtgaggaagatgtatctacatcaaatgtggatgaggaagcagctgatgaagaggttttgccatttcagctttggttgactgatgataaagctaataagagagagcatattgatgcagattctaacggtgttcctgggtcgaccatgaggttattaatggactggtctgatagagaacatgaagtatatgacattaagtacatggatgaactttctgtggtcttcaagcctggatttatgtcaaagaaaaatcggcaagaagcagtcaatttattttcatgcttagatgcttttctgaaggatgaacctctgggccctgatgacatgtggtactgtccgagatgcacggagcacaagcaagccagcaaaaagcttgacttatggaggttgcctgagatattggtagttcacttaaaaaggttctcatacagccggtttatgaagaacaagcttgatacctttgtcaactttccaatccatgatcttgatatgagtagatatgcaaatcactcaagaggtgatcagccccccatttatgaactctatgcagtgatcaatcattacggcggaatgggtggtggtcactactctgcgtatgcaaagttagtagaagaggacagttggtatcattttgatgatagccacgtttcatctgttggcgaagaggacatcaggacatcctcagcttatctcctgttctatcggcgagttggtagcagctcctgcagtgtgtctaaaaatgttgcagtggacactgatatggttgattcgctggacacatag

SEQ ID NO: 12652 - DNA, 2481 bp, Oryza sativa
  Clone ID: TFbOSC401949j.C1.o34.fg
atggcactttgtccagactgtggcgccattactgtatgcgaagtttgtggagttcttggttacaaaaatcttctgctatcttgcaaaaactgcaacggagctgctgtgcaccgatactgtctggacaaagttgattttgatgggacagtagattggtcatgtgatgaatgccatcctaggcatggcaaaggtactaatagaagatctttagaagtgactttagatgataaaacagtggttggcaagcagccagaaaatcagtcatcactggataccaaccacgacaagcctgggatgaatggtggtaatgatgactatgtcagtgatgacttgatgttggagagaaataaggaaagatttcagttgcatgacgaggcaaacaatgatatacacctgaaaagtatgtccgctaatgtgccccggtcttccactttgcatgaaaactctgtggcccgaaacgtatcatcctcagcaaatacagggctaccgatggatagcaattgtgtgccatctgcacacattgatattggaaatccaagagacagtagtgtgagactaatattaacaggggaaaatcgaagagaatcttcaatgctgctagatggggcttgttcaggttccttgtcaaaagactcgtcgaaagagaaaattgatcgtgaggccaattcttcccatatggaaccttctgatgctgtcaagaacttctgtaaggacaacccaatgaagcgaagaaaactcatgttattagatgatgatgatgatgatgtaggtgtggaactgtctgatactgttcaaaatgttgtcaaggacaacccaagcaaacgaagaaaactcattttacctgatgatgatgatgtagaggtggaactttgcaatactgttcaaagtattgcaaaggacaacccagggaagacaatacagcttattgtactagatgatgatgatgacaaacaagaggatgctgaaaatctgaatcacctatctcttgagtttgaaggaccaattgagaagcataaaatacacattggatatgccacagggcagagatgtttagaagatgatgaacatggactactggatagtttggatcaccggtctttggagaacacttgtcccacaaagaaacggaggagatacatatgtccaagtgacgatgaagaagaagaggttattaaaggttctacgaccactggatgtgctccgaatgatgttgcaaatacagcttcacaacatgtagatgccaaggaccaccatctgcagtccagaatggcatttgcttcagatttcaccaaacatcagtattatatttactcagagcctatgggtgagcctgcttggagtggtatctttatgacagatagcaatgtgcctattatgttggctgcacacctatcaactaaagcatgccagagagtgtcggaatttgcaagatcgttgcaaccagtagttgaagtaatcaagctccctaggttgaaagcatggccagagaggtgggacaaatcaggacctactgacgacagcattgggttgtttttcttcccgcatagtatgaggccaaatgaagaattagataaactagtgaaagaagtaattgagagtgatgttgtcttaaaagctgttctaggaactgtggagctactaatcttcccctctattcttttaccagaacaatatcatgagttccaggggaaatactacctgtggggagtgtgcaaggccaggaaacataatcctgacacagctgttcttgttgaagaacaatgtggcttggtctctgcctcggaggaagggtcatcggacaaagaaagttatgtcatgaaacatgtcgaggatcgattgcctgcagactgtaacccggaggcacgggagggggacatcaaaactgctttgggagaaggttgtttctcacctgatagctgtttgtcaagtaataaggcaagccctgtgaagggtggatcaccatgctttatgcaaccaggacttggcgataaacctcatgagcctggtgtagcagaccagaaagaagatgagcaagacttcacctctttacctagaaggaatgatcaaaatgctaccaatccaccaatcgactctttaccttccgcgaccagactgtttggattcgttacagcacggtctgaaagatgtcagcaactcatccaggagatggtcaaggaaggtgctctcttattctcggtgccggaagatatgacgatcaatcgatctaccataagcaagagcaatggagtaggagcagctcaggcccctgacagtggctgtcaacatgtgcaggagcgttgtgaacccattgaattcgttccgattgatcacaatgaccccgactcggcttctgaagcctgcctggatctgttcccggttcggcatgagcagattggattgacttctcaggtagatgttaaagaagtagaactggacttgagccttggcgcatttcggcgagcaccttcagagctgccatga

SEQ ID NO: 12653 - DNA, 771 bp, Oryza sativa
  Clone ID: TFbOSC27184j.C1.o6.fg
atggtggagaatcatgtgtcaaaagaggattcaaagaattataaattgaggatgggctttgtggatggccatatttgtgcaatttgtgatgatggtggtaatttgatacgctgtgagggtgcctgtcgaaggtatttccaccgaaccatttccaatgatgcagattttaactgtgaaactctcaacatgagtcaagaacaagtggaatcatcaaagttcatatgcaagaactgtgtgtataagcaacaccaatgctttggttgtggagagttgggatcctctgacatgtcatcgggttcagctgaggtatatcagtgcagtaagagcagatgcagacgcttttaccatcctaagtgtcttgctgaatttgactctagtaagaacccaccagtttttgaatgccccctgcatgaatgctttgcatgcaagaacaaaggggaaaaatataacgaggaaacatgcaagaacaaggggcaggagagtatcaagaaaaaacaaggggcggaaaacaacaagaaaatgcacctggcattatgcaggcgatgtccaatagcataccatcgcaagtgcttgcccaggtgtgatatgtatttggcactatttgctagtgatagtgcccttctaaaaggatattttgttgacacggtgttctcttttttaggaatatttcctctgttcccaaaggttgtcttccaaggaaatggaaaactaataagggccaagttttcttctattgcctgtaagctttttgcacttcatcctttttgttag

SEQ ID NO: 12654 - DNA, 2466 bp, Oryza sativa
  Clone ID: TFbOSC400909j.C1.o27.fg
atggggaggaggagcaagcagaaggtggaggatatggccgaggagctctgcttcgtctgcaaggacggcggcgacatccgcgtttgcgacttcaagaactgcctcaagggttatcatccacactgtgtggggaaggaggaaagcttccttgattctgccgaacagttcatttgtgaattgcacaaatgtgttagctgcaaaaggaattcagaatatcattgtttgtgttgtccaagttcctctgtatgcggtgaatgccttggaaaagttgaatttgcacaatttaggaagcagagccagaccaaaggattatgcaataactgtttaaagttggcattgtttgttgagaagaactctgaagctaattctgatggggaaacagttgaattcagatatacggagaactatcttgttctgtttaaagactactgggaaactattaaagacaatgaaggcttggcattgattgatttgcagcaagccaatatttgtcttagaacaagcttaagctgtaaacaaggaagggattcagagaaacccccagatgaagattacagggcagataagaattcattgagtgttaatgatggcgctgaacaaccattcccggttgatgtaaaggtccaaccaagtgaagcaaaaatgtcactgaagagaaagaagtcaaacaagaaaacatatgtcggttggggttcaaaagagctaattgaattcctgtcatgtattggcaaggatacaactaaacctcttgatgaatttatacttactggagttgttaaggagtacatccagcagaagaatctattcaaggacaggaaaagaaaatctgtcatttgtgatgataagcttcattctttgttcaggaaaagaaaagtgaagtcaaatatgattcttaacttgctggaaatacatcttgcggcaaatgctgcttcagaggatgattttctcgatgattctgaggatgatgaaggccgaattatgagaaaaaggccttgtaatactttaaaggcggcagagacttctgagagggatccaaagagaaacaagaaatgctttgcagctcttaatcacaataacttaaagttaatttatttgagaagaactctaattatgaatcttatgggccaagacacatttgaacagaaagttgttggaagtttggttagagtcaagaatgatgacaatcattatagttatcagatgcctaaaaaacactaccagcttggcctagtaacaggcattaggaaatctccacaagaatacaagataaaggacaaacgtacagatattcttttatgtgtttccaatctgtgggatgacatcaagatctccatgttgtctgaagaggacatagaggaggacgagtgtaatgatctccttctgttggctaaaaaaggactcttcaaaagacctactgttgctgatttagaagagaaagctgcaagtatacatgtggacatcgtgaatcattatgcaacccaatgtgcaacagggcatgtacctaattctgtgaaagttctaatggaggattcacgaggtgcaacagggcatatagctgattctgtgaaagtacttatggagggtttaccaggaggtgcaacagcacgagtagctgatgttttcaatgttgatatggctaaatcacaagatgcatcagggcaagtaactgattacttggaggttgttgaagaggaaactccagaagatgcatcaggacaagtagctgatatcttggacgttgttgaagaggaacctccagaagatgcatcaggacaagtagctgatatcttggagcttgttgaagaggaaacttcagaagatgcatcaggacaagtagctagtatcttggaggttgttgaagaggaaactccagaagcacctggtaaagacctttgtaatggtggcattcctgggtctggactacaaaacaaaatgcacaatgctcaagatggtggcacggctcaaggcagcgatatgtgcaatggcggaaatacctcaaggcgtctcaatgatcgcaagagtgttatcgttatcgactcagacagcgatgaagacgaggatcctcacccagagcaacatgaaccagaacgtgctgctcctcgggcagccatggacgtggtcatggctcccactcatggtgctccggtagccatgaatgggactagtgctcccactcttccttgtgctaagagaggcaagaacgggactaccgcgcctaaaggccgtgttccggctatcgctgcacttcacgcactgcaatccatgaatgcgccaggtgagcatgaatacatatggaattacgcggatcctcaggggaaagtgcaagggccattcacaatggagcatatgcggaactggcaccggaatcgtttcttccctccggacttcagggtgtggagattaggccagacacagaatgattccgtcctgctaacagaggccatgggcctgaaattttcttcttga

SEQ ID NO: 12655 - DNA, 2275 bp, Oryza sativa
  Clone ID: TFbOSC401826j.C1.o1.fg
atggggaggaggagcaagcagaaggtggaggatatggccgaggagctctgcttcgtctgcaaggacggcggcgacatccgcgtttgcgacttcaagaactgcctcaagggttatcatccacactgtgtggggaaggaggaaagcttccttgattctgccgaacagttcatttgtgaattgcacaaatgtgttagctgcaaaaggaattcagaatatcattgtttgtgttgtccaagttcctctgtatgcggtgaatgccttggaaaagttgaatttgcacaatttaggaagcagagccagaccaaaggattatgcaataactgtttaaagttggcattgtttgttgagaagaactctgaagctaattctgatggggaaacagttgaattcagatatacggagaactatcttgttctgtttaaagactactgggaaactattaaagacaatgaaggcttggcattgattgatttgcagcaagccaatatttgtcttagaacaagcttaagctgtaaacaaggaagggattcagagaaacccccagatgaagattacagggcagataagaattcattgagtgttaatgatggcgctgaacaaccattcccggttgatgtaaaggtccaaccaagtgaagcaaaaatgtcactgaagagaaagaagtcaaacaagaaaacatatgtcggttggggttcaaaagagctaattgaattcctgtcatgtattggcaaggatacaactaaacctcttgatgaatttatacttactggagttgttaaggagtacatccagcagaagaatctattcaaggacaggaaaagaaaatctgtcatttgtgatgataagcttcattctttgttcaggaaaagaaaagtgaagtcaaatatgattcttaacttgctggaaatacatcttgcggcaaatgctgcttcagaggatgattttctcgatgattctgaggatgatgaaggccgaattatgagaaaaaggccttgtaatactttaaaggcggcagagacttctgagagggatccaaagagaaacaagaaatgctttgcagctcttaatcacaataacttaaagttaatttatttgagaagaactctaattatgaatcttatgggccaagacacatttgaacagaaagttgttggaagtttggttagagtcaagaatgatgacaatcattatagttatcagatgcctaaaaaacactaccagcttggcctagtaacaggcattaggaaatctccacaagaatacaagataaaggacaaacgtacagatattcttttatgtgtttccaatctgtgggatgacatcaagatctccatgttgtctgaagaggacatagaggaggacgagtgtaatgatctccttctgttggctaaaaaaggactcttcaaaagacctactgttgctgatttagaagagaaagctgcaagtatacatgtggacatcgtgaatcattatgcaacccaatgtgcaacagggcatgtacctaattctgtgaaagttctaatggaggattcacgaggtgcaacagggcatatagctgattctgtgaaagtacttatggagggtttaccaggaggtgcaacagcacgagtagctgatgttttcaatgttgatatggctaaatcacaagatgcatcagggcaagtaactgattacttggaggttgttgaagaggaaactccagaagatgcatcaggacaagtagctgatatcttggacgttgttgaagaggaacctccagaagatgcatcaggacaagtagctgatatcttggagcttgttgaagaggaaacttcagaagatgcatcaggacaagtagctagtatcttggaggttgttgaagaggaaactccagaagcacctggtaaagacctttgtaatggtggcattcctgggtctggactacaaaacaaaatgcacaatgctcaagatggtggcacggctcaaggcagcgatatgtgcaatggcggaaatacctcaaggcgtctcaatgatcgcaagagtgttatcgttatcgactcagacagcgatgaagacgaggatcctcacccagagcaacatgaaccagaacgtgctgctcctcgggcagccatggacgtggtcatggctcccactcatggtgctccggtagccatgaatgggactagtgctcccactcttccttgtgctaagagaggcaagaacgggactaccgcgcctaaaggccgtgttccggctatcgctgcacttcacgcactgcaatccatgaatgcgccag

SEQ ID NO: 12656 - DNA, 4692 bp, Oryza sativa
  Clone ID: TFbOSC422386j.C1.o2.fg
atgagggcgccgcaggagcgcaccgtcagggatctctacgatcgcacgcgacacaaggatctcgcgctccccgaggaatcagtggaggggcgtggcagtggacgacgggtggaggggccggggcatcgggaagtggtcgccaagatggagatgcttggaggtgattctgatcccacaatgctgtctacaataagggacaagcttacagcaagaaaaagaccagtaccactcgacagtcctaatgtgaagacagaatctggcacttgtaatgtctgttgtgctccttgctcctcgtgcctacaccgaaatattgcactcacggattcaaatatggactgtggatcatctcaaacatgctttgcaaggtcagaaacaaaaaacagttcgtttgttcgtgttgataaagggctccgtaccaaggctaaggggggagaaaatgacgatgaattcagtgctacttcaagccctgcttcctattctgaaaatggtgaaaataaagtcatcgcaagatcatctgttgcagcagattccgaggttgacaagccagcaaaacgtagaaggctagtaaatcacggttctagatcacctatagtagaatgccatgatgatagcaactcatgtgttactggagtatcagcagcaagcaagcttctgttagacaagaaaaaggataaactatctacatcagcatcaagtcgtgaccttactgttaactataaggacaatggcattaacagactaagaaactactgcgccgaagaatctacaggaaagaagagatctgatgttcatgccatgcaccgaagttcatctgatagatcattgcctgccgagtctccttttgcaaccaagaggttgctgcgtacccaatcctctctcagtgcatcacatggattatctcctaagagaccaacacatgaatttgggaatgcacaaaataatttagctcaccaaccttgtgagaaagcttcttcaaacaagaccgtagagcgttcactgggaggaaaatcagatccttctgtgcttggtggtgagaggcacagcatgatgactagttgtggtaccagtaatagggataaaatcaaggctggatctttaacaaagaatctggaaaatggcacctcatgctcaagaaatggaagtctagaacatgctgacatccaatctaatgatgctgtcaataggaatgacaatgataaacaagaacgtaatcaaggttgttcaatggatacaggtagtggtagaaagttgaatacacagaatgatgtgatgacggactctgggaattcagagggcttaatagatgttaatgtttgtgatatatgtggagatgttggaagggaatatcttctggctacatgcactaggtgccttgaaggggcagagcatacttattgcatgcgagtgaagttagagaaagttccagatggtgaatggttatgcgaagaatgctgtcttaaagaagatgaaaaccaaacaagaagcaacggtggcacatcaaggaataaggttttggacgggaagaaccaaaattcagaaagtacaaacaactctaagacattgaaggttgttgtgactgatttggacagtcaacaaatcacttgtggcactccagtaaatgatcccttggctggtagcaatcaaaagttgcatcttgcgtcatctgatctggaagcacggcaagtgaagtgtgccaccccaactgctgaaagactggatgtgaagaacaaaaattcaggaattatgggaaatcgcaagaagttgcaagttgttacatctagcttggaagcacgacaatcctcttgtaggacaccaacgtctggaagcttggataagaagaatcaaagcttagacaagaggagtcaaagttcagaagtgttgttaaaacgtaagaagttgcgagttgccactgatatggaatcacctctatcaaatgatggtgtacggagtccacctaaatcatgcaagagatatgcagaaaatactttatcctctactcccaggctcctgaaggcggacagccctaggaatcatgatgtgttctccagggagaactcatttaaaagctctaacaaaggaagtataaagtcgcctgataatgctccaatgaggtctcaagcagttaatagttccgtgaccttacctcggtcatattccttggggaacttggcaaatgttaaaacaccaggtccttcaccacgaggccttttatcaaagcaaccatctttcaacaactccagtaatgaaccaaaggtcaagcaattagctgaacctgtgttgagcaagttgaagccttcaaaacattcaccaagagatcctagagagtccatccggaaagttatgaaatctgggcctcttaagcatgaggcttcaatttgcaaaggctcaagttcatcaaagcaaaagcaatcagttcattcatctcaaaatgaacaaccgagaatattgaagcccgtgaaaccaacaattttgttagaaaggggggcttcatttaatcttcaaaaaccaaacatttcttcatctccaaggcctgatagttcaataaaatcaggggatccaagaaatgaccaagacagcccgaggcctggaccaagcatacttaaaagtagcaaaaaaccaggaattgttgaaaataagcatagctccattttatctaaaagtgatgagcaagggattacttcaacaggagttgtttgttctaaagacacctgtgtggtgaaggcatcagatccactaatcccaatggataaaataaaaaatgatagcacagatggtgcatgtgaaagtccactaattttggtgaataacgataatgaaatgtcaactaaacctgaggtgctttccattccacgtgcttcaaagacttgtggatctgatttccaagatattgcgccaacaagttcctcagaagatttgcctccagaagaggtacagtatgaacagaaagttgtggaaagtgatgggaacatctcctgtaaaagtgcagcggcgattcaggcttccgaagaccttttgccggagagcccacaaggctgtctagtggcacaaaatccgtacagccctgacactaaatcgaatgacctgaacttaaagcagcaagctttggttgatcaatcttctactgttggaagttctttgggggctttagttattccagagcagtcttacatctggcaaggtacctttgaggtttcaagacctggaagctctcctgaaatgtacgatgggtttcaggctcacttatctacctgtgcatcgctgaaagtacttgaaatagtgaaacaattacctcagagaattcagttggtagaagttccacggcattcctcatggccactgcaatttaaggaagtaaagccgaatgaagataacattgctctttatttctttgctaaagatgttgaaagttatgaaagagcatatgggaaactgttggaaaacatgcttgctggagatttgtccctcacagcaaatatttgtggcattgaacttctcatttttacgtctgataagctgcctgagaggactcaacggtggaatggcttacttttcttttggggtgtcctttatgccagaaaggcaagtagttcaactgagctgcttgtcaaagggatgaatcatagtccattagaacaaattaatggacctgttaatcaacttgtctgttcccctaagatgcctcagtctttgggcatagatttgaatgagtgccctgttgatgaattgtatgatccagctgtatcagttcaaacggagatggagaatcgtggtgcatctgtaaaccatgagactttgttgaggtccaaccatgaggctgaaaggctgaatttatgtgaaatacatttcccagaaactgcagggactgggaaaattttgttaggaactcctactgcagttccctatggagttcatgttcacacaagttcaaaacgtgaatgcctcaacattaaaccagaatatccaagtgatataataggtagcgaaggaacagcgggcagggacaacatggaggaggaagagagctttaccaagaatggagttccatgctttactaagcagcatacaggtgcaaccaccagatcagtatctgatgagatattggcaaatacacaggcacgcgtatcctttcaagaagtatccccacagcattctgtcaggccaaagctttctgatgatccaagtgattcagttttaaaggactttgttttgcctgattctagttccatctacaaacggcaaaagacctctgagggaaaatactctacttgcagttttggagatggtcaactgactagcaaatgcttgtccaagatacccttgccagctgatcagcatacttcattagatgatgtgcaatatattggtagggttccagcagatccctgttctccaactaaaccaatcttggatcatgtgatccatgtcctatcttcagatgatgaagactccccagaacctcgtaataatctgaataagacatcactgaaggaagaagagggcccttctcctctactgtcactgtccctttctatggcctcaaagaagcataatcttaccggttctgatacaggagatgatggaccgctgtctctgtctcttgggctccctggtgtagtgactagcaaccaggctcttgagatgaagcagtttctgccagagaaacctggcatgaacacttcattgcttctctag

SEQ ID NO: 12657 - DNA, 516 bp, Oryza sativa
  Clone ID: TFbOSC400235j.C1.o43.fg
atggctggcgccggcaccgtctgctccatgtgcggcgacgtcggcttccccgacaagctcttccagtgcgcgcgctgccgctaccgcttccagcactcatactgcacgaactactacggtgacgcggcgcccgccccggccggcgccgacatgtgcgactggtgcctgagcgacgtcgccgggaaggcgaggtactcgtcggcggccgggaagcagcagggcgccggaagccaggagtcatccacgacgacgtcgagctcctccgccggaaggggtggcggcggcaagcccggcgccggcgagcaggagagcgggcggcgggggaccaaggcggccggccgaagttttggggccggggaactgaggagcaactggccatcacgcacgttgcatgctgccaagccgagccatgtcgatgtaggggtcaacgaatcgtacccaaagacccaaagtggccgacaaagacatgctcctacacaaacctcaagctctgcacggcctcctctctacgagtag

SEQ ID NO: 12658 - DNA, 1401 bp, Oryza sativa
  Clone ID: TFbOSC400822j.C1.o33.fg
atggccggcgaggggagcggcggcgagggcggtgcgggcgccttcgaggacgaggcggagccgacggtcaccatcggggagtacatcgaggggatcgaggccgaggagctggaggcggatttggtgctgggcggggacgacggcaaggagtgcacctacggcggcggctacctcaagcgccaggccgtcttctcctgcctcacctgcgtgccagcgggtgtcgctggagtctgcaccgcctgcagcctcgcctgccacgacggccatgagctgggattagtgtcaatgtttatatgggtgagaaggatgagcgctacaagagttattttaggcgttgcattagcagttgccaaattatctattgccatcttctgtattaagtatctatatgactgggtgatgcgcacacaactgatgcttggatggttctttttgctaaaggtcgttgaactatggacaaagcgaaagtttcgttgtgattgtggcaactcaaagtttggaagtcatgtttgcaaactttgccctgagaaagatccagagaatccagtgaattcttataaccataacttcaaagggtcctattgcacatgtggcaggccttatcctgatccagaagctgaaaagcaagttgaaatgatacaatgctgtatttgtgaggattggttccacgaggatcatattggtcttaactccattgaagagataccacgagatgaggaaggggagccactctacgaggatttcatatgccccaaatgctcacctaagtgctatttcttgaaattatatccggatactatttgggcatctaataagcagagttctgcaccacaagctgagactaccaattcaactgttatgaatggaaattcaagccttggtgacatagagaaaagtgaaaatggtgctcttataaatcatttgaattgtgaaaagacctctgacaatgagaattgcccaaaagacagtgtagctccagaaaaggccagtctggatgacagttctgatggcaaatgtaagctaggaatgaacatttgttcaaatacaccatcagctgattcagagaaaaagatgccgttttttatgtcaaaaagctggagagaggttatctgtagatgtgaaacttgcaccgacttctatgcacaacaaggtgttgcgtaccttatagacaaggaagactctattgaggagtatgagaaggttgctaagcagaagagggaaaagaagttggagcagcaggaaggagttgaagcaaactttcttaattcactcgaccatgtacagaagattgagattttgagtggcatcaatgacatgaagaatgagcttcagtcttttctgagtatttcgcaaataaatggtgatacttcccatgtttcagtatcagggtttgagttctaa

SEQ ID NO: 12659 - DNA, 1920 bp, Oryza sativa
  Clone ID: TFbOSC17126j.C1.o1.fg
atgatcgcggccgggatccgcaagaagccgaggaagagggccaaaaaggcggcggccgctggcagcaaggtgaccgtcccggctgacgtgatcatcgtcgacgacgacgtcaaccagccgagctcgaacaccgacgcgcaaagcaacgccgacgacgatctgaagaaggcggccgtcgcttcccctgcggcgacgcggagcaagaccagatcaaagtgcaagaccagcagcaacagcgccgccgcctcgccgagcgccaggtccagcgccatcgccgccaggaagaagaacaacgccacagcgaccggcacgacggcgacaccaccaccaccggaggcgaagaagcacaccgtgctgacctggctgatagacaccggcttcctcaaggacaaagcgaaggtgttctacgtgccgggcgacgccggcgccgccgagaaggtcatctccggcatggtcaccaagacgggaatccgctgccgctgctgcaacaccgtcgtccccgtggctgtgttcgaaacccacgccaggtgcgagcggccagggcagccatgggagaagctgctgctcatgtccgggaagccgctgtcgaagtgcatgcaggaggcgtgggcgcaggagcgggtgaccgccatgcgcgcccgggagaaggccatggcgtcgctggagcaggagaaggagaagagctcgcaggccaagaggaagctcgcgaagacgaagaagatgcagctcctcgacggcgtcgtcgtcgtctccacctcttctcctcgtcatcaggtgaagaagaacggcggcggcaaggattgcagcgacgacgcctgcggcgtctgcgccgacggcggccagctgctctgctgcgacacctgcccctccaccttccatccagattgcctcgccatccagttcatgatcaaatcttggttactgtttgacagacagcaactgacaacaatttacggccagcaaccgtggctccagacggctcctggagctgccatttctgccgatcatcagtactgccgtcctttgcaaagccctgggttcgagatcggcgcatactgcagcgaaacctgcaaaaagatgtcctctcatctatcagatatgataggagtcatgaaccatactgaagatggcttttcttgggccctcctgaagattcagaaggatgagctagtcacttctgaggacatgcctgtcattcttgagagcaatgtgaagcttgcagtagctctgggtgtactcaatgaatgctttaatcctgtgcaagatcgaaggactaagatcgatatgctccaccaagctgtctacagtctaggatcagagttcaaacgagtaaactatgagggattctacaccatggttcttgagaaggatggagaaatcatttcagtagccttgctgaggttccatggcaggaaactggctgagatgcctttcgcaggcacgctgccagcttaccagaaacaaggaatgatgcgtcgccttgtcaaggctgttgaaaaggtgttggcgtcgttgcaagtggaaaatctagtgatcccggccgtcgctgatctagtggaaacctggaagagatccttctccttcaggccaatgcaggcagaggtcagggacgaagccaagaagctgagcttggtcgccatcaccgggacgacgctgctgcagaaacccatctctgctcatcagcagcaaccagttccatcccggaaaggtagcagcagcagcagaagcaagcgcgcgtctgctccggcgacggtcaccggcagcagcaaggaagaggaggagcagatgacgacgacggcggctcgcctgaccgacgacgagctggcattcctggagatggcacccttgtgcagcttcaccgacctgttggccggaggcgtctacccgacgggtctccagcttctccgcggcatgaagtga

SEQ ID NO: 12660 - DNA, 2694 bp, Oryza sativa
  Clone ID: TFbOSC401197j.C1.o46.fg
atgtcgtcgtcggcggcgccggcgaggaaagagaatggcaccgtcgccgcccccgccgcctcatccgccgccgccagcaacacgttccacgtgctcaactccggcagcgccgccgccgccgtcgcagccggacgtgcgtatgttcagtcgccgcgagcgacggcgctgcggtcgccgcaggtgcgagccatcaccaactacggcatgttcccgaccaccggcgcttcggcggcgaggacggccatggcggggcgaacgatcaatggtggcgcgtcgatgctgacgacgacgacgacgacgacgacgccaccgcacctgatccagcagctcatggtgttggctggctggaccacccggagtccgtggctccagaaccacgcgtccatgtcgccgcggggctcgccgtcgtcgttctcctccgggagattctccgacccccgtgggatgccgtcgacgttcgcttaccgaacacccggagctagtagcggccgcgttatcgacaacggcgccgtcgccggccgtggcaagcagatggccggaactagccgctcacttgagattatcgccgttgataccggcgccggaagcagcaagaacgcgtcgccggccggcggccatgcaaatgccggcgtggtggtgaaacgtttggcccctgtgctcgcgatgccgagtgccggagccgccggcaaagggaaggaggaggcggcggcggcggcggcggctccgtcgccaaatggccgcggccgtaagcgcgcgccgcccaaggtgagcaatgatccggcggcgggatccgacaagaagccgaggaagagggccaagaaggcggcggccgctggcagcaaggtgaccgtcccggctgacgtgatcatcgtcgacgacgacgtcaaccagccgagctcgaacaccgacgcgcaaagcaacgccgacgacgatctgaagaaggcggccgtcgcttcccctgcggcgacgcggagcaagaccagatcaaagtgcaagaccagcagcaacagcgccgccgcctcgccgagcgccaggtccagcgccatcgccgccaggaagaagaacaacgccacagcgaccggcacgacggcgacaccaccaccaccggaggcgaagaagcacaccgtgctgacctggctgatagacaccggcttcctcaaggacaaagcgaaggtgttctacgtgccgggcgacgccggcgccgccgagaaggtcatctccggcatggtcaccaagacgggaatccgctgccgctgctgcaacaccgtcgtccccgtggctgtgttcgaaacccacgccaggtgcgagcggccagggcagccatgggagaagctgctgctcatgtccgggaagccgctgtcgaagtgcatgcaggaggcgtgggcgcaggagcgggtgaccgccatgcgcgcccgggagaaggccatggcgtcgctggagcaggagaaggagaagagctcgcaggccaagaggaagctcgcgaagacgaagaagatgcagctcctcgacggcgtcgtcgtcgtctccacctcttctcctcgtcatcaggtgaagaagaacggcggcggcaaggattgcagcgacgacgcctgcggcgtctgcgccgacggcggccagctgctctgctgcgacacctgcccctccaccttccatccagattgcctcgccatccagttcatgatcaaatcttggttactgtttgacagacagcaactgacaacaatttacggccagcaaccgtggctccagacggctcctggagctgccatttctgccgatcatcagtactgccgtcctttgcaaagccctgggttcgagatcggcgcatactgcagcgaaacctgcaaaaagatgtcctctcatctatcagatatgataggagtcatgaaccatactgaagatggcttttcttgggccctcctgaagattcagaaggatgagctagtcacttctgaggacatgcctgtcattcttgagagcaatgtgaagcttgcagtagctctgggtgtactcaatgaatgctttaatcctgtgcaagatcgaaggactaagatcgatatgctccaccaagctgtctacagtctaggatcagagttcaaacgagtaaactatgagggattctacaccatggttcttgagaaggatggagaaatcatttcagtagccttgctgaggttccatggcaggaaactggctgagatgcctttcgcaggcacgctgccagcttaccagaaacaaggaatgatgcgtcgccttgtcaaggctgttgaaaaggtgttggcgtcgttgcaagtggaaaatctagtgatcccggccgtcgctgatctagtggaaacctggaagagatccttctccttcaggccaatgcaggcagaggtcagggacgaagccaagaagctgagcttggtcgccatcaccgggacgacgctgctgcagaaacccatctctgctcatcagcagcaaccagttccatcccggaaaggtagcagcagcagcagaagcaagcgcgcgtctgctccggcgacggtcaccggcagcagcaaggaagaggaggagcagatgacgacgacggcggctcgcctgaccgacgacgagctggcattcctggagatggcacccttgtgcagcttcaccgacctgttggccggaggcgtctacccgacgggtctccagcttctccgcggcatgaagtga

SEQ ID NO: 12661 - DNA, 3351 bp, Oryza sativa
  Clone ID: TFbOSC100733j.C1.o4.fg
atggaggcgagcgccggtctggtcgccggctcccacaaccgcaacgagctcgtcgtcatccgccgcgacggcgatcccgggccgaagccgctccggcagcagaacgggcaggtgtgccagatttgcggcgacgacgtggggctcaaccccgacggcgagccgttcgtggcgtgcaacgagtgcgccttcccggtgtgccgcgactgctacgagtacgagcgccgcgagggcacgcagaactgcccccagtgcaagacccgcttcaagcgcctcaggggcaagtcacacccgcaatgccgaattggttgcgctcgtgtgcccggggacgaggaggaggacggtgtggatgacctggagaacgagttcaactggagggacaggaatgactcgcagtacgtcgcggagtcgatgctccacgcccatatgagctatggccgtggtggggtcgacgtcaacggtgttccgcagccattccagcccaaccccaatgttcccctccttaccgatgggcagatggttgatgacatcccgccggagcagcatgcgcttgtgccatcttttatgggcggcgggggaaagaggatccacccgcttccttatgcggatcccaatctacctgaatcagctaaaggtagttgtgctacagttcaaccaagatctatggacccatccaaggatcttgctgcatacggttatggtagtgttgcgtggaaggagaggatggagagctggaagcagaagcaggagaggctgcaccagatgagaaatgatggtggtggtaaagactgggatggcgatggtgatgatggagatctaccactgattttctcccctgtagaattgctttatcactttggctggacaaaaatggatgaagctaggcagccattgtccagaaaagtcccaattccttcaagtcagattaacccctatagaatggttatcataattcggctggtggttttggggtttttcttccactatcgagtgatgcatccagtgcctgatgcttttgccttatggctgatatctgtaatttgtgaaatctggtttgccatgtcttggattcttgatcaattccccaagtggtttcctatcgagagagagacttaccttgatcgattgacattgaggtttgacaaggaaggccaaacatctcaacttgcaccaatcgatttctttgtcagtactgttgatcccttgaaggaacctcctttggtcacagcaaacactgttctatctatcctcgcggtagattatccagttgataaggtttcatgctatgtctctgatgatggtgctgcaatgctgacatttgaagcattatccgaaacatctgaatttgcaaagaaatgggttcctttctgcaaaaagtacagtattgaaccacgtgctccagagtggtacttccaacagaagatagactacctgaaggataaggtggcaccatactttgttagggagaggagagcaatgaagagagagtatgaggaattcaaggtgagaatcaatgcattggttgctaaagctcagaaagttcccgaggaaggttggacaatgcaagatggaactccctggcctggaaacaatgttcgcgatcaccctggaatgattcaggtcttccttggccaaagtggcggccatgacatcgaaggtaatgagctacctcgattggtgtatgtttcaagagaaaaaaggccaggctataaccatcacaagaaggctggtgccatgaacgcattggtccgagtatctgctgtactaactaatgctccatacatgctcaacttggattgtgatcattacatcaacaatagcaaggctataaaggaagcaatgtgttttatgatggaccctttggttggaaagaaggtttgttatgtgcaattccctcaaaggtttgatgggattgatcgtcatgatcgatacgccaacaggaacgtggtcttcttcgatatcaacatgaaaggcttggatggtatccaaggccccatctatgttggtactggatgtgtctttagaaggcaggcattgtatggttatgatgcccccaaaacgaagaagcctccgtcgaggacctgcaactgctggcctaaatggaagagcaagaagaaaactacgaaacctaaaacagagaagaagaaaagatctttcttcaagagagcagaaaatcaatcccctgcatatgcacttggtgaaattgaggagggtgctccaggagctgaaaatgaaaaggctggtattgtaaatcaacagaagctggaaaagaaatttggccaatcttctgtttttgtcgcatccacacttcttgagaatggtggaaccttgaaaagtgcgagtccagcatctcttctaaaggaagcaattcatgtcataagctgtgggtacgaagataagacagactgggggaaagagattggctggatctacggatcagttacagaagatattctaactggttttaagatgcactgccatggttggcggtcaatttactgcatacctaaactacctgcattcaaaggttctgcaccactcaatctttctgatcgtcttcaccaagttcttcggtgggctcttgggtctgttgaaatattcttcagcaaccattgccctctttggtatggatatggtggtggactaaaatgtttggaaagattttcctacattaattccatcgtgtatccttttacatccattccactcttggcttactgtacattgccagccatctgtttgctaactgggaagtttatcactccagagcttacgaatgttgccagtctctggttcatgtcactttttatctgcatttttgctactggcatcctggaaatgagatggagtggtgttggcattgatgattggtggagaaatgaacaattttgggtcattggaggggtctcttcgcacctctttgctttgttccagggacttttgaaggtcatagctggtatagatacgagtttcactgtgacatcaaaaggtggggacgatgaagagttctcagagctatatacattcaaatggactaccttgctgatacctccaaccactctactcttattgaacttcattggggttgttgctggtgtttcgaatgcaatcaataacgggtatgaatcatggggacccctcttcgggaagctcttctttgcattttgggtgatcgtccatctttacccattcctcaaaggtttggttggaaggcaaaacaggacgccaacaattgttattgtctggtccattcttctggcttcaatcttctcactcctctgggtccggattgatcctttcttagcaaagaatgatggtccacttctggaagagtgtggtttggattgcaactag

SEQ ID NO: 12662 - DNA, 3772 bp, Oryza sativa
  Clone ID: TFbOSC403261j.C1.o1.fg
gattggaacatcttcagatgtggagttttgtgcaagatattacaatcattgtgatgttgtcaaagtcgtccaaatacttgcctcttcagatgcatatacagatatatgtaggagaatgacagagtactggagtcatctacttgatatatttcagaatgagagatcaaaaataagtaaagaggttggtagaagccttatgtcacagtccaatattctatcgaccgctactccagtgaaagcaaataatggaagtgttcaggcaactttgaaagatggtcaggacagtaagatggcagtgctttcccagacaaatgcacatcaggttatggataatcaatttacgttgtgctcagctaacaataatgaagcttttaggcaaactccattagctaagacctatgtagataatgcatacagaaatggagcttttgggcccagtgggacatcctcaatttctcaccagagcatgtctatggtgacagttatgcctaacagaacacaagcacagccagcacatggattgattcgtccagacttgtcgtgtggttcagtaattggtaatggtatgtctagagaaaatatcaggagctctatttctgctagggcagacttgatcagcccaccttataaaagcaagccccctgttcagctaattactgaaaatatgagtggtggcaagccagctaaattctcatcttttagaccacaggcttacatgaatctatacaatcacgggaatgttgcagcatctgctgctgccaatctagctgttcttaaatctgatgaaggtaaggctccaacttcccatctgacaacaaaccaaaggaagaaactggctgctgactgtgctctacaagtgaaagcattttcctcagcagccttacaatttgtttggccaagtactgaaaagaaggttatggaagtcccaagagatagatgtggttggtgccttgcctgtcaaagttcagcaggtggaactaaaaaagcttgttttcttaacatggccactgcaaatgcttctaaaggatctgctcgaattcttagtggcatgcgtttaatcaagaattctgatagccatttccccagcattgttacttatttaagccacatggaggaaagtttgcgtggccttttagttggttcactacaagatgtgcagcggagacaacagtggtataatcaactaaaagatgcttccaactgtggaaatataatacccctcttgcttgaattggaaagtaatattcgtggtgtagcattttctactagctggctgaagctaatagatgactggcctgtggaatctcctagtgcatctgctggtgcatcccgtcctgcagcataccaaaaacgtggaactggtggaaggcggggcagaaaacgttcaatggcatctgaatctgctcctgttactgatgatgacaacagctggaaagaagtgaattggtggagtggaggaaatgtttcaaagcgtatcttacagaggggggctctaccaattttgaccattagaaaagctgctcgtcaaggtggaaaaaaaaggatgttcagtgtgtcttatcatgaaggctccaattttccaaggcggactcggcaacttgcttggagggcatgtgttggattaagccagagttcatctcaacttgctctccaggttagatatcttgattcccacataagatggaaggagttcatccctccagatcaaattccttcagaagggaaaagtgtagattctgactattctgttctcagaaacgcagttgtttgtgataaaaaaatagttgacaataagataagatatgcacttaagtttcccaaccagaagcatcttcctgtccgtgtaacaaagaatattttggaagcagaagataatcaggatggggatgggaaattttggttttctgaaaaccatatcccactatacttgctacgagaatttgagcagaaagctggggttagctccttgcctactccaggaatgttagattctaactgttttgccaatttctaccaaaggcgagtaaaatcatcaattggagatgttttcttctatctgcttcacaagggtgatgtatatccttgcacctcatgcaagaaggatgtttccttcagggatatcataaaatgcagctcttgtcaaggtaattgtcataaagagtgcacattaaggtctgttggtagcaaagggggcaatgctgcttccagtttaacatgcaagttgtgccttcagaagcgtagtcttatgcttacaaattacaatacaaacgcaagtttcatcctacctcaacagaagagtaatgtccatcacgcagtggcagctcccaaaataatctttaaggttggttcttcccattccgctgaaccagccacaaaggttgaagctccgccaatcgtgaaggtagaagcccagccagtggtcaagaaggaaacctggccagttgtgaagatggaaacccagccaactgcaaatgtagaagcacagccaactgcaaaagtggaagcctttccaatttcgaatttggcaactcagaataatgcaggggcgcaagtccagcctaagacaaaatctaaaaaacccaagccagaaaaaccgagaaaatccaagaagactgaagagatcaaatactttggtctcgtgtggaagaaaagcactaatgacaaaaataataatgaaaattctggagaagtgttcagggcgaatgatgttatcctaaaaggcaaggatggtgtaggttcatcaataaaacctacttgctgtctttgtaataagccttattgcccagatttcctgtatgtccgctgcgagaggtgcaaaaagtggtttcatggcgatgccttgcaacttgaggaagaaaagatatttgaattggtttcataccgatgttgcagatgccgaaggcgagccataccaaaatgtcctcattcagatgattataagaagcctgaaccagaatacagtgagcaaacagtcgctacgtcatcacagtcaactatgctttctagtgaggagaattttgctgtagcagatcaagatccactgcttgcttcatatggcagagttgaaccgtttggagcacaaacaatggatgctgatttatcgatgaacatgatgagctttaacccaggaaatcagaaactatcagtaagaaggggacaaaacaaaaattgtgaatatgttgaccaatccagtatacatgtggatgactattatatccagaatcaacctcaagggaatgcaaacatcaatttcagtcactcgaatgaattctctttgtcagaggctgatggtgtggatgcttcagagctgttgggatgggatttttctcaaggaaataccagtgctgccccttctgatttcgcagctaattgcccgtggaatgacatcagctgtggcagcgttgctggtgatgaatatgaaccacagacttatttctcattcaccgaactacttgaagctgatgatacacagttcgataatacatttgggatgtctaatagtgtgcaagatgatggtgaccaacaaggaattggttttgatgaaatggctttcatgatggaagatggggcctcaaacatgcctttcccagctattgactccgcctctgacgaggtagcatgtgacaggtgcaagaatcctcagccgccacctgatctcaaatgcgcagtatgtggactgcagatgcaccgtcattgctcgccttgggaggatggtgaacagccatcagatagtgccgattggagttgtggtgcctgccgggagtggcgatga

SEQ ID NO: 12663 - DNA, 3279 bp, Oryza sativa
  Clone ID: TFbOSC404183j.C1.o2.fg
atggaggccagcgccgggctggtcgccggctcccacaaccggaacgagctcgtcgtcatccgccgcgacggggagcccgggccgaagccggtgaagcatacgaatgggcaggtgtgccagatttgcggcgacgacgtcggcctcacccccgacggcgagcccttcgtcgcctgcaacgagtgcgccttccccgtctgccgcgactgctacgagtacgagcgccgcgagggcacgcagaactgcccccagtgcaagacccgcttcaaacgcctcaagggttgcgcccgcgtccccggcgatgaggaggaggaggacgtcgacgacctggagaacgagttcaactggagggacaagaccgactcgcagtatgtcgccgagtccatgctccacggccacatgagctatggccgcggcggtgacctcgacggcgtgccgcagcatttccagccaatccccaatgttcccctcctcaccaacggggagatggctgatgacatcccgccggagcagcacgcccttgtgccgtctttcatgggcggcggaggaaagaggatccaccctcttccttatgcggatccaaaccttcctgtgcaaccaagatccatggacccgtccaaggatctcgccgcgtatgggtatgggagtgtcgcgtggaaagaaagaatggaaagctggaagcagaagcaggagaggttacaccagatgaggaatgatggcggtggtaaagattgggacggcgatggcgatgatgcagatctaccactaatggatgaagctagacagccattgtccagaaagattccgatttcttcaagcctggtcaatccttataggatgattatcataattcggctggtggttctgggcttcttcttccactatcgagtgatgcatccagtgcctgatgcatttgcattatggctcatatccgtcatctgtgaaatctggttcgccatgtcttggattcttgatcagttcccaaagtggtttcctattgagagggaaacttaccttgaccggttgacattgaggtttgacaaggaaggccagcaatctcaactcgccccagttgatttttttgtcagtacggttgatcccatgaaggagcctcccttggtcacagcaaatactgttctgtctatccttgcggtagattatccggtcgacaaggtctcttgctatgtttctgatgatggggctgccatgctgacatttgaagcactgtctgaaacatctgaatttgcaaagaagtgggttcctttctgcaaaaggtacagtctcgagcctcgtgccccagaatggtacttccaacagaagatagactacctgaaagataaggtggcaccaaactttgtcagggagaggagagcaatgaagagggaatatgaggaattcaaggtcagaatcaatgcattggttgctaaagcccagaaagttcctgaggaaggatggacaatgcaggatggaactccctggcctggaaacaacgttcgtgatcatcctggaatgattcaggtcttccttggccaaagtggtggccatgatgtggaaggaaatgaactgcctcgattggtttatgtttcaagagaaaaacggccaggctataaccatcataagaaggctggtgctatgaacgcattggtccgagtctccgctgtactaactaatgctccatatatgttgaacttggattgtgatcactacatcaacaacagcaaggctataaaggaagcaatgtgttttatgatggatcccttggtaggaaagaaagtttgttatgtgcagttcccacaaagattcgatggcattgaccgtcatgatcgatatgctaataggaatgtcgtctttttcgatatcaacatgaaaggtttggatggtattcaaggccccatctatgtcggtactggatgtgtctttagaagacaggcgctgtatggttatgatgcccccaaatcaaagaaaccaccatcaaggacttgcaactgctggccaaagtggtgcatttgctgttgctgctttggtaacaggacaaacaagaagaagactgctaaacctaaaacagagaagaaaaagaggttgtttttcaagagagcagagaatcagtcgcctgcatatgctcttggtgagattgacgaaggtgctccaggagctgaaaatgaaaaggctggtattgtaaatcaacagaagttagaaaagaaatttggtcaatcttccgtttttgttgcgtccacacttcttgagaatggtggaaccctgaagagtgcaagcccagcatcactcttaaaggaagctatacatgtcatcagttgtggttacgaggacaagacagactggggaaaagagattggctggatctacggatccgttacagaggatattcttactgggtttaagatgcactgccatggttggcggtcgatttactgcatacctaagcgggctgcattcaaaggttctgcacctctcaatctttctgaccgtcttcaccaggttcttcggtgggcgcttggatctattgaaattttcttcagcaaccattgccctctttggtatggctatggaggtggattgaaatgtttggaaagattttcctacattaattccatcgtgtatccttggacatccattccactattggcttactgtacattgcctgccatctgtttgctgacaggaaaatttatcactccagagcttactaatatcgccagcctttggttcatgtcactatttatctgcatttttgctacgggcattctggaaatgagatggagtggtgtaggcatcgatgattggtggaggaacgagcagttttgggtcattggaggtgtctcttcacatctctttgctgtgttccaaggacttctcaaggtcatagctggtatcgatacaagcttcactgtgacatcaaagggtggagatgatgaagagttctcagagctgtataccttcaaatggacaaccttgttaataccccctaccactttgctcctattgaacttcatcggggtagtggctggcgtttccaacgcaatcaataacggatatgaatcatgggggccgctctttgggaagctgttctttgcattttgggtgattgtccatctgtatccgttcttgaagggtttggttggaaggcaaaacaggacaccaacaattgtcattgtctggtccattctgctggcttcaatcttctcgctcctctgggtccggattgatcctttcctggcaaagaatgacggccctcttctggaggagtgtggtttggattgcaactag

SEQ ID NO: 12664 - DNA, 4725 bp, Oryza sativa
  Clone ID: TFbOSC400188j.C1.o8.fg
atggggaggaggaaatcgcggccggcccgggcggtaggcctaggccccggcgctgccgctgccgcggagcccgacgcgccgagccctagcggcagcggcggcgcctccaaatcgaggcgcgcggcgaagggcgaggctaggaggagagaggatgtgtgcttcgaggtggatgatagcacgtggtgtttgagcgacggcgaccgccgggacctcgcggagttggtcatgcgcgacgtgaggatctccggcgagggagagggggcgttggacgtagcggctctgcacgaggcagagagggagaagaggtgctcgttgcgcctgcgggtgcgcgacgcgccggaggagggtttccggcttggccagtggcctgtggtaccttcagattgtgtgatcctggagtatgccatcgccggtatggttttctctggatgttttgatggtcccgatgaaggtgtatcaggcctcgcccatttggttagattgagattcgtgacattgcgtgttcatgcctttgctgtatctcggtctgctgattccgtgtcggttgcatcatttagagttagattggggttgatggagcaggcttttgctacatgcgaatcattgttggaggtgacaaggcatccgtggaggaagagtttcatgaatatgatggcttgggttcgtcctgaggtcatgacctcggctgcaatatatgggatggatggtcttgcccggcctataaatggaggtgctaatggtgattttaccccaaagaaggattctcagtttgatcttgctgctttctacgaagccgttaagccctcaatggaggctggactgttggaagaggagcttcccgatttgcttcctcatctcagaacctatcaacttcgtgcagcgaattggatggttcaacgtgaaaagggaaacacaatgatttcatcaccaaatcaacattatgttcattctgcaccttattgtgttcccatagattttatgcacaagaaatctaggatgttctacaatccattcaatggaaatgtctcgatgcatccagaaccttctccaccttatgtctctgggggcattttggctgatgaaatgggcttagggaaaactgttgagcttttggcttgcatttttgcacatcgcaggccatattcagcagactgttctgtctcttcgaatataaaaggagcagatcagataaagaggcataaaagagaaagagttgagtgcatttgtggagctgcaagtgtaacctctgcataccaggggatatggatccagtgtgacatatgtgacgcttggcaacacgctagttgtgttggttactcaccaaaggaggaaatgcatgttgatgatgatgatggtgatgaagcatcaaacaatgaaaaaggaaccctaaagtcaaaaaatagaaggaagaagaaagacagacacacaagaccaggatctctgaaagtttgcatttatgaaggtgcaaagaacacggacttaacatctacccaaaaaagtgatatggctgagataagcacagctgacattgttttgacaacttatgatgtcctgaaagaagatctatcacatgattctgatcggcatgatggtgatcgccgttttttgagatatcaaaagaggtaccctgtcactccaactgtcctaacaagggtccactggtggcggctatgtttggatgaagctcagatggtagagtccagcaaaacttctgtgactgagatggcaatgaggctaaatgctcaacaccgctggtgtatcacgggaactccaatacaacgccggcttgatgatctttttgggcttcttcgctttctcaaaactcatccttttgacacatatagatggtgggtggatattattagggacccatatgagaagggggacatggtagctatgaattatgcacacaagttcttcaaggaaatcatgtggcgctcctctaaaattcatgtttcacgggagttacagctgcctccacaagaagagtgcttttcgtggctcatcttttcatcaattgaagaatatttctatcagaagcagcatgccacttgcatggaccatgcacatgaaattataagacgtatcagagatgatgccaacaaaagcgagccaatatcagactcgaatgttgtatcaaatttgtacctctccaatgatgacattgccaaactcctagtcccactgctcaaacttcgacaagcttgttgccacccgcaagtggggagtttcggtctctgctccctgcagcgtactcctttatcaatgggtgaaattttacaggttcttattgggaaagcaaaagtcgaaggggaggaagagctcaggaaaattgttgtcgccctgaatggtcttgctggacttgctgtcattgaacaaaataatcaagaggccatctctctgtataaagaagcactagctttggcctgtgaaaattttgatgatttccgtgttgaccctttgttgaatcttcatatcaaccacaatcttgcggagctgctcagagctagttctgagtatttgcaagaatgcccactaaaagaacaaacctctgaagtccatggtgcgcgaaaaagaaaggaaactagtcccgctgactcagaaacatccaaggaagacaaaaacatcaatacacaagtatgtggaagtgaagagatggatgtagagaatgattctggatgccacacgtcatctgtctcaactctcagtatggagttacagaatcaaaatatgaattggtggctgtatgctttggattgcattgaacagaacaaggattctgctgatgagctcattaggaagattgatatttcttccaataaaagcaccactggcttgggttcaacagggatgtcttccagggttcaaaccattgctgggttgaagtataccattcaaactggtattgattctctgcaaagttcaaggcaacaagtgatggacagacttttagaacttgacaaaacaatggatagcccaaaggatgaagacattgagtgtcagcgatattgtccaaattgctatgatggtaatggttctttatgcatccaatgtgaattggatgatctgtttcaggggtatgaagcacgtctgtttcttgttaagaaatcaaataatgattctgttattgcctcagtagaggaagcaagggacttgcaaaggcgaaaatatgagttgaatcagttttttcgtaatactaaaactaacgagggatctgaacctggtgacgacaataagaatccaagatctgctcgagaaggttttctggtctacaggcatccttctcgaattgagacttccttaagggttattctaacccactcaaagacaataatgggagagcaatctgctaaaattgctaaaaagaatttgctgctttttgaggctatgcgcaaggagttctctcaagcaaggaatctatcaatagcacagacccagttactgcgtgcccatgatgagatcaagatgtctctctcacgcctgcagctcaaggagaaagatgatgaacccagtgcagtcaatattgttactagagaagagcttataccatacaatgtgcagtttacaagtgaaaaattcttgtctttgtcatctttagctcgtataagaggccaactcagatacttaaagggattggtgctatccaacaagaaaccactgggcaagcatggtgaatcactgcccgagtcaggcaacagtgttgctatagcaacttccatccctgccacagggcaaactgcttctgatattatcaatgaaccatgcccaatttgtcaggagaagatctttgaccagaaaatggttttccaatgtggccatttcgtttgctgcaagtgctgtctttacatgacagaacaagctgcagcccactttgggaggagcaaaaaatggattatgtgccctacttgccgtcaacgtacagatcttgaaaatgttgcttttgtagttgaaaaccagagaggaaatgctgatagagaaattgaggatttggcagaaagcgctatttctgtccaaggttcatatggaacaaagattgaagctgtgacaagaaggattttgaggatcacttcaactgacggagcagccaaaatacttgttttttcaagctggaatgatgttcttgatgtgctagagcactcccttgccgctaacaatatctcttatgttcggatgaaaggaggaagaaaatcgcaaacagcgcttgcccagttcaaaggtctggcaagtagtataagtggagagaaagcaaagaagtcattttccaagatgcaacctgctcaagtattgctaatgcttatccagcatggtgcaaatggtcttaatcttttggaagcacaacatgtaatattagtggagccgttgttaaaccctgcagctgaggcgcaagctatcagcaggatccatagagttgggcaagacaaaagcacgtttatccaccgttttattgtgaagaatactattgaagagagcatctacaaattaaacaggggcagagctgtttgctccacgatacaccgtaaatcaaaaaatttcaaagatgagcttgttttgacactgaaggatattgagtctttatttcctgtggcaacacttgatcagccttcagaacaggagaataagaattacggtggggccggtgggcatatgagaagtttacctccatctgttgcagctggcttagctgctgaaaggaggttattggagcaacatgacaaccagcattaa

SEQ ID NO: 12665 - DNA, 286 bp, Oryza sativa
  Clone ID: TFbOSC401336j.C1.o5.fg
atggaggcgagcgcggggctggtggcggggtcgcacaaccggaacgagctggtggtgatccggagggatggaggaggagggggaggggttggggggaggagggcggcggaggcgaaggcggcgtgccagatatgcggcgacgacgtcggggaagggcccgacggggagccgttcgtggcgtgcaacgagtgcgccttccccgtctgccgcaactgctacgactacgagcgccgcgagggctcgcaggcttgcccccagtgcaagacccgcttcaagcgcctcaagg

SEQ ID NO: 12666 - DNA, 3570 bp, Oryza sativa
  Clone ID: TFbOSC900180j.C1.o3.fg
atggcggcgaacgcggggatggtggcgggatcccgcaaccggaacgagttcgtcatgatccgccccgacggcgacgcgccaccgccggctaagccagggaagagtgtgaatggtcaggtctgccagatttgtggcgacactgttggcgtctcggccaccggcgacgtctttgttgcctgcaatgagtgcgccttcccggtctgccgcccttgctacgagtacgagcgcaaggaagggaaccagtgctgcccccagtgcaagactagatacaagaggcacaaaggtagccctagagttcagggcgatgaggaggaggaagatgttgatgacctggacaatgaattcaattataagcatggcaatggcaaaggtccagagtggcagatacagagacagggggaagatgttgacctgtcttcatcttctcgccacgaacaacatcggattccccgtctgacaagtgggcaacagatctcaggagagatccctgatgcttcccccgatcgccattctatccgcagcggaacatcaagctatgttgatccaagtgttccagttcctgtgaggattgtggacccctccaaggacttgaattcctatgggattaacagtgttgactggcaagaaagagttgccagctggaggaacaagcaggacaaaaatatgatgcaggtagctaataaatatccagaggcaagagggggagacatggaagggactggttcaaatggtgaagatatgcaaatggttgatgatgcacgtctacctctgagccgcatagtgcctatcccttcaaaccagctcaacctttaccggattgttatcattctccgtcttatcatcctgatgttcttcttccaatatcgtgtcactcatccagtgcgggatgcttatggattgtggctagtatctgttatctgtgaaatttggtttgccttatcctggctcctagatcaattcccaaagtggtacccgataaaccgtgaaacataccttgacaggcttgcattgagatatgatagggagggagagccatcacagcttgctcccattgatgtctttgtcagtacggtggatccactaaaggaacctcctctgatcacagcaaacactgttttgtccattctggctgtggattaccctgttgacaaagtgtcatgctatgtttctgacgatggttcagctatgttaacttttgaggctctgtcagaaactgcagaatttgctaggaagtgggttccgttttgcaagaagcacaatattgaaccacgagctccagagttttactttgctcaaaaaatagattacctgaaggacaaaatccaaccttcctttgttaaagaaaggcgggcaatgaagagagagtatgaagaattcaaggtacggatcaatgctcttgttgcgaaggcacaaaaagtacctgaagaggggtggaccatggctgatggcactgcttggcctgggaataacccaagggatcaccctggcatgattcaggtgttcttggggcacagtggtgggcttgacactgatggtaacgagttgccacggcttgtctacgtctctcgtgaaaagaggccaggattccagcatcacaagaaggctggtgcaatgaatgcattgattcgtgtatctgctgtgctgacaaatggtgcctatcttctcaatgtggattgtgatcactacttcaacagtagcaaagctcttagagaagcaatgtgcttcatgatggatcccgcactaggaaggaaaacttgttatgttcagttcccacaaagatttgatggcattgacttgcacgatcgatacgctaatcgcaacatagtcttctttgatgtgttcttggggcacagtggtgggcttgacactgatggtaacgagttgccacggcttgtctacgtctctcgtgaaaagaggccaggattccagcatcacaagaaggctggtgcaatgaatgcattgattcgtgtatctgctgtgctgacaaatggtgcctatcttctcaatgtggattgtgatcactacttcaacagtagcaaagctcttagagaagcaatgtgcttcatgatggatcccgcactaggaaggaaaacttgttatgttcagttcccacaaagatttgatggcattgacttgcacgatcgatacgctaatcgcaacatagtcttctttgatattaacatgaaaggtttagatggcattcagggtccagtttatgtgggaacaggttgctgcttcaataggcaggccttgtatggctatgatcctgtactaactgaggctgatttggaacctaacattgttgttaagagctgctgtggtggcagaaagaaaaagagcaagagctacatggatagcaaaaaccgtatgatgaagagaacagagtcttcagctcctatctttaacatggaagatatagaagagggcattgaaggttatgaagatgaaaggtcagtgctgatgtcccagaagagattagagaaacgttttggtcaatcgccaatttttattgcgtccaccttcatgactcaaggaggcataccaccctcaacgaacccagcatctctactgaaggaagccatccatgttatcagttgtggatatgaggacaaaactgaatggggaaaagagattggctggatctatggttcagttactgaggatattctgactggatttaaaatgcacgcaagaggttggatatcaatctattgcatgccaccacggccatgcttcaagggttctgcgccaatcaatctgtctgatcgtcttaaccaagtgctacgttgggctcttgggtctgttgagattctgcttagcagacattgtcctatctggtatggttacaatgggcgtttgaaacttctggagaggctggcttacattaacaccattgtttatccaattacatccattccacttatcgcctattgtgtgcttcctgctatctgtctcctcaccaacaaatttatcattcctgagattagcaattatgctgggatgttctttattctgcttttcgcctccattttcgcaactggtattctggagctccgatggagtggtgttggtatcgaggactggtggagaaatgaacagttctgggtcattggtggcacatctgcccatctcttcgctgtgttccagggtcttctgaaagtgttagcaggaattgataccaacttcactgttacctcaaaggcgtccgatgaggatggtgactttgctgagctatacgtgttcaagtggaccagtctcctcattcccccgaccaccgtgcttgtcatcaacctggtgggcatggtggcgggtatatcatatgccattaacagcggttaccaatcatggggtcctctctttggaaagctcttcttctccatctgggtgatcctccatctctaccccttcctcaagggtctcatgggcaggcagaaccgcactccgaccatcgtcatcgtctggtcgatcctcctcgcgtcgatcttctcccttctgtgggtcaagatcgatcctttcatttcgcctactcagaaagccgtcgccttggggcaatgcggtgtgaactgctga

SEQ ID NO: 12667 - DNA, 3282 bp, Oryza sativa
  Clone ID: TFbOSC401656j.C1.o43.fg
atggcaaagaccctgcaagggactcaacagcaatatgcagcaagtggatttcctacccagcaataccccacaagtggctggacacaatctgcagctgaaattcttcagttggataatatggatcaagatacatccgtagttcgcaatattattcaccgtaaaattgtagagtacctaaatgagcggaaggaattctgcaactttgacctatcctttcttatggaaattggaaaatgtattgaccgacatctttttgagaaagctgattcaaagattaagtatatggatcttgaaactttaagaaccaggttgaatgctatcgtcaattctgcatcatttcggggtagatataaccaatatgaaaactgtatgggtgctgctaactttgctcattcgttggctgataaacccaagcagatgcctgaaagattagcaaacaccatttttacctcatgtgcatcaactctaccgaaatgtagccctagtattgatgtactgcatattggccatataaaagaacatttctcaggtgatgcgtatcaaaatgatagttcacaaccatcaacctctgggagttctagttctttgtcagcagtgtgggatcaaacaacatgttctagtgcaatgagaacacttccgatggattctttctcaacagtgaacggacaaaacctttccacaaacaataaaagtttgtatcccacaaccggtcagggacctttgttgcaacaatacatagaatgtgagatgaagcaagagacgtggagtcggtcactagagcaatcagatcagtcaaacattaccactggaaaccgtgacttgtatcatgctcaaattcatccgtacatcaatggagagcacaaacgggatcgatgcattcaaatgaaagaaaaacttgggcatacttctgatcatgaaggtttctccagggagaaaagctcaaatttaagcaaccactttatgcatcatcagcagggcttcatgactaattatggtgcttgtagccctgtaagcaagacagtggatagagctgaacagacatcaaatagtactgtatcaaagccgacttcacctgcttcagatggatcttctggcaagcattatccagcaaaacgcttgaaagttgatgttccccatcttgtccatgtcaatgaaatggaggcttcaaaggaacaacaacctgctgccaatgagacttatgcatctgctgaaacagtacaatctgaagtcactaattcaccaacaaaatcaccatgttgtacttccttgggggacaacattgcttgcaccgataatgtacatggaatggatatggtcagattgtcggggagtgctgtacaaactgaagaagaatttcgtcgtgaaaatagtgacattgagatgaaggatgcaaaggttgatttattggaccaaacattgtcaggggacagcctgagggcaaggaagagaagaggggcctcagtactttatgcattaacttctgaggagcttaaagatcacttgtgtactctgaaccatgatacttctcagagcaaagtgccgactgaagagctgctatcagttgaaggcttgcctgatcagaacacatgcaatttatgtgggatggaaagactcctctttgagccccctccacgattttgcgcgctctgttttaaaataattaattctacaggatcctattatgttgaagtggaaaatggaaatgacaaatcttcaatatgtggcagatgccaccatcttagtagtgccaaagccaaatatcagaagagattcagctatgcagagacagatgctgaggcagaatggtgggtccagtgcgataagtgcaaagcttggcagcatcaaatctgcgcactttttaaccccaaaatcgtggatccagaggctgaatatacttgtgcaaaatgtttcttgaaggaaaaggataatgaagatgttgattcacttgagccatctactattctgggagcacgcgagttaccaagaactagactaagtgatcatattgagcaaaggctttctgagcggcttgtgcaggagcggcaacagagggcaattgcttctggaaaaagtgttgatgaggtaccaggagttgaaggtcttactgttagagtggtatcttcagctgatagaacactgcaagtccaaccacgtttcaaggatttttttaaaaaagaacaatatcctggggaatttccgtacaaatcaaaggccattctcttgtttcaaaagaatgaaggtgtagatgtatgcctgttcgccatgtatgtgcaagagtatggttcagcctgcccatcaccaaatcaaaggcacgtttatcttgcatatattgattctgtcaagtacttcagaccggaaatcaagtcggccagtggagaagctctccgtacctttgtgtatcatgaaattttgattggctacttggatttctgcaagaaacgagggtttgtaagctgttccatatggacttgcccatctacaaagcgtgacgattatgttttatattgtcatcctacaatacagaagatgccaaagtctgacaagcttcggagctggtaccagaatttggtaaagaaggctgttaaggagggggtagttgtggaacggaatacactctatgacttcttccttcagcccaccaatgaatgcaagaccaatatctcagctgcatggttgccatactgtgataatgatttctggcctggggaagcagagaggctccttgaaaagaaagatgatgacacctcacagaagaaagaaactcaactaggaaggcttctacgggttgccaaacgtgatgaccggaaaggaaacctcgaggatattttacttgtgcataagcaattttgcaagcattgccaccatcctattgtatctggtagtagttgggtttgcaccagctgcaaaaacttctttctttgtgaacgttgttatgctgaggagctgaatacccctctgaaggacaggcacccagctacaacaaaacaaaagcatgcatttgaaagagactaccttgaaggcttggtgcatgcatcaagatgttttgatcgaagttgcacttccaaactttgtttgacgttaaagaaactgttcttccatggtgtacgatgtcatacccgtgcccgtggtggaggaggttgccatatgtgtgtattcatgtggaaactgctgttcacgcactcactgctttgtgacaatgcagactgttcagctcccagatgcagggatataaaggcatatattgctgacagaagcatgacagaccttagtatatctggatga

SEQ ID NO: 12668 - DNA, 2304 bp, Oryza sativa
  Clone ID: TFbOSC419836j.C1.o17.fg
atggcgctcgaccccgccgacgatccgctgctcgccgattgcaagtacaagttgaatcactttagaataaaagagctaaaggatgtcctgcatcagcttggacttccaaagcaaggaaggaaacaggaacttgtggacaaaattatagcagtattgtctgatcaacaagaacaagactccagattgaatggcttgccaaacaaaaagatggttgggaaagaaactgtggctaaaatagttgatgacacttttgcaaaaatgaatggctccacaaatgctgttccagcctctagaaatcagactgactcggggcacattgtaaagcctaaaaggaagtcagatgattctgctcagttggatgtcaaagtccgttgtccctgtggttattccatggccaatgattccatgattaagtgtgaaggtccacaatgcaatacacagcaacatgtaggctgcgttatcatatctgagaagcctgcagacagtgttcctccagaattaccaccacacttttattgtgatatgtgccgaatcactcgagctgaccctttctgggttactgttaatcatcctgtacttccagtctcaataactccctgtaaagtagcatctgatgggtcatatgctgtacagtatttcgagaagacctttccgctatcaagagctaattgggagatgcttcagaaagatgaatatgacctccaggtttggtgtatcctattcaatgatagcgtacctttcaggatgcagtggcctttacattctgatattcaaattaatggtattcctattagggttgtcaacaggcaacccacacaacagttaggggtgaatggtagagacgatggtccagttttaacagcatatgtgagagaagggtctaataagattgtcctatctagaagtgactctcgcacattctgtttgggagtcaggattgccaagaggagatctgtagaacagcttgttggatatggccagaactcggtcgattctctcagcatctacaacacaagctggtacctgggaggaacatggcaactcttgagatttaggaaccctgttttatttatcaaaggtcctctaaattttcatagcatacaggtcctatctttggtgccaaaggaacaagatggtgagaactttgataatgcccttgctcgtgtgcgtcgctgtgttggtggtggaaccgaggcagataatgctgacagtgacagtgatattgaagttgtagctgattctgtctctgtgaatctccgatgccctatgactggttcaaggatcaagatagctggccggttcaaaccctgcgttcacatgggttgttttgatttagaagcttttgtggaacttaatcaacgttcaagaaagtggcagtgcccaatttgcctgaaaaactactctttggacaacataatcattgatccttacttcaaccgcataactgctttggtccaaagttgtggagatgatgtatctgaaattgatgtcaagcctgacggttcctggagagtcaagggtggagcagaactgaagggtcttgcacagtggcatttacctgatggcactctctgtatgcctacagatacaaggtccaagcccaacataagaattgtaaagcaagagattaaagaagaaccgttgtctgaagaaacaggtggccgtcttaagttgggaatcagaagaaacaacaatggccagtgggaaattaacaagagattggattctaacaatggtcagaatggatatattgaagatgaaaactgtgttgtttcagcaagcaacactgatgatgagaacagcaaaaatggaatctataatccagaaccagggcaattcgatcaactaaccagcaatatctatgatcttgattcttctcctatggatgcacattttcctccagcaccaacagagcaggatgtaatagttctgagtgactcagatgatgataatgttatggtgttatcacctggtgatgttaatttcagttcagcacatgacaatgggaatgcattcccacccaacccacctgaagcttcaggaatttgtggggaacaacctagaggagccggcccagatgtgacttcatttcttgacggtttcgatgatctggaactgccattttgggaatcttcgagctctcaagatgctgcaggcacacaggtgacagacaatcaatgcgaaatgcaaaatttcattgtcaaccatcaatttttgcacgagccaattttaggggttaacttgggtggaacagcagcatcaaacacactggaatgtgagcatgatggtgcgttacaagcttga

SEQ ID NO: 12669 - DNA, 3168 bp, Oryza sativa
  Clone ID: TFbOSC900335j.C1.o17.fg
atggaggcgagcgccgggctggtggccgggtcgcacaaccggaacgagctggtgctgatccgggggcacgaggagcccaagccgctgcgggcgctgagcgggcaggtgtgcgagatatgcggcgacgaggtcggccgcaccgtcgacggcgacctcttcgtcgcctgcaacgagtgcggcttcccggtgtgccgcccctgctacgagtacgagcgccgcgagggcacccagaactgcccccagtgcaagacccgctacaagcgcctcaaggggagcccgagggtgcccggggacgaggacgaggaggacattgacgacctggagcacgagttcaacatcgacgacgagaagcagaagcagctgcagcaggatcaggatggcatgcagaacagccacatcaccgaggcgatgctgcacggcaagatgagctacgggaggggccccgacgacggcgacggcaacagcaccccgctcccgccgatcatcaccggcgctcgctccgtcccggtgagcggggagttcccgatatcgaacagccatggccatggcgagttctcctcttccctgcacaagcgcatccacccctacccggtgtctgagccagggagtgcaaagtgggacgagaagaaagaggtgagctggaaggagaggatggacgactggaaatccaagcagggcatcgtcgccggcggcgcccccgatcccgacgactacgacgccgacgtcccactgaacgacgaggcgaggcagccgctgtcgaggaaggtgtcgatcgcgtcgagcaaggtgaacccgtaccggatggtgatcatcctccgtctcgtggtgctcggcttcttcctccggtaccgcatcctccacccggtgcccgacgccatcccgctgtggctcacctccatcatctgcgagatctggttcgccgtgtcgtggatcctcgaccagttccccaagtggtacccgatcgacagggagacctacctcgaccgcctctccctccgctacgagcgcgagggggagccgtcgctgctgtcggcggtggacctgttcgtcagcacggtggatccgctcaaggagccgccgctggtcacggccaacaccgtgctgtccatcctcgccgtcgactaccccgtcgacaaggtgtcctgctacgtctccgacgacggcgcgtccatgctcacgttcgagtcgctgtcggagacggcggagttcgcccgcaagtgggtgccattctgcaagaagttcagcatcgagccccgcgccccggagttctacttctcccagaaggtcgactacctcaaggacaaggtccatcccaacttcgtccaggagcgccgcgccatgaagagagagtacgaggagttcaaggtgaggatcaacgcgctggtggcgaaggcgcagaaggtgccggcggaagggtggatcatgaaggacgggacgccatggccggggaacaacacccgcgaccacccgggcatgatccaggtgttcctcggccacagcggcggccacgacaccgagggcaacgagctcccccgcctcgtctacgtctcccgtgagaagcgccccggcttccagcaccacaagaaggccggcgccatgaacgccctcattcgtgtgtcggccgtgctgacgaacgcgccgttcatgctcaacttggattgcgatcactacatcaacaacagcaaggccatcagggaggcgatgtgcttcctcatggatccgcaggtcggacggaaggtttgctacgtgcagttcccgcagaggttcgacggcatcgacgtccacgaccgatacgccaaccgcaacaccgtcttcttcgacatcaacatgaaggggcttgatgggatccagggcccggtgtacgtcgggacagggtgcgtgttcaggcggcaggcgctgtacggatacaacccacccaagggacccaagaggcccaagatggtgacctgcgactgctgcccttgcttcgggaggaagaagcggaagcacggcaaggacggcctcccggaggccgtcgccgccgacggcgggatggacagcgacaaggagatgctcatgtcgcagatgaacttcgagaagcggttcgggcagtcggcggcgttcgtgacgtcgacgctgatggaggaaggcggcgtcccgccgtcgtccagccccgccgcgctcctcaaggaggccatccatgtcatcagctgcggctacgaggacaagaccgactggggtctcgagctggggtggatctacgggtcgatcacggaggacatcctaacggggttcaagatgcactgccgcgggtggaggtcggtgtactgcatgccgaagagggcggcgttcaaggggtcagcgccgatcaacctatctgaccgtctcaaccaggtgctccggtgggcgctcggctccgtcgagatcttcttcagccggcacagcccgctcctctacggctacaagaacggcaacctcaagtggctcgagcgcttctcctacatcaacaccaccatctaccccttcacttctctccccctcctcgcctactgcaccctacccgccgtctgcctcctcaccggcaagttcatcatgcctccgattagcacgtttgcgagtttgttcttcatcgcgctcttcatctccatcttcgcgacgggcatcctggagatgaggtggagcggggtgagcatcgaggagtggtggaggaacgagcagttctgggtcatcggcggcgtgtcggcgcacctgttcgcggtggtgcagggcctgctcaaggtgctggccgggatcgacaccaacttcaccgtcacgtccaaggccaccggagacgaggacgacgagttcgcggagctctacgccttcaagtggaccaccctcctcatcccgcccaccacgctgctcatcctcaacatcatcggcgtcgtcgccggcgtctccgacgccatcaacaacggctccgaggcgtggggcccgctcttcgggaagctcttcttcgccttctgggtcatcgtccacctctaccccttcctcaaggggctcatggggaggcagaaccggacgcccaccattgttgtcatctggtccgtgctgctcgcctccatcttttccttgctctgggtcaggattgatcccttcaccatcaaggccaggggccctgacgtcaggcagtgcggcatcaactgctga

SEQ ID NO: 12670 - DNA, 2044 bp, Oryza sativa
  Clone ID: TFbOSC20379j.C1.o1.fg
atgccgcgcccctccacctccgcctccgccaccgcctcccgcttcgccgccttttgggccgccgacgcgctcgccggcgacgacgccctcgacttcgccgtcaccaaggcgatggtgggcgtctccccggattccgtcagggccgcccctgaggcggtgcgggagcgcgtggcgctgcggtgcctccaggaggtcgtctccctcgcctcctccgatggcgagcgcggcgccacggcctcggccatagcggcgccgggggaggggatgcttggggtggaggacgcatcccgcacctgcgaggatttgctgcttcaactcatccgggaggttggtagctcagggagcttggagaaggatatgcttccgccctttagacaagatatccagaagtttatatgcataaagagacctacattaccagaaacttcttttgagttgctcagaaaagtttacccagagattacacctgtggttccaccatccccagtggagcagaatggaaatgaccaacacgacaatatcagccatgatcttgtgaatacagagaagaccggattcactacagatggtgctcaacttcagcaggatgatctagcaaatttagtcgatgaaagaaacacagaaaatcttcagaaggatgcaatggcaacttctgattttcaacaaccatgtacatcagacaataggtgttttgatcagcgacaagaagattctattaatactgttggtgtcaacatcaggtctccagaagacagtccaactaatgtaaatagacacatgtcagttgcagctgagccttctttagctagttctgcagatttgctgggaagtaatacaggaagaatgtctgagcaggacacgatagatcatacaaccatagttcaatcacaatcttgtggggtcagatatcctaataaacatcacagtaataatggagacatgccacttgttgccagcattcagtcaccaaaggattccatccatgaaggatcaaccatgcagacaactgtttctccagctgttgacagaagcaatgatgctttaccggcatccaacatgacccacttgcctgagtttattgctgtagaggataaaataatgacttcagaaccacacttcagcaaaactcatccaaattcagggcaacatgatactggtgataaagcaaatcaagatgtgggttgtggcagtactggtattcagacagctgctgctttaccatctgaaggctttaatggggatgttcaaggagacaaatctgaaattaaagatccagcagggaatactacacagcatactgaaacttttgaacaagaaaatagtgacaaggctcatttggaagttggttgttccgacaaagttaatcaagctctatatgatgatggcaacatcataaaaaataatatggtctttggtgggctgaataagcaaactgctctagagtctcatggctgcagcatgaccttgcataacagaaattcagaggccaaccatttctctgagcagaatattggaaggaacagaactgaagttcagaatgattgctgcagtattccaacctctcctaatgatgttaatgacaagcgagcaaagcaagcttcaaacaaggaaaccatggcgaatactgtggcagaaacattgcatgtgcattcttcagatggtagtttcagtggcttcgcagctggtggtcttctgtcaatggctgaaaaactaccgttctgtactcaggatcaatatgctaatggtactgttgagggcttgtcagaacaagagttgtgcataaaatgtggcaaagatggtcagttgctgaaatgcagtggctgttttttagccgttcatgatacatgttttggctcatcagtgacatttgatgattctggtcagttctactgtcctgtatgcttctatactaaagcaactgaagcatatcaaaaggcaaagaaaacatattctgaagcaaggaagaacctatcagctttccttggtagaaagcaattggctgagcaatatcaacaagctgcagtgcggcaaaaagctgccaaca

SEQ ID NO: 12671 - DNA, 2553 bp, Oryza sativa
  Clone ID: TFbOSC900210j.C1.o1.fg
atggtgggcgtctccccggattccgtcagggccgcccctgaggcggtgcgggagcgcgtggcgctgcggtgcctccaggaggtcgtctccctcgcctcctccgatggcgagcgcggcgccacggcctcggccatagcggcgccgggggaggggatgcttggggtggaggacgcatcccgcacctgcgaggatttgctgcttcaactcatccgggaggttggtagctcagggagcttggagaaggatatgcttccgccctttagacaagatatccagaagtttatatgcataaagagacctacattaccagaaacttcttttgagttgctcagaaaagtttacccagagattacacctgtggttccaccatccccagtggagcagaatggaaatgaccaacacgacaatatcagccatgatcttgtgaatacagagaagaccggattcactacagatggtgctcaacttcagcaggatgatctagcaaatttagtcgatgaaagaaacacagaaaatcttcagaaggatgcaatggcaacttctgattttcaacaaccatgtacatcagacaataggtgttttgatcagcgacaagaagattctattaatactgttggtgtcaacatcaggtctccagaagacagtccaactaatgtaaatagacacatgtcagttgcagctgagccttctttagctagttctgcagatttgctgggaagtaatacaggaagaatgtctgagcaggacacgatagatcatacaaccatagttcaatcacaatcttgtggggtcagatatcctaataaacatcacagtaataatggagacatgccacttgttgccagcattcagtcaccaaaggattccatccatgaaggatcaaccatgcagacaactgtttctccagctgttgacagaagcaatgatgctttaccggcatccaacatgacccacttgcctgagtttattgctgtagaggataaaataatgacttcagaaccacacttcagcaaaactcatccaaattcagggcaacatgatactggtgataaagcaaatcaagatgtgggttgtggcagtactggtattcagacagctgctgctttaccatctgaaggctttaatggggatgttcaaggagacaaatctgaaattaaagatccagcagggaatactacacagcatactgaaacttttgaacaagaaaatagtgacaaggctcatttggaagttggttgttccgacaaagttaatcaagctctatatgatgatggcaacatcataaaaaataatatggtctttggtgggctgaataagcaaactgctctagagtctcatggctgcagcatgaccttgcataacagaaattcagaggccaaccatttctctgagcagaatattggaaggaacagaactgaagttcagaatgattgctgcagtattccaacctctcctaatgatgttaatgacaagcgagcaaagcaagcttcaaacaaggaaaccatggcgaatactgtggcagaaacattgcatgtgcattcttcagatggtagtttcagtggcttcgcagctggtggtcttctgtcaatggctgaaaaactaccgttctgtactcaggatcaatatgctaatggtactgttgagggcttgtcagaacaagagttgtgcataaaatgtggcaaagatggtcagttgctgaaatgcagtggctgttttttagccgttcatgatacatgttttggctcatcagtgacatttgatgattctggtcagttctactgtcctgtatgcttctatactaaagcaactgaagcatatcaaaaggcaaagaaaacatattctgaagcaaggaagaacctatcagctttccttggtagaaagcaattggctgagcaatatcaacaagctgcagtgcggcaaagagctgccaacagtgaggatcatttcaatgggtgtaacaacgcaatcaaaaggcaaggtaatcatcaatctgaaggaaataacctttctcatagggatgaagagcctgcccgacagaggaagaagcagaagacaaatgctagggatgcttgcactcaggaagtagtcactaaaaaggcacccactgttcataactctgatgttgtatccatgaaaaagaattctgtactccagaataacagaaaacaagctcaggttgcagagcaggagcagccagaggaaaatgcagaagctagtggagagtctggtaatacaaattcatcgcacaaaacagcacattcatctcagaacaagtgcagtcctgctgcaagtcagaatattgatgctgacaaagaagatgtccttgcaagttctcaacagtcagaagattctgatgaaatcgaagctacatcttctagtgaccctagcaagcaaccatcgcctcattggcgcaagttgagacaccgcaaagcaagatatcaggataataatacagcaattccaattaattctaagaaaacactggggcaccatgatcaacatatggcttcaccatcaaggaaaaggaactatgcatatccacccaagcgttag

SEQ ID NO: 12672 - DNA, 372 bp, Oryza sativa
  Clone ID: TFbOSC4045j.C1.o1.fg
atggccagtggcggcaccgtctgctccatgtgcggcgacgtggggttcccggacaagctcttccgctgcgcccgctgccgccgccgcttccagcactcctactgcaccaactactacggcgacggggcaccggtggaggcgggcgccggcgtgtgcgactggtgcctcagcgacgccgccgtcgtcgccgggaagaaggggccatcgtcggaagggaacgaggagccgttctccagggagtaccgtggcaggagcaagcaggcggcgtcgaccggcggaggcgagcaggagggcggcggcggcggcggccggagggtctccaaggccggcgctgtccgtaggtacaagcttctcaaggacgtcttgtgctaa

SEQ ID NO: 12673 - DNA, 2127 bp, Oryza sativa
  Clone ID: TFbOSC400792j.C1.o5.fg
atggaggacgcgtggaggaaggcgaagagggcgctggggctcggcctgtgcgtgcacgtgcccgaggcggaggagggggagagggaggactgctcgagcgagcggcggaggcggctgccggcggcggcgagcggcgcgcggtgccggggcgaggccgcggtgacggtggggccggagtcggtgccggcgccgtcggacgttccggtgccgctgccgctccccggcgtggtgcggaggtccaagtcggggagcagccgatcctcctctaagaggaaatgtgcaatatgctttgactccatgcggcatgggaatggtcaagccctattcacagctgaatgttctcatatgttccattttcactgcatctcatctaatgtgaaacatgggaattatttctgcccaatttgtcgggcaaagtggaaagagatacccttcaatcgatcgctatcttctaacattccgcatggaagaattggagttagccgagctcgattgacccaacaagatgccaatatggctcttctccaccaagttccaaaccatcatcagcgagttcgtcgcccacatacttctgagccagcagacttcaatgatgatgaacctttgcagcagccagaagtttttgacaatcttaatgttcgatctactaagactgcagagataaacacatatccagaattctcaaccataccgcagtcctcatctaaagatgattttgctattctgatccatctgaaggctcctagtgctaacccagaccagggcacaggtaaattggcgaatgaaagctcagctggatcttcaagaaaccgtgctccggttgatctcgttactgtgcttgatgttagtggcagcatggcaggcaccaaactagcgctcctaaagcgagcaatgggttttgttgttcagcaccttggaccaagcgatcgtctttctgttattgctttctcatctagtgccagaagactgttccaccttcagcgaatatcacatcatggcaggcagcaggcattgcaggcaattaactcacttggtgctagcggcggtacaaacattgctgatgcactgaagaaagctatgaaggtgattgaagaccgcagttacaagaattcagtgtgcagcatcattcttctgtcggacggccaagatacatacaacatttcctcaagtgttcagggggcttcaccagattacaagtcacttgtcccatcttccattataaatgatgctcgccatacggtgcctcttcatgccttcggatttggagcagaccatgactcggattccttgcactcaattgctcaagcttctggtggcaccttttcctttatcgaggatgaaggtgtaatgcaagatgcatttgctcaatgcattggtgggcttcttagcattgtcatccaagagatgcgagttagcatggaatgtgttcatcctggtgttcaactttcttccatcaaatctggtagctacccaagtaaggtggcaagagatggacgaaacggttccgtcgacattggtcacctgtatgctgatgaggagagagacatcttactgtccgtgaacatcccacaatctcgtcatcagacctcagcactgaaggtttcttgtgcctacagagatccggtgacaggtgagacaatcaagattcaaggtgacgaggtgaagatcaaccggccgacaacatccaacatatctgagcatgtgtccattgaggttgaccgcgagaggaaccgcatacaagctgctgaatccatagagtgtgcaagggctgctgccgagaagggtgctctctctgaggccgtggccattcttgaggattgccggaggacactgtcacagtcattcgcaagccggagcggtgaccgtctgtcgctgtccctcgacgcggagctgcgagagatgcaggagaggatggcaaatcgccagctctacgagtcttcagggagggcttacatgctgtccgggctgagctcacactcgtggcagagggcaacagcacgaggtgactcgacggacagcagcaccgtcatctactcctaccagacgccatccatggttgagatgctacagcactcccagaaccatctcccttcgcctcagggccggcaaaggccacggccccggtga

SEQ ID NO: 12674 - DNA, 4872 bp, Oryza sativa
  Clone ID: TFbOSC900208j.C1.o7.fg
atgtcggggcaggcgccgcagactaatcaggttggtggcagtggcgtcggtggcgctgacggactgccacagcagatgcaggacgtggtgggacttgggggccttgatacccagtttttgttaatgcgcaacactatgcgcgataggatattcgaatatataggaaggaagcaatcatcgactgattggcggcgacggctgccagaacttgctaaacggctcgaggagatcttgtatagaaaattcttaaacaaggccgattacctcaatatgatgaggggaccagttgagccacaattgcagtttgctattaagactttgagtgctcagaaccaacaaaatcaacaaaaccaacaaatgccaaggcaaatggcatcttcctctggctatggcacgatgattccaacaccgggcatcacacaaagtgcaactggaaattctagaatgccctatgtaactgacaacactggccttccgtcatctggtgcaaccatggttcctcagggtgccaacactggtacctcacttccaggttcaatgtctaacggttaccagcatctaactaccagtgttccattaaattcaaccacaagcagcatcccatctacgatgggtcctgtgggtattcagcggcaagtgactcatatgatccccactccaggatttaataatcaacagaatgtgcctgtgaatcctgatttttcaaatggagctggatatttcaatggtgagccaactgtgacatcacaaatgcaacagcagaagcaatttcctagcaaccaaaacagtcatcaaatccagcatattggggggcacagtaattctggaatgcattcaaacatgctggagaattcttctgcatatggtttatcagatggacatgtgaatggtggaatgggtgtacatgggtcaaacatgcagctaacaaacagaagtgctgcatcagaagcatacattaacatatccacatatggaaattcacctaagcctgtgcaacaacaattcaaccagcaccctccacagaggataccgacaccagttgatatatctggttctgggaatttttacaatactggttcttctgctttaacagcagcgaataatcatagcatgggtgctacaaatttgccatctagatcaagaatgaattccatgttgcacacaaatcagttaaacatgcaatccattcaaccgcaacctcagataaaaactgaggttttggatcagccagaaaagatgaattttcaatcttctcagttgactcacgaacaacttatccgccagcaacattcaatgcagcaacatcaaatgcagcctagttcccagtttgtgcaaaaccagtaccatctgaatcaacagcagcctaactcacagcatcagcagtctatactgagaagcaattcccttaaacagccccaactgagttccagccattctatgcaattgtcagaacaaggagctctgccacacactgagctgatatcttcacaagctactgaacacgctgacattccaatttaccagggtcaataccagcaaagaagtgctcatgataatgtcaaaggagggcaagtgtttggacatctttccagctctcaaaattttcattctaatgcgtcccatgattctcagcaattgttgccaactaatcagcagcttgatgacagttcaaatgatgtaagttatgtcttgaaaggatctcagccagagcagatgcatcaggctcaatggcggcctcagacaatggaaaaagctcctgtcactaatgattcgtctcttgagaagcaaatacaggcagatttgtgtcagagaacaatgtctcaggatggagcacaacagccattttcatctgattggcgccttcctggttgtactgtgactccagctgatcctgcattgccaaagctccctagtggaggacttgaacaggctgctggaaatatctattattttcgtcagatgaagtggttacttttgctatttcatgcaaaatcatgcttaactcctgtcggaagttgtaaattccatcgctgttttcagtgtcctgtatgcagtaatgcaaagaaacttctgcagcgttcagctgaactagcaagcaagcaaaagccccctgagcctagaaaaattgctcaacagaatacggctcaaagaatcatgaatggggtagagggtgacataatggacatcgacctagtgtcagatgaaatctttgatagtcagccttctgttccaaaacgcttaaagatgcagcctgtatcacccagtactgcagagcgtgaagtttctatgccctccaatgcagggcttatattgcaggaaacacattctgaactgcctgaccagaataacaaggtgggacaactgaaaatggatgtgaagattgacccacgaccactgcagaagcctgcaaagattggttatggtactgatggaaatgtgcccacagcgagacataatgtggcacctggaggctcaaatgagatcaagactcatgtcaagcaagaaatcatgccaattgacaaagagacaagtgagactgcccctgaagttaagaatgaagcaaatgattcaacagacatcacagtttctaaatcagggaaaccaaagataaaaggtgtctcaatgactgaattgttcaccccagaacaaattcaggaacatatcaatagtctaaggctgtgggttggtcagagtaaagctaaagctgaaaagaatcagttgatggggcataatgaaaatgagaattcatgccagctctgcaaagtggaaaaacttacttttgaacccccaccaatatattgctccccttgtggtgctcggataaagcgaaatgcaccatactataccgttggtactggtgatactcgccattttttctgtattccatgctacaatgagtcccgtggtgacactattgaggttgaagggcaaaactttttgaaggccagattcgagaaaaaaaggaatgacgaggaaactgaagaatggtgggttcagtgtgacaagtgtgaatgctggcagcaccagatatgtgctctatttaatggtagaaggaatgatggagggcaagcagagtacacctgcccaaattgttatgttgaagaggtgaaacgtgggttgcgtatgcctctaccacagagtgcagttcttggggcaaaagatctgcctagaactgtactaagcgatcatattgaagatcggctttttaaacggttgaagcaggagagacaggatagggcagctcaggagaggaaaagcattgaggaggttcctggagccgaaggtcttgtggttagagttgtttcatcagtggacaagaagctggaagtaaaaccacgttttttggaaatttttcaagaagataactacccgacagagttcccatacaagtccaaggctgtccttttgttccagaaaatagaaggtgtagaagtgtgcctatttggaatgtatgttcaagaatttggtgcagaatgctcctacccgaaccagcgtcgtgtttatttgtcatacctggattctgttaaatacttcaggcctgagattagaacggtgtctggagaggcgttacgtacatttgtttatcatgaaattctgataggatatcttgaatattgcaagcagcgtggattcacaagctgttacatatgggcgtgcccacctttaaaaggtgaagattacattttgtactgccatcctgagattcagaagactccaaaatccgacaaattgagggagtggtacttatctatgcttcgaaaagctaccaaggaggagattgttgttgagctgacaaatctatatgaccatttcttcattactatgggggagtgcaaggctaaagtgactgcttctcgtttgccttactttgatggagattattggccaggagctgcagaagatatgatcaatcaacttcgtcaagaagaagatgaccggaagcagcagaagaagggcaagacaaagaagattattacaaaaagagctcttaaagctgctggccacaccgatctcagtgggaatgcttccaaggatgctatgctgatgcacaagcttggggaaaccatttatccaatgaaggaagatttcattatggttcatttgcagtattcgtgtagtcactgttgtacccttatggtgtctggaaaacgttgggtttgccatcaatgcagaagcttttacatatgcgacaagtgttacgatgcagaacaacagcttgaagatagggagaggcacccaagtaacagtagagacacacatacgctccatccggttgacattgttgggttgcccaaagataccaaggatagagatgatattctggaaagtgaattttttgacaccaggcaggccttccttagtctctgtcaaggaaatcattatcagtacgatacccttcgccgtgctaagcactcatcgatgatggtgttgtaccatctacataatccaaccgcaccagcgtttgtcactacatgcaacgtctgctgtcatgatattgaaactggtcagggttggcggtgtgaagtctgtccagattttgatctaaggaagatgcttgatcttctggtacatgcctcgacatgccgctctggcagttgtcaatacccaaactgccggaaagtcaagggactgtttcgtcatgggatgcagtgcaaaacacgtgcttcaggagggtgtgttctttgcaagaaaatgtggtacatgctccagctccatgcccgagcttgcagggactcaggatgcaacgtgccgagatgcagggatctcaaggagcatcttcgaaggttgcaacagcaatctgattctaggaggagggctgctgtaaatgaaatgatgagacagagagcagcagaagttgctgcaaacgagtag

SEQ ID NO: 12675 - DNA, 2081 bp, Oryza sativa
  Clone ID: TFbOSC402966j.C1.o8.np
gttttaccaatattaaatacttggtgcagatacaactatcagccacctcctgggaagccgaatcatacttgtggtggtgctgatagatgggcagatgttgttagcaccgatgatactagcaactcctcctcctcttcaccttctgcctccacctccacctccaagatggagctcaagatgtccaagaagatttccttcagtaggatccccaggaacctcaaggacctgctcgccactggcttgctcgagggccaccccgtcaagtacatcatgaggaaaggcaaggttgtttccccttattatttcgaggtgcatgctgggagtactaaaaagcacccctccgactacattttcctagaaaatggaaacaatctgcatgatatattgagggcgtgttctgatgctaccttagacatgctgcaatctgcaatacagaatgcgattggcccagctcctaagaagaggacattcagatgccaaacttgcaaaagtgagctgtcctcttgttgcactgggaaatttgctttgttatgtgattcatgtcttgagtccaagggatctcaaaacagtaccaggtaagctttgtcacagttccacattttgccagcgacagaaaatttggaggacatcaaagattggccggaatcctacttcctctgctaggagatccaagaatgaatccccaggttcaaagtattgcaattcatctgctaggggatccaagaatgcattcccaggagtgaagactactagcacgggaaggattacaagaaaggataagggattgcataagttggctttcatgagtggtgttctgccagagggtaccgatgttggctactatgttggtggaaaggttagcccttcgcagtttgaagcccatgctggccgtgctgctcgacgcaaaccgtaccacaacatatatatgtcaaatggtgtttcattacatgaactgtcagtttcactttcaaaaggtcgaaatatgtcaaacagacaaagtgatgacttgtgcagcatttgttcagatggtgagtgtgttggctttactactatcccaaggggaacttggtgttgtcggtattgtgagaatagacaacagagagaaagttctttggcatataaccacaatgcaatagctgctgggaggattgacggaattgatccaatggaacaaatatttacaaggtccatacgcattgccacaacaccagtgactggatttggtggctgtgcacttttgtgcaggctccatgatttcagcaaaaagaaattcagtgcgagaactgtgctgctctgtgaccaatgtgggagggaattccatattggttgcctgaaggaacacaatatggctgatttgacggccttgcctgagggagcatggtattgtactgcggactgcgttaggatcagcgagacactgaaggacttacttagccgtggagcagagcctatttcttctgtagatgtagaaattataaagaggaaatatgaacagaaagctctaaataaagatggagatcttgatgttagatggagggttttgaaggacaaaagttcagcagacagtaaattggttctctccaaagcagttgcaattttccatgaatcatttgatcccattatccaaattgctactgggcgagaccttattccagccatggtttacgggaggagtgtaagggatcaagattacacaggaatgcattgtgctgtattaactgttggcaacactgtagtatctgcgggtcttttccgtgttatgggtagtgaaattgcggagctacccttggttgctacaagtagagatagtcaaggcttggggtatttccaagcgctgtttggctgcatagaacgattgttggcatctctgaaggtgaaacattttgtgctgccagctgcagatgaagcggagtctatctggacacagcggtttggattcgtgaagataacccaagacgagctgcgtgagtacctcaagggtgggcgaacaaccgtgttccagggaacatcaaccctgcacaagctggtcccaaaattggatggctagctctgtgaatatatgcattggaatgtgcagggag

SEQ ID NO: 12676 - DNA, 3237 bp, Oryza sativa
  Clone ID: TFbOSC400769j.C1.o19.fg
atggacaccgcctccgtcaccggtggcgagcacaaggggaaggagaagacgtgccgggtgtgcggcgaggaggtggcggcgagggaggacgggaagccgttcgtggcgtgcgccgagtgcggcttcccggtgtgcaagccctgctacgagtacgagcgcagcgagggcacccagtgctgcccccagtgcaacacccgctacaagcgccacaaagggtgcccacgggtggaaggcgacgaggacgacggcggcgacatggacgacttcgaggaggagttccagatcaagagccccaccaagcagaaacccccccacgagcccgtcaacttcgacgtctactcggagaacggcgagcagccggcacagaagtggcgccctggaggcccggcgctctcttccttcaccggaagcgtggctgggaaggatctggagcaggagagggagatggagggtggcatggagtggaaggacaggatcgacaagtggaagacgaagcaggagaagcggggcaagctcaaccgcgacgacagcgacgacgacgacgacaagaacgacgacgagtacatgctgctcgcggaggcgaggcagccgctgtggaggaaggtgccgatcccgtcgagcaagatcaacccgtaccggatcgtgatcgtgctccggctggtggtgctctgcttcttcctcaagttccggatcacgacgccggcgatggacgcggtgccgctgtggctggcctcggtgatctgcgagctgtggttcgcgctgtcgtggatcctcgaccagctgcccaagtggtcgccggtgacgagggagacgtacctggaccggctggccctccggtacgagcgcgacggcgagccgtgccgcctggccccgatcgatttcttcgtcagcacggtggacccgctcaaggagccgcccatcatcaccgccaacaccgtgctgtccatcctcgccgtcgactaccccgtcgaccgcgtctcctgctacgtctccgacgacggcgcgtccatgctgctcttcgacacgctctccgagaccgccgagttcgcccgccggtgggtccccttctgcaagaagttcaccatcgagccccgcgcccccgagttctacttctcccagaagatcgactacctcaaggacaaggtccagcccaccttcgtcaaagaacgccgcgccatgaagagagagtatgaggagttcaaggtgaggataaacgcgctggtggcgaaggcgcagaagaagccggaggaagggtgggtgatgcaggacgggacgccatggccggggaacaacacgagggaccacccggggatgatccaggtgtacctgggcagccagggcgcgctcgacgtcgagggcagcgagctgccgcggctggtgtacgtgtcccgcgagaagcggcccggctacaaccaccacaagaaggccggcgccatgaactccctcgttcgcgtctccgccgtgcttaccaacgcccccttcatcctcaacctcgactgcgaccactacgtcaacaacagcaaggccgtccgcgaggccatgtgcttcctcatggacaagcagctcggcaagaagctgtgctacgtccagttcccccagcgcttcgacggcatcgaccgccacgatcgctacgccaaccgcaacaccgtcttcttcgacgtgagcactgccttcttctccggcgtgcgtgcgtcgcgccgtgacatcaacatgaaggggctggacgggatacaggggccggtgtacgtggggacggggacggtgttcaacaggcaggcgctgtacggatacgacccgccgcggccggagaagaggccgaagatgacgtgcgactgctggccgtcgtggtgctgctgctgctgctgcttcggcggggggaagcgcggcaagtcgcacaagaacaagaagggcggcggcggcggcgagggcggcggcctcgacgagccgcgccgcgggctgctcgggttctacaagaagaggagcaagaaggacaagctcggcggcggcgcggcgtcgctcgccggagggaagaaagggtaccggaagcaccagcgcgggttcgagctggaggagatcgaggagggcctcgaggggtacgacgagctggagcgctcgtcgctcatgtcgcagaagagcttcgagaagcggttcggccagtcgccggtgttcatcgcctccaccctcgtcgaggacggcggcctcccccagggcgccgccgccgaccccgccgccctcatcaaggaggccatccacgtcatcagctgcggctacgaggagaagaccgagtggggcaaggagattgggtggatctacgggtcggtgacggaggacatcttaacggggttcaagatgcattgccgtgggtggaagtcggtgtactgcacgccggcgagggcggcattcaaggggtcggcgcccatcaacctgtcggatcgtctgcaccaggtgctccggtgggcgctcggctccgtcgagatcttcatgagccgccattgcccgctctggtacgcctatggcggccgcctcaagtggctcgagcgcttcgcctacaccaacaccatcgtctaccccttcacctccattcccctcctcgcctactgcaccatccccgccgtctgcctcctcaccggcaagttcatcatccccacgcttaacaatttggcgagcatatggttcatagcgcttttcctgtcgatcatcgcgacgggggtgctggagctgcggtggagcggggtgagcatcgaggactggtggaggaacgagcagttctgggtgatcggcggcgtgtcggcgcacctgttcgccgtgttccagggcctcctcaaggtgctcggcggcgtggacaccaacttcacggtgacgtccaaggccgccgccgacgagaccgacgcgttcggcgagctctacctgttcaagtggacgacgctgctggtgccgccgacgacgctgatcatcatcaacatggtggggatcgtcgccggcgtgtcggacgccgtgaacaacgggtacgggtcgtggggcccgctgttcgggaagctcttcttctccttctgggtcatcctccacctctaccccttcctcaaggggctcatggggaggcagaaccggacgcccaccattgtcgtgctctggtccatcctcctcgcctccatcttctccctcgtctgggtcaggatcgaccccttcatccccaagcccaagggccccgtcctcaagccatgcggggtctcgtgctga

SEQ ID NO: 12677 - DNA, 3246 bp, Oryza sativa
  Clone ID: TFbOSC400765j.C1.o1.fg
atggacggcgacgcggatgccgtgaagtcggggaggcacgggagcgggcaggcgtgccagatctgcggcgacggcgtgggcacgacggcggagggcgacgtgttcgccgcctgcgacgtctgcggcttcccggtgtgccgcccctgctacgagtacgagcgcaaggatggcacccaggcttgcccccagtgcaagaccaagtacaagcgccacaaggggagcccggcgatccgtggggaggaaggcgaggatactgatgctgatgatgtcagtgactacaactaccctgcatctggcagtgccgaccagaagcagaagattgctgataggatgcgcagttggcgcatgaatgctgggggtggtggagacgtcggccgtcccaagtatgacagtggcgagatcgggctcaccaagtatgacagtggcgagatccctcggggatacatcccttcagtcactaatagccagatctcgggagaaatccctggagcttcccctgatcatcatatgatgtctcctaccggaaacattggcaagcgtgctccattcccctatgtgaaccattcaccaaatccatcaagggagttctctggcagcattggaaatgttgcctggaaagaaagagttgatggctggaaactgaagcaggacaagggagcaattcccatgaccaacgggacaagcattgccccttctgaaggtcggggagttggtgatatcgatgcatccactgattacaatatggaagatgccttactgaatgatgaaactcgccagcctctctctagaaaagttccccttccttcatccagaataaatccctacagaatggtcattgttctgcgtttggttgttctaagcattttccttcactaccgtattacgaatcctgtgcgcaatgcgtatccgctctggcttttatctgttatatgtgagatttggtttgctttgtcctggatattggatcagttcccgaagtggtttccaatcaaccgtgaaacctaccttgataggctggcattgaggtatgacagagaaggtgagccatctcagttggctgctgttgacatttttgtcagtacagtcgaccccatgaaggaacctcctcttgttactgccaataccgtgctgtccattcttgctgttgattacccagtggacaaggtctcttgctatgtatctgacgatggtgctgcaatgctgacttttgatgcattggctgagacttcagagtttgctagaaagtgggttccattcgttaagaagtataacattgagccaagagctcctgagtggtacttctcccagaaaatcgattacttgaaagacaaagtccacccttcatttgttaaagaccgtcgtgccatgaagagagaatatgaagaattcaaagttaggataaatggccttgttgctaaggcacagaaagtcccggaggagggatggatcatgcaagatggcacaccatggccaggaaacaatactagggaccatcctggaatgattcaggttttccttggtcacagtggtggccttgataccgagggtaatgagcttccccgcctggtctacgtatctcgtgagaagcgtcctgggtttcagcaccacaagaaggctggtgccatgaatgctcttgttcgtgtctcagctgtgcttaccaatggacagtacatgttgaatcttgattgtgatcactacatcaacaacagcaaggctctgcgggaagctatgtgcttccttatggatccaaacctaggaaggagtgtctgttatgttcagttcccacaaaggttcgatggtattgataggaatgatcgatatgcgaacaggaacactgtgtttttcgatattaacttgaggggtcttgatggcatccaaggaccagtttatgtgggaactggttgtgtattcaacagaactgctctatatggttatgaacccccaattaagcagaagaagaagggaagtttcttgtcatcactatgtgggggcaggaagaaggcaagcaagtcaaagaagaagagttcggacaagaagaagtcaaacaagcacgtggacagtgctgtgccagttttcaatcttgaagatatagaggagggtgttgaaggtgctggattcgatgatgagaaatcacttcttatgtctcaaatgagcttggagaagagatttggccagtctgcagcgtttgttgcctccactctcatggaatatggtggtgttcctcaatctgcaaccccagaatctcttttgaaagaagctatccatgtgataagttgtggctatgaggacaagaccgaatggggaactgagattgggtggatctacggttccgtgacagaagatattctcactggattcaagatgcatgcgcgaggctggagatcaatctactgcatgcccaagcgcccagctttcaaggggtctgctcctatcaatctttcagatcgtcttaaccaagtgcttcggtgggcacttggttctgttgaaattcttttcagtcgccattgtcccatatggtacggctatggaggacgccttaagttcttggagagatttgcctacatcaacaccactatttatccattgacatcgatcccgcttctcatatactgtgttttgcctgctatctgtttgctcactgggaagttcatcatcccagagattagcaactttgctagtatttggttcatctctctcttcatttcaatttttgccactggtatccttgagatgaggtggagtggtgttggcatcgatgagtggtggaggaatgaacagttctgggttattggaggtatatctgcgcatctttttgccgtcttccagggtctcctcaaggtgcttgctggtatcgacaccaatttcactgtcacctcaaaggcttctgatgaagatggcgactttgctgagctctacatgttcaagtggacaacgcttctcatcccaccgacgaccatcttgatcattaacctggtcggtgttgttgctggtatctcatacgcgatcaacagcggctaccaatcatggggaccgctctttggcaagctcttctttgccttctgggtgattgtccacttgtaccccttcctcaagggtcttatgggtcggcaaaaccgcactccgaccatcgttgttgtttgggcaatccttctggcttcgatcttctcattgctgtgggttcgcatcgatccattcaccacccgtgtcaccggcccagatacccaaacatgtggcatcaactgctaa

SEQ ID NO: 12678 - DNA, 4053 bp, Oryza sativa
  Clone ID: TFbOSC400272j.C1.o8.fg
atgtttgacgacgacgatgacgtggagccaccggttaacgatgtggacatctactattttgaggaaagcgaggacaagccagtctgcttcagtgtcttgcccataaagtttgatgagaacgaagaagtctcatgttctgattacaaggaactgaacttgcgtggatttacagataataaccgtcatgtgttcaagaaggtgatagcttggagggtagatcttgattgtcagaggccaaagatctcagtgctttcgagtgacgggaaatggatagaactgttgaaaccacggatgtgctattatgaaaaaaaagttcgatcaatattgatcacagtgcaaatgctccactttgtcaggaagtgtcccaagaaacaacagagaagcctttttgatcacctcggtgaagttttcaataaatttggtcctgtacctaatggggatgacataaagaagcaccatcatctaatcaagcttttcatggagagggatccaattttagtgaagtcgaagattatacgatgctttattgaggatgcttccaggaaggccattgagcccataccaaggagagcgtgtacagaagatcgatttattgtcagtgatgagtcacttgaaagcagtgatgactgcagctacagcaatagcgacagcagtgatgataataatgatgatagtactgatgaagatactgatactgatggtaatgcaactgatgatgatacagatatgatatgtgccatatgtgatgatggtggaaagttgcttagctgtgaaggtccatgcaagaggtccttccatgccagggtgaagcatggcaggaaatccaaatgcagaactctccgtttcacttctgtggagctaaagctaaaggaaagtggaactttcttgtgtgagaattgtgaacataatgaacatcaatgtttcaaatgcggagagcttgagccatcttatggtccaaatgctaagggatcgccggatatcattcaccatgcgcgatatgttggtgtcctctcaacaatacgccatggcttgatggtgtttcaatgtaataaagaatcttgtgggcacttctaccaccccaagtgcatcgcagtgctacttgagcctgaagacactgatggtgcttgtaaattggaggaaatgatcgcagatggtatgtcatttacatgccctgtccattggtgctttaaatgtgcaaagatggaggacaggacacgaagtgaattccagtttgcagtctgcagacgctgtccaagatcatatcacacagaatgtttaccaagctatcatgttctcatggcatcaaatggtatttttcacagcgaaatttcctttgaaacaaaggacaaaggtgccccaaaacttgcttggaaaattaaaaaaaggagttacttctactgtttacaccatggaatagatgctactactggaacacctagtggggagcatataaagttcccttctattccaaaaatcaagaaaacgaaaaatctttctaagaaggatgctaaagtgactggcaaaaggaaaaagagcggtaataaattttcaacaaaatccactaagttggcaaatgtgtcacctagaggagaaagcaagcaaaccagaagagtagcaaggaatagctcatctgagcatattgcactagaacatgggtgtgcagtaaagcgcttaaaaaaggatctgcagtttgaagtacctctggttgatgtttctgctagattaagtggtgcaaaaaccgtggaagggaaggaagggcaacctggaactccgtcttcatttgttatgggggaaatatcaaagagtgcatcttgtgcggtggatggtgaaacagaaaagagggtaacaagtacagcagaaaaggaaatatctgcagggacatcccaagatatggctacaaaggatgtactgaggcagcccaggattgagatagatggtttgtcagagtgtttggttcagattgctgataaacttcattggtatgtgcagcctggcaacacggaaagctgtggaaaattgccagatggggtgttattagagaggtccattgttgtcgtgagggagatagttgatctctgcttcaacatggataattttagtcgactgatgaaagaaaagcttgaagatgtgtctaaagggtgcaatttcaagaattatgatctcttccaacataagaacaatctgtgttttgatgagagcaactgggtgaccatgcaaccaaaggatttacctcatggattaaatctagttatggtcctggaccttcctcttgatatccaagccgtttcagcgaacaaatttgttgacaaagtattaacctttaagccaaggcttattataatagtttcccccacagatattgaaagattggattgcaaggaggagccctatcatttgatatgggaatataatcagcacatctttgggaagccattgtatcaacctggtgatgtggatgtgaatgacgacgcaaagaatggtttgcatgtaattcctctctgtgtttccttgtggagtttccctgacaagacagaggagaatatgaggatagctggaaaacatggccatttaaatgttgggcacaaggcacatagtgtcatgttgaaggattcttctgtggacaaaggtgctaagggggataacgagatcttcacagttggaaaagaagacactagcgagagagaacaaacatctgagcactgttcaggagaacgattgataattcccaatgtagttacttttcatgcaaatcaagagcagaatgatgagctacaaagcttgtataaggagaaacatgctaatggaagtggaggcggaaataacttgacatcaggaaaagagagtgatgtgcatcggggagagaatgcatgtgggcataactctgcagcacgtcaaaagacagagatctcgaagagagaaaacagaatgacggatagtacacatgaagagaacatgagatcaggaaaagagaagattcccagggatggcagcaacaaggggacagtgaagccagatcttgttgatggactacctccagataagcatgtagatgttgcatttgtgcacaagacaactaccaacagagtagatactcagcaagaatgtggatacaatgtggctgtagatgttgatgacaattatgctcttcaacatgagccaaagagtcctcacggcaatgataatctcagaggaactgaaatggatacttcaggtgacaattcaagaaaaaccagggaacaaaaggaggtgactgatggtaagagattggacttggataggaaaagagaagccgttcgcatgaaaaacgcgcgagatggtcatcatgaagatgatagaactgctcatcctcaatgtgttgacgtcaaaagtccttcgcataatgatgatcaaagagcacgaggggcttcagtatgcaagtccagaaagagggggacatcaaatagaatactagagtcaagggataccgtgagcgaaaattcagctagacgccaggtaccagtggaaagaagaaatggtcatgctccatattcaagaaggcctgattatagtgctactgcaaggcgtgggtccccttcttatccaagaagacgtagaagatcaaggcatttcagctctgaaagagactggagcacagttcctcctcgtggtaattcacccgataccgagtacgatggtactagatacaataccgagtatgatggatatggatcccagtcagggtgcggctaccatggaatggacactcttcctgttgatagatattatcctcaggagcaccacaatggtgcatatcgacctcagacaaattttggtgaggaggaacaggcggcggcttatggtaggcgtaggaatgatcatggatggggaccagattaccgccgtcgagacagtttcgactgggaacacaggagttcagctagagggacagttacagataggtatgtccctgaccttgaacagactaaccatcagataccaggtcaggctagcctacaagatggctacttcatgcgtagaagcaggtcttttgtgaatatgcatgtgccctactag

SEQ ID NO: 12679 - DNA, 3714 bp, Oryza sativa
  Clone ID: TFbOSC102169j.C1.o27.fg
atggctaagcctctccgctctaccgtcctcgtctgcgcctctgcggcgatggccccaacctccgcaccaagattgcccacttcggcgccgccgatctcgccggcgagctcccggaaaccgaaaccgaacagggcacgtgcgggtacattgtgccggagctcatcgcgggcggagcgccatcgcggcggtcggacgagtacgcgctgggcggcggtggcggcagaaggaggaggggaggcgatgcggcggtgggtggaccggaggctgagggattcgttcccggtggacacggtggaggagatgacgacgctggcgctccagtgcgtagccaaggacgcggcggcgcagccggagatgtcgtggcctcgtgggtcgccgccaaggtgtccaagctcttcctgcccagagccacagagacaagagtttggtggtggcaacccgctccggcggctgcctctcgtctctccaccaccccgtcccgccgattttccgcctcgacctggtggtgcagtgctcgattcggcagttcggggcttaccgagggcgcagggtgtcgatgtgcagcccgaggaatcgcatatccgaaggggagtcgaaattagggtttccctctactcgccgccgatgaaggggggccgcttgcaccgtctggagcggccgcccgccgcccacatcaccaccgccgcagccgccaccacgcccgctccggcgcccgccgatgattggggggatggctcgtggacggtggactgctcgtgcggcatcacgtacgacgacggggaggagatggtgagctgcgacgagtgcaacgtctgggtgcacacgcggccaagcgcgccccctcctccgccgacgaggctgaggtcgccgagctcctggccgagctggcccacccaccgcccacggccgttgtaccgccgatgggctgaagtccctctcccctcccgtgtccatgtccacgggcttccaggcggtacagacaccgccctattccgcagcgccgcaccctcccctgtattctcgtccgccctatggcgctgtgctgggtacgtacccaagagattcggcttccgctactgcgaattcccctactgggctgatgacaaggacggtgccaacgctctatttgcgctggctagagagaagcgcaaggaaaaggcagagactaggttccctctccgccttggagccatacacaaggacaagaattatgtcaggacgctgagcatttgcggcgataaggtggatggcgttgagcactctgtggacgatgacgcaaagaggacatctccaccaagtgatgcaaagaagagaggaacatccattagcattgtagagcctgatacttgggacaatggttgtgagaagaaaagggattttgatgtgccagctagtgaggatcagcatgccaaaacaaacatggtaaattctgatttgcacgtgcttgttgaagctaagaagaagagggcttcatcctcagaacgaagtggggataagaagtgctctgcctcgaaggaaattactgggatgctaaagaaatatgaacctaaggagtccaagcgattggtgatatcctcaggagttgcaacaacggcagctgtagcagagcaagaagtgcactcacgatttgtgaagctctacccacctcacttgagtgcgccaggtggaggagagatgcatggcagtgagctgcacctgccaatgggtggaggagcagagtggcaaagtcaccagcagacccttgcatggcgaaggtgcaaaccaggcgtgcaccagggtagcgtgtatgaaggactagacgggaatcaaaatgtaggtttacagactggagtaagatcgaatggagttgtgaaaagggatgatgccaaacgatcaaatggagatgtccagagcgatgctgctcctgagaaaatgaatgagggtctggatcttcagaagcaatcaaatcaaacttcaaatcttctggttgttggtggtgtaccggatttacagactaaccagtcagaatcattgactatcaagaaggaagcatctacagatgatcatgagagaaccgaggctatccagtttgtaagtgatgagcataaaagtggaaaacaagatactgcaatgttatcaacccttcagaggcattcgtccaagttagcatctgacttagtttatcaacatccaaagtctgaaacacaaaatccgatgcacacaataccagagcatccaaactcaagtttaggtaatgtgaaagtttgtacagcatcttctggtcctaactctaccacttttgatttatcttgctctttgctatccacagaaccatcatcagaagaaactactgttcgtttggtaaagaaggatcagacaaggttggtctcatccgctgacagcgaaaatgattttgcaaaaaaatctgagagttcccaggatcgcacaagatcctctgataaagttcaattgaaaggctttgttccgtctgcgccaaaatcatctcaaggaagtagaacatatgtatcttctgccaaaaatagatttatagtgccaaaggagcagttgcaaaagacatcaactgaaggaaacgctccaccagggtcattacaaggtgaagtggcacccttacattctcgtaataaggcaatgcctttgagcttttaccaaagaaaggacaagatccaccaccgctctattcatatcacacaggacacttccaatagttcagcatcggctgagctgcaatctactgaaacaacagcttcattgagcgatgaacagcttgcattgttattacatcaacaattgaacagctcccccagagtaccaagggtgccacgttgtcatcaagcatctaccatgcagatgctacatccaactggagctagtgtgttctcaaaacggtcttcagcacatggaggaagggatcaagcactggtcttaaagaagaggaacaaagatgatgcatggagagataatgatgagaccaagaagacaggaaaggtgtctagtgttgaacggaggcatagagatagtagcacagaacgtgtccttgctgcaaaagactcatgcaaatttactgaaaatatagaatcagaacagagaaatcgtggcatttgttcaactggagccacctctggcgtaggaaatgatgctccaatagatagaggtgtttcacatgatttacctgggttgattgaggaaatcattagcaaaaatacaaacataacatatggtgaactgtgcaacgctattcgccagcattggggggatttaagtaaacccaacgtggaaaacaatgcataccccaactatttacatgctgttaacgattgtcttaggaacaggaatgactgggctcaccttgttgaccaggctgcaatgatgaatccaaacaagcgccggaaggtagaggaaagtgactctttgtcagcagatgtactggcaaccgagaagacaaataaagaggctaaaaggggtccagaagacacaaatgctgaatcacaccatgaaattctgccaaggggcaaacgcaaggctcggaaatgcaggcgtcttgaactgaaagggaggagagtcaacgatacgaggaagagatctagctttgattcggcctctgatgatgatgataccaccttgtcggattccagtagtgacagaaatgacacccctatggataagagcctagaagatagttttgttatagctaagaatgcagattcaagttcatag

SEQ ID NO: 12680 - DNA, 5865 bp, Oryza sativa
  Clone ID: TFbOSC401196j.C1.o89.fg
atgccaaggaagaaggccagctcgccctcgccgacctccaccgccagggagactagaagctcctccgctcgtggtcatgcatcaccaaccccaaccccaaccctcaggaggtccacccgagaaaccacatccagattttcttcttcttcttcgtcttccgcaaacaagcacgaaggctcccccgccaagcaaagtgccaacaacaacaccgcaaaacggaagatgaataatgctgccgcagatacctccaccaggccaatcaagaagaacaaaaagctaaacgcaaagtcctatttagcactcttctccacaccccaacaaaccgccaaatcccctcctgcccctggaggaaattcccggctgtattctaactttggcaatgtagcccctcctctcctagtccaagtggatgacgacaatgcttccacggtgcctatgcaagacagtggcactcttctggagcatgaagaagctgacacacaagagcaaggttaccagtctggcttgcacaaagttcctgaggtggtactggaggagactgatgtctccaagaacaaagctgatgaacatgcttccacttctgaggccaagaagacaattgaagcaggtgatcccagagagatcaaaggggcttctacttcaaatcaggctttagtaacccattctgatggaacagattacaacgagtacctgtgtgctgtttgcagaagtagggaaaccccaggaattctcaagtttaaaatgaggcagctcaggagatgccaccatgaaaggctgtgggagaggtcttgtgatggaaaagattgcaaaaatcggtaccatgattcttgtctggatcctcccctgcaatatgtgtcgctaggtatctggttgtgcaccttatgtactaaaaagaggctccagtttggtttatttgcagtcagtgagggcattgaatctttgtgggatgttaaggaagtgaaatggaaagatctgggctatgagtatgcaacatgggagcttgagacttcatcatttttatgtacccctgaggctaaggatctgaaaaggaactatgagagccgccatgaagatgcaagaagaggttttgatcctgcaaaaataaataagggtaagcaatgtctgtttcagaaacttcagaagctaccggatgggttcccccctggtttagacaaagatcatttgagttcacttaaccggctccgcgagttctggcacaattctgatggtgctatttgtctcgatgatcaggagagagtaatcaaaaccattcttttttctatgtccatattgcctgatgtctgccaaccacttctcattgtctctacttctgcttctctctcattgtgggaagctaagttcaatcgcttggcaccatcgatcaatgttgttgtgtataatggggagaaagacgtacgcaaacagattcaagatttggagttttatgagaacggtttggtgacgtttcaagttctcttgtcccatcctgatgccatcctagaggacattcagaccatggaatcaattgtttgggaggcagttatggttgacgattgtcaaagcttgagagtttcaaaatgccttgaacaacttaagcatctttctaccaattttaggatggttcttttgagtttcccactcaaggagagtattcctgagtacatcaacctgctgtctttcctcaaccctgaaggaagtgtcatttcgagtagttcaaatggtgattttactgatacaggtgatatcttagcaacgctgaaagaaaaatttgctcgtcatgttgcatttgagcggaaagcagattcttcaaaatttttggagtactgggttcctgctcgtctttcacgagtgcagctagaaatgtactgttataccttactttcaaactccccagcactccgatcacactcaagaactgatagtgttggtgctcttcgtgacattcttgtatccctccggaagtgctgtgaccacccttacctggttgatcaatcactgcaaagctcacttactaagggccattctctgactgatattctagatattggatctggtggcggggctggcaaccctatgggtgacattttggatgattttgtccgtcagagatttggttttgagtcatatgagcgtgtagaacgcggattgctagtgccgaagaaacaaacagcactgaatatgttcaatgacaaaactaaggggcgttttattttcttgattgatagtcgtgcttgtgttccaagcattaaattatcatctgtcgatgccatcatcatatattgtagtgattggaatccaaccaatgacttgagagttctccagaggatcagtatagagtctcaatctgaatgtgtgcctatttttcgcttgtattcgtcttgtacggtggaggaaaagactcttatactgcgaagcatgatcatattcttgacagcaacgtccagaatacttgaggagttccaaaagcatgactactccagtaaagattctgaggatgatggtctcttcatgaataatgtatttttggagtttgcagcgaaactatccaccaacgttgaagccagcactaaaatggaaaatgcagtcatatctcgagctcagcagagtggatcgttttattctagagatattgctgttataagcgagagggagggaatatctgcagttgatggtgatttgccaaagttctggaccttctggtcaaatttactaggtgggaggtctcctcattggcaatatatatctgagccagtgcaaaggaaccgtaggaagatacaaaatatggaagaccaaatgagaatacctgcagaagaaactgatgaagcaataatgaaacgtagaaaaatcggagaaatcatggattcatctccgaagatcctacctgtcaaagacaatgatgctgtgctgcctgaaaatagtacagcatccagttctcatgaaacatcagttgatgacacttggcaagagctaggggcagaaagccttcagggcacacagaaaggtcttcacacccaactcaagccagagctgtcaaagttgtatgaattgttggaattgccggagactgtcaaatgtttatgtgaggaattacttgattacattttgaagaatcatcaatgttggcgtgctgcttctctcttaaagcataagatcaatcgaagagagtcacttgccctttctgtgagaaacttgaactatgagtgcgatgaagtgctcgctgaatatgtttatgagaagctaaggatcctcaagaaaaagttttcgcgtagagcaagtgaaacaagcaagcagagccaatctactccagtaaataacacatcatcttacaaacaacagacctcaccgaaattgagaagtgacggatcaatttgtcatcaggtaacgacaattgatggtgatttggaaaatgtttcacatgaagaggctccacatgatatcttgaccgaggagatgatattagaacagaaggaattgatatctgttctagaaactcatagagaagaacatgttttaagggatgaacttcttgaaagaatcacagagaaaagaattaatttaattaacatggttttctccttaagagaaaagaatattcaggataaacaaggaaacgagaccacactgttagacatgcacaagcaaaaggaagtggcaaagctgcaagaaacatgcaatttggtcgtggaacatcttcgtaaaggtcacattgattcagaggacagggatgccacggtgaagctaataattgaatggtttactttgcttctgtatgcatttttgaatcacatgagatgccagcataacaagttgaagatgcagcaatcaacttcatggaacaaggagttacaattgaaggaaattttccttcagcaagcaaaatctggccacttagatcgtagctttgatcaacaaattcctttaccagattcatgctttactttggaagaattcagccacttcaaggaaatagttggtaatttccctgtcggtgcagctacttcagcaaattgccagcattctttggcatcaaccatggaaattgcattggtccggagtgtcagtccatctgaagttgggaattcagaagcagcgataaatggggctgttgaagttcctgtccacaccgaaaaaagaccaacatcagaagttgggttgtcgcagaacaggatggacaatgattctgatggcattgactcacaaggagggccacctctggctgttcaacattcattaagttctaatcctgcaattgacaattccaataatttggaatcttcagttgccagccatagaagcgaacatcttggggatattgcagtggaagttaatgccgacaattgtggcactactcttgcagattcacctcacttagaggcaccaactgtggctgccctgcccagccagagtgccttgccaatggctatggaagttgacattcagacagatcatgtagttcagtctgcccagcagaacatagtgacaggacgagttccacaagaagaagagcgagaaggttcgaccactgtaacatcagctcagcctttgcaacctgaaatgcgaccatcaagtccagtatccggtattttgcgtgaaagaacaaatcctgatcagaggagggaaagtcgtcagccagaggctgcacctagttcggtggatccaacacaactctttcccgtggcatcactgatgtttaatcacccaccacttggcaatgaaccattgaaaaatgagctgcacagattacaagtacacatggattctcttaataaaatctacgaactgaagaaatcacaacttcaaacggagtgcagccaagaaatcgagaagataaaacagaagtatgatttgttaattaaagaacaagactccgctcatcatcagcacaggaagacactggatgacttgtatgggaaagttctcctaaaccaatcactagctgatgattttcgggtcaaatttgtatcaacatctgcagctcaagccagagccgtttctcctccactttgccagacaactcgccagacagctggggtatctcagcaggtaccaactaggccttcggtggctggatcgattgcattgccagtcggttcatcatcagctagtcgaccatcgctgcagaggcattgtgctcaaccatcgcatgtggatcggtcatcatcatcgggggggagtcattcatcatcgccatcttcacaagttgtacgacctcccccagcaatactaggcagcgttgtcagggcaacatcaactccttttagtcacacacctgcagcccgtggaaactatggagttgggagtgaagtagcacgggcaccagctccccatctccagttcaggctgccacgagcacatcccacggcccctgtaaatcagcagcagcggcagctcccagttaggctagagagcacatgttcaaggacacagttgactcctgtgagcaccccagtaaacgcaaggcagttgagttcacaatcagtttccccggtgagcaattcatcatcatcgtcaagctcacatccaggtccagcactctcaaatccagccttggcagcaaattcaagttcaaatccagttttgagtgcaggcacagtggcattgccgccaagtccacacccacccgagtcgatagcagcaccaaggggacagcaaaagggggcaccgtcaggcttgaatacagtgcctgttgtaggctcgggtttgccgccaagtaggtccatgtcagattcggtgtcgctggatgcatggcttacatccaatcttggtctgaaggacggtgaaaccagcacacctcgcactcgcatggatagtcatcgtacagtagatgtggtgtgcttgtccgatgacgaaccagaagagcactag

SEQ ID NO: 12681 - DNA, 5973 bp, Oryza sativa
  Clone ID: TFbOSC900291j.C1.o5.fg
atgccaaggaagaaggccagctcgccctcgccgacctccaccgccagggagactagaagctcctccgctcgtggtcatgcatcaccaaccccaaccccaaccctcaggaggtccacccgagaaaccacatccagattttcttcttcttcttcgtcttccgcaaacaagcacgaaggctcccccgccaagcaaagtgccaacaacaacaccgcaaaacggaagatgaataatgctgccgcagatacctccaccaggccaatcaagaagaacaaaaagctaaacgcaaagtcctatttagcactcttctccacaccccaacaaaccgccaaatcccctcctgcccctggaggaaattcccggctgtattctaactttggcaatgtagcccctcctctcctagtccaagtggatgacgacaatgcttccacggtgcctatgcaagacagtggcactcttctggagcatgaagaagctgacacacaagagcaaggttaccagtctggcttgcacaaagttcctgaggtggtactggaggagactgatgtctccaagaacaaagctgatgaacatgcttccacttctgaggccaagaagacaattgaagcaggtgatcccagagagatcaaaggggcttctacttcaaatcaggctttagtaacccattctgatggaacagattacaacgagtacctgtgtgctgtttgcagaagtagggaaaccccaggaattctcaagtttaaaatgaggcagctcaggagatgccaccatgaaaggctgtgggagaggtcttgtgatggaaaagattgcaaaaatcggtaccatgattcttgtctggatcctcccctgcaatatgtgtcgctaggtatctggttgtgcaccttatgtactaaaaagaggctccagtttggtttatttgcagtcagtgagggcattgaatctttgtgggatgttaaggaagtgaaatggaaagatctgggctatgagtatgcaacatgggagcttgagacttcatcatttttatgtacccctgaggctaaggatctgaaaaggaactatgagagccgccatgaagatgcaagaagaggttttgatcctgcaaaaataaataagggtaagcaatgtctgtttcagaaacttcagaagctaccggatgggttcccccctggtttagacaaagatcatttgagttcacttaaccggctccgcgagttctggcacaattctgatggtgctatttgtctcgatgatcaggagagagtaatcaaaaccattcttttttctatgtccatattgcctgatgtctgccaaccacttctcattgtctctacttctgcttctctctcattgtgggaagctaagttcaatcgcttggcaccatcgatcaatgttgttgtgtataatggggagaaagacgtacgcaaacagattcaagatttggagttttatgagaacggtttggtgacgtttcaagttctcttgtcccatcctgatgccatcctagaggacattcagaccatggaatcaattgtttgggaggcagttatggttgacgattgtcaaagcttgagagtttcaaaatgccttgaacaacttaagcatctttctaccaattttaggatggttcttttgagtttcccactcaaggagagtattcctgagtacatcaacctgctgtctttcctcaaccctgaaggaagtgtcatttcgagtagttcaaatggtgattttactgatacaggtgatatcttagcaacgctgaaagaaaaatttgctcgtcatgttgcatttgagcggaaagcagattcttcaaaatttttggagtactgggttcctgctcgtctttcacgagtgcagctagaaatgtactgttataccttactttcaaactccccagcactccgatcacactcaagaactgatagtgttggtgctcttcgtgacattcttgtatccctccggaagtgctgtgaccacccttacctggttgatcaatcactgcaaagctcacttactaagggccattctctgactgatattctagatattggatctggtggcggggctggcaaccctatgggtgacattttggatgattttgtccgtcagagatttggttttgagtcatatgagcgtgtagaacgcggattgctagtgccgaagaaacaaacagcactgaatatgttcaatgacaaaactaaggggcgttttattttcttgattgatagtcgtgcttgtgttccaagcattaaattatcatctgtcgatgccatcatcatatattgtagtgattggaatccaaccaatgacttgagagttctccagaggatcagtatagagtctcaatctgaatgtgtgcctatttttcgcttgtattcgtcttgtacggtggaggaaaagactcttatactagcgaagcatgatcatattcttgacagcaacgtccagaatgtaatgcctatcgtgagccattccctgcttagttggggtgcatcgtttctcttcaatagacttgaggagttccaaaagcatgactactccagtaaagattctgaggatgatggtctcttcatgaataatgtatttttggagtttgcagcgaaactatccaccaacgttgaagccagcactaaaatggaaaatgcagtcatatctcgagctcagcagagtggatcgttttattctagagatattgctgttataagcgagagggagggaatatctgcagttgatggtgatttgccaaagttctggaccttctggtcaaatttactaggtgggaggtctcctcattggcaatatatatctgagccagtgcaaaggaaccgtaggaagatacaaaatatggaagaccaaatgagaatacctgcagaagaaactgatgaagcaataatgaaacgtagaaaaatcggagaaatcatggattcatctccgaagatcctacctgtcaaagacaatgatgctgtgctgcctgaaaatagtacagcatccagttctcatgaaacatcagttgatgacacttggcaagagctaggggcagaaagccttcagggcacacagaaaggtcttcacacccaactcaagccagagctgtcaaagttgtatgaattgttggaattgccggagactgtcaaatgtttatgtgaggaattacttgattacattttgaagaatcatcaagtcagtcaggagccaaagggcatattgcatgcattcaacattgccctgtgttggcgtgctgcttctctcttaaagcataagatcaatcgaagagagtcacttgccctttctgtgagaaacttgaactatgagtgcgatgaagtgctcgctgaatatgtttatgagaagctaaggatcctcaagaaaaagttttcgcgtagagcaagtgaaacaagcaagcagagccaatctactccagtaaataacacatcatcttacaaacaacagacctcaccgaaattgagaagtgacggatcaatttgtcatcaggtaacgacaattgatggtgatttggaaaatgtttcacatgaagaggctccacatgatatcttgaccgaggagatgatattagaacagaaggaattgatatctgttctagaaactcatagagaagaacatgttttaagggatgaacttcttgaaagaatcacagagaaaagaattaatttaattaacatggttttctccttaagagaaaagaatattcaggataaacaaggaaacgagaccacactgttagacatgcacaagcaaaaggaagtggcaaagctgcaagaaacatgcaatttggtcgtggaacatcttcgtaaaggtcacattgattcagaggacagggatgccacggtgaagctaataattgaatggtttactttgcttctgtatgcatttttgaatcacatgagatgccagcataacaagttgaagatgcagcaatcaacttcatggaacaaggagttacaattgaaggaaattttccttcagcaagcaaaatctggccacttagatcgtagctttgatcaacaaattcctttaccagattcatgctttactttggaagaattcagccacttcaaggaaatagttggtaatttccctgtcggtgcagctacttcagcaaattgccagcattctttggcatcaaccatggaaattgcattggtccggagtgtcagtccatctgaagttgggaattcagaagcagcgataaatggggctgttgaagttcctgtccacaccgaaaaaagaccaacatcagaagttgggttgtcgcagaacaggatggacaatgattctgatggcattgactcacaaggagggccacctctggctgttcaacattcattaagttctaatcctgcaattgacaattccaataatttggaatcttcagttgccagccatagaagcgaacatcttggggatattgcagtggaagttaatgccgacaattgtggcactactcttgcagattcacctcacttagaggcaccaactgtggctgccctgcccagccagagtgccttgccaatggctatggaagttgacattcagacagatcatgtagttcagtctgcccagcagaacatagtgacaggacgagttccacaagaagaagagcgagaaggttcgaccactgtaacatcagctcagcctttgcaacctgaaatgcgaccatcaagtccagtatccggtattttgcgtgaaagaacaaatcctgatcagaggagggaaagtcgtcagccagaggctgcacctagttcggtggatccaacacaactctttcccgtggcatcactgatgtttaatcacccaccacttggcaatgaaccattgaaaaatgagctgcacagattacaagtacacatggattctcttaataaaatctacgaactgaagaaatcacaacttcaaacggagtgcagccaagaaatcgagaagataaaacagaagtatgatttgttaattaaagaacaagactccgctcatcatcagcacaggaagacactggatgacttgtatgggaaagttctcctaaaccaatcactagctgatgattttcgggtcaaatttgtatcaacatctgcagctcaagccagagccgtttctcctccactttgccagacaactcgccagacagctggggtatctcagcaggtaccaactaggccttcggtggctggatcgattgcattgccagtcggttcatcatcagctagtcgaccatcgctgcagaggcattgtgctcaaccatcgcatgtggatcggtcatcatcatcgggggggagtcattcatcatcgccatcttcacaagttgtacgacctcccccagcaatactaggcagcgttgtcagggcaacatcaactccttttagtcacacacctgcagcccgtggaaactatggagttgggagtgaagtagcacgggcaccagctccccatctccagttcaggctgccacgagcacatcccacggcccctgtaaatcagcagcagcggcagctcccagttaggctagagagcacatgttcaaggacacagttgactcctgtgagcaccccagtaaacgcaaggcagttgagttcacaatcagtttccccggtgagcaattcatcatcatcgtcaagctcacatccaggtccagcactctcaaatccagccttggcagcaaattcaagttcaaatccagttttgagtgcaggcacagtggcattgccgccaagtccacacccacccgagtcgatagcagcaccaaggggacagcaaaagggggcaccgtcaggcttgaatacagtgcctgttgtaggctcgggtttgccgccaagtaggtccatgtcagattcggtgtcgctggatgcatggcttacatccaatcttggtctgaaggacggtgaaaccagcacacctcgcactcgcatggatagtcatcgtacagtagatgtggtgtgcttgtccgatgacgaaccagaagagcactag

SEQ ID NO: 12682 - DNA, 1293 bp, Oryza sativa
  Clone ID: TFbOSC401546j.C1.o3.fg
atgcacgcgcaccagcaccagcacgcgctgctcgcggcgctcctcgcgtgcgcgctcgcggcgtcgtcgtcgacggccggagcgcagccggcggggcagcaggggtatgcctacggcgacgtgtccgggcagcaggtgcacgtcagcacgacgatgatcgtgctgctggccgccgtcgtcggggttttcctgttcatcgcgatctccaccatctacctccgccactgcaccggttacgaccccgcgacggagggcggcggcgtcggcgggagccgttccatgatcctccctgccaacagcttcgtctcgaggcggcagcggcggccgcgcgggctcgactcgtcggtggtccggatgttccccaccatgaagtacgccgaggcgaaggcgctgcgggtggggaaggtcgccggcgccgcgctggagtgcgcggtgtgcctcagcgagttcgaggacgacgagatgctcaggttcctgcccaagtgcagccacgccttccacccggactgcatcggccagtggctcgccagccacgtgacctgccccgtctgccgccgcaatctcgaccctaacaaggacaccaccgaagaggtgatcatcccggccgccgccgccgccgatccgaacagcacctccagtgaaatagttgtgatacggcaagaagacggggcgcacccagcagccgtggtgatcgacgtggtcaccgaggaggacgacgaggagcggaggaaggaggagctagagcttcaggcgataggcacccagctccgcgcgatgcggtcacggtcggggctgcggccaaagacgtcggcggcgaagcttccccggtcgcactccactggccactccctcgccgtccggctcgacggcgacctagagcggtacacgctgcggctgccggagcacgtacacagggagatggtcgcggcgggggagcagagcgtgcgccgcgggaggagactcggggaaggggtcggcatgggcgctcggtgcagcccccggttttcgcggtcgggcagatggtcatcttttctctcaaattctttgtcaggaaagctgtctttcctctccccgtcgtcgaggagaacgccggatagcacccaggtggaagtgtcatcatcctcgtcgtcgtcggtgacgaaggtgaaagggaagcgcgtggccgccgtcgatgttgccgacgacggttctgctcatgggactgcacagtaccctggttgcactgtggccagctcggcggcggcggcggctgtggacgtggagaaggcagctaccaggcaagttcgaacatag

SEQ ID NO: 12683 - DNA, 819 bp, Oryza sativa
  Clone ID: TFbOSC401826j.C1.o29.fg
atggaaggaggcggaggcggaggcggaggcggtggcggaggtggaggtggaggaggcggaggcggggcaccgtacgccacgcgcacggcggaggaggtcttccgcgacctccggggccgccgcgccggcatgatcaaggccctcaccaccgatgtggagaagttttacaagctctgcgaccctgaaaaggagaacttgtgcctttatggatatcctaatgaaacatgggaggtgaccttgccagctgaggaagtgcccccagagatccctgaaccagcattgggaatcaacttcgctagggatggcatgaatgagaaagactggttggcgttagtcgcagttcacagtgattcctggttactgtctgttgcattctactttggagcccgatttggttttgacagagaagcaaggaggcgactctttaatatgataaacaatttgccaacaatatttgaggtagtgacaggagccgctaagaagcaggcgaaagaaaagactcccaacagtagtagcaagagcaacaagcctagttcgaaagtgcagtcaaaagctgagtctcgttcgaaatctaagctgtcagcccccaaggatgaagagggaagtggtgatgatgagggagaggaagaggaggatgaccatgacaacactttgtgtgggacctgtggaaccaacgatggcaaggacgagttctggatctgttgcgataactgcgagaagtggtatcatgggaagtgcgtcaagatcacacccgctcgtgccgagcatatcaagcagtacaagtgcccggactgcaccaacaagagggcccgggcatga

SEQ ID NO: 12684 - DNA, 2094 bp, Oryza sativa
  Clone ID: TFbOSC419229j.C1.o1.fg
atgccgtccatgcgcgcgctcgagcggctcgcctcgtggccgacgcccccgccgccacctccgccgccgccgccgccggcgaaggcggcggcggcggaggcggagaggccgtgtccgccgtcgtccgccgccaccacctcgtcgtcgtcttcttcctcggcctcggccgcgcccgcggcggcgggggcgccgcgcgtctacccgctgcgggacttcccggggagggaggcggcggggctgggcggcgcgttccgggacaacgtgcggtggctgctgaggcagtggggcggcgcctcccccgcctcccccgccgccgggggtcctgggtcggcgtcggcggcggtggcggtggcgtggcgggtgctcctctccgacgaccgcaccggcgtcgtcgtccccatcttcgccgtcgaggagcccgtcgcgtcctcgcccaagccgctctgcgattactgccgctgggcgggttggagccaccattgggtgtcaaagcggaagtaccatttcattattccggcgcccgctgactgggaccgccagcttgctgctgatgtgatccttggacgcaccgaccacctcctccatggcctgatccacagcaatggttttggtcaccttgtcatgctccgtggtcgcgatggcggctccactgcactatctggccgtgacatcatggacatctgggattgcctctgctccgctcttcgtgccagggctgtgtctgtggtggacttttcccagaaacgctctctggatcttcgtctcctgctcagcgtggcacatggtgacacatggttcacccgatggggatactgccttgcaaggggttgcttctgtgtgtctacctcgacctatgcagcttccgtggaagcgttggctgccctgcctgtggactatcttcgcagccgtcacgtccgccgtgtggtaaccatttaccgccgcctatccaacaaacctctggttacagtccgtgagttcctccgctgcctccttgattggaagcaccttgagccaccccttcaattacctcctgtgaagacatgcacacggctgcaattcatgctgccaaagccatctgtgatgaagagacacaggcagcagccatgccagcgctttgaggatgtgattgacctgctccagtgtcgctggtccaagaagcggcttcttgatgctgcagaggttgttgttgacaggctgctagagcatggcagcggggcagagatgacacggcaggcggtgcgagatgctgcaaggggcgccattggtgatactggtctccttgactttgtcatcaagtcccttggtgataccattgttggcaactatattgtgcgacgtgtgcctgatgctgaaacacgtgtgcttcactttagccttgaggaatatgaagagccaacaccagcactgttggatgttgaggtagagtgcacaccattgccacctgtggtacggtggcctagcacagtggaagtagagcgagatctgcgtgctgtctaccgagcaatggtcgaggtgcgcagtgaggcagcacaggctgtgctggactgcaagcactgggtgaagtggtggggccttggggatgagtccgatgaccagctgaggtttttcgttgagtggcaaccccagccatgggaagctgctgagcttatacggccaatgccactgggggagattgtggtggtaccactccatgcatccatgggtgagcttcttgtcgagtcagagcatgcgctgcgggacacttactacttctttgaggaattccaggctgaagggctgcatggcattgctggggagaaatgggatccagtgatgcttggtggggcagagaatggtgacacaatcagcgtgtatggcaatggggcagacatggaaactgagctgcggtgccatggtggacttgacttgtgggaggtgcggtgcgtgtgtggtgcgcaggatgatgatggtgagcgcatgatagcatgcgatgcttgcgatgtatggcaccacacacgttgcgtgggcattgcagacagcgagcctgtgccaccattatttctttgtgtgctctgcggtggtgcgctcatggcggctggaccgatcaattcttga

SEQ ID NO: 12685 - DNA, 2688 bp, Oryza sativa
  Clone ID: TFbOSC900291j.C1.o21.fg
atgtccacctcccccggccgcacccgctccggccgccccctctcctcctcctcctcctcctcctcctcctcctccgcccccgcccctgcccccaagaggcggaggagaccggacaagccccccgaccacgaccccgcccccgcccccgcccccgacaaggatcttctcgtctcccctcacacgcctcctatggacgccgaggcgcccaagcccatacacctcctcaacgacaaggacaaggacaaggagggggacgatggatctcaccaggatacacccacgctacagtcaccccctcgtggatctgatgctcatccaataccaacggagctcaatgtttctgctgctgtcgccaggcctccacaaccaccccatgcacaaccaacggagctcaatgctgttgccgccgccgcgtctgctctaccaatggagcttgatgctgctgctgctgctgctgtgcctgccgaatcaacggagctcaatgctgctgcaaccgctgtgcccgcacaaccgacagaggtcaatgctgctgctgagattgtcaaaccaattgggctcaatgctgtcgctgctgagactgcaaagccagacatggccatggaattgcaggaaccgcctactgtaactgcagccaatgggagggatgtttcccatgaatcatttgaacaaaacctgcaacaccaggtcctggacaatgccttaaccgatccttctttgcttgccgagagcactgcaacaccagcctctactgctggcctcaagcctgcgaggcgcttcacacgatcgctgctcaagaacaaaccagaggaagagcccacagctagcaaaagtcaagaccctgctgtctccatgatatcggaggacaacaacgaggcctctgttgatttggctcttgccccagggaagccacagaggaggttcacaaggtctcttctcaaggtaaaggttgaggcgcgctctaccaacaatttgcttcaatccaaggaggcaattgacagcacatcagactcttctcggtcagtgaagaagatggagatgaagatgtctaagaaggtcgcctgcctcacaaagcacccaagcaacattagagagttgctcaacactggcctgctcgagggaatgccagtcaggtacatcatccccagtagcaagttgcagaaggctgtgctgaaaggagtgattacaggctgcaatatccgttgcttttgtttatcctgtaatggttccaagaacatctttcttcatcacaaactgaaatctttggaagctttttgtgtcaacgttgccttgagccaaaacaacatcaagatcccccttccccatcttatgcttgtaagagcaattccagggacaccgggctacacaaattggtctttaaagttctgcttgatgaggaaagttgatgggtatatcaaggatcaaagaatctactgtaatcactgcaaccgagtggttagcccgtcagcatttgaggctcatgcgggtgagggaacaagacgcaagccgtatgacaatatttttacatcaaatggagtatcattacatgagctgtcaatgaaaatatcaaaggacatggaattatctgaacgcgaaacagatgatttgtgcagagaatgtggtcaagggggagatattttcccttgcaaaatgtgcccaaggtcatttcacccagcctgtgtagggctgtctggagtcccctcagagtggtattgtgataattgcagcaaccttgttcaaaaggaaaaggctttagcagaaaataaaaatgctaaagctgctggaaggcaagctggagttgattctattgaacagataatgaagagagctatacggattgtcccaatctctgatgaccttggtgggtgtgccctatgcaagcagaaagattttaacaattcagtatttgatgagcgcactgtgatactctgtgaccaatgtgagaaagagtatcatgttgggtgtttgcggagccagtggcaagttgacctgaaggaattaccagaaggggagtggttctgttgtaatagttgctcagagattcgttcttccttggacaagataatctctgatggagctttgattttggctgagtcagatattgatatcataaggaagaaacatgagatgaaagggttaagcatggacactaatacagatctgagatggcgattacttgctggtagaaaggcttctgaagatggtgacttattgctctctgctgcagtcccaattattcatcaatcttttgatccaatcattgaagttcagagcgggagggatctaattcctgagatggtcaatgggaggagacccaaggatggaatgcctggccaagattatagtggaatgtactgtgcagtgttaactttaggcacttctgttgtgtcagctgcattgttgcgagtcatgggaggtgaagtggccgaactgccactagttgctacaagtaaagaccttcaaggactgggctacttccaagctttgttctcgtgcatagagaggatgcttatttctctgaagatcaaacacttcatgcttccagccgcccaggaagctgaaggcatctggatgaacaaatttggcttcactaaaattcctcaggaacagtcggatgcttatcttaatggggcacacctgactatattccatggaacgtcaaatctgtacaaggctattccttcgtcataa

SEQ ID NO: 12686 - DNA, 735 bp, Oryza sativa
  Clone ID: TFbOSC401827j.C1.o32.fg
atggagatggccgcccccgtctcccccgcgccgcgcaccgtcgaggacatcttcaaggacttctccggccgccgcgccggcctcgtccgcgccctcaccgtcgatgtggatgagttctacggattctgcgacccagagaaggagaatttgtgcctgtacgggcacccgaacgggcggtgggaggtggcgctgccggcggaggaggtgccgccggagctgccggagccggcgctcgggatcaacttcgccagggacgggatgcaccgccgcgactggctctcgctcgtcgccgtccactccgactcgtggctgctctccgtcgccttcttcttcggcgcgcgcctcaacggcaacgagaggaagcgcttattcagcttgatcaatgaccatccaaccgtgcttgaagcactgtctgataggaagcatggaagggataataaatctggtgccgacaatggcagcaaatccaggcactcaggaaagcgagcaaatgacgtgcagacaaaaacctcgaggccagcagttgttgacgatgggtacgatgaagaagaacacagtgaaaccctatgtggaacctgcggtggccgctacaacgccaacgagttttggattgggtgcgacatttgcgagcggtggttccacggcaaatgcgttaggataacaccagcgaaagcggaacacataaagcactacaagtgccctgattgcagcagctccaagaagagtaggcaataa

SEQ ID NO: 12687 - DNA, 2256 bp, Oryza sativa
  Clone ID: TFbOSC400505j.C1.o44.fg
atgggcaccggcggcggcagggtcgccctcgacggcggcggccggcgccggaggaagctggacgaagaggatgatgaggagtatgtggcggacgacgacgaggaggaagacgaagacgaagacgaggaggagtaccaacaggccgccgccccctccgacgacggcgaggaggggggcgacgacgaagcggagccggaggacgaatctgatgcggatttcgtcggggacgaggaggaggaggaggaggacctcgaagacgaagatgatttggaggaggtcaaggcgccgcgccccaagcgcccgcccaaggggaagccgccgccgagatctcgccgtcggaggcaaaaggacgacgacgatgactacgaagaggaggaggaggaggacgccgacttcgatccggacgtggacgaagacgacgaggaagagaaagacagcaccaagaaccacgtggccaagcggaagccaccacccggccgtaagaagaagaagaggaaaccttctagggtttctaaggcaaagcctaagaagcccacctcagggcgccgccggaggaagcgatgggccaccgatgacgacgaggaagaagaggacgatgcggatttcatcgtggaggacgatcaggaagaagaggaggacgaccaccgcccaaagaagaaggccaaggctgctaggaagaccagggatgtcacgccggagccggatgtcgaggcaagcgcatggccggccgtcgaatcagacacttcagaattcgaattcgtgacatctgatgaagaagctgctgacaaggaagcaccagccgctgaaccagcaaaaaccaaggggaagaagggcaggaagaggtggggatctgggtcagagtcatcatctgattctgattatgtcatatcagagcaggaactgaaggatctggaagtctccatgcctccagatgcagctctgcaatcacctgcaaccctgccgcgccggacctttctttcaaggagggtgggggagaaggggaaagagcctgaagaggcttggaaacagacatgtgggatatgcctctcggaagaacagagagccacgatacagggtgtgcttaattgctgcgcacattacttctgcttcgcttgcatcatggagtggtcaaaggtggagtccaggtgcccattgtgcaaacgccgattcacaacaattaccaagtcatcaatggcagatctagggcttggatcaaggaaagctgtcattagggtagaaaaacgtgatcaggtgtatcagcccacagaagaggaaatgagacgttggttggatccgtatgaaaatgttgtatgcatagagtgcaatcgtggtggtgatgacaacctcatgctactatgtgatatttgtgattcctcagcacatacctattgtgttggtctaggaagacaagtaccagaaggaaactggtactgcggaggatgtagatccggtggggagggcccctctgcacaggatacggtggttcactgcagagaaagtaataccaaccctgccaacagtagttctggatcatttggctcagccacaccaagtggagtgttccagagaccaccaccaatcaacacccaaccttctctacaaggattcgatctaaatctctcaccaagagaaacccctgatgaagataagcgagaagagtcacatgtttcagctgatgctgtttcgactcctactggaaggcatgccactctcgataggaggcgggcctttaaccgacgaattcgcatccttctatttagaccaagggtcacacctaatgggtggcagaatccgattcagtctgacaggacaataccagagaatgaacaaaatccacagagcacgtccactccaactgaagtgaacccatcatgttccagggatagttctatgcagaaccagcagagtagctcatcttttgttcagccagcaaggggtcttattgaacgcacctatgggggtggaagcaatttccaacaaacagaaggtgctaaggaacagctgattcctattgtcaagaggaacctcaaactaatgtgtgctcagtccccattgggtcaatctgatttcaagaatgttgcacggagagcaacacacactatcttagcactgtctgggattgcacacaacgaggattttgttgtcactatattggatgagcgagagatggaaatgaacattgtgcaatcaaatgttatgttgagaaatggttgcagtacagagtacagaccatgtctaagttgccttagaagttag

SEQ ID NO: 12688 - DNA, 777 bp, Oryza sativa
  Clone ID: TFbOSC421348j.C1.o6.fg
atggacgcatcctaccgccgcgacggccgcggaggcggcggcggcgggggcggcggcggttccgcccctcgctccgtcgaggacatcttcaaggacttccgcgcccgccgcaccgccatcctccgcgccctcacccacgacgtcgaggatttctacgcgcagtgcgatccagagaaggagaatctgtgcctgtacgggtacgcgaacgaggcgtggcaggtggcgctgccggcggaggaggtgcccaccgagctgccggagccggcgctcgggatcaacttcgcccgcgacgggatgaaccgccgcgactggctcgcgctcgtcgccgtccactccgactcgtggctcgtctccgtcgccttctactacgccgcgcgcctcaaccgcaacgaccggaagcgtttgtttggcatgatgaatgatttgccaactgtttacgaagtcgtatctggttcaagacaatctaaggagagggacagatccggcatggacaacagcagcagaaataaaatttcatcgaagcataccagcgacgtggcgcgtgtcgaaaataatatcaaggaggaagatgaaggctacgacgaggacgatggcgaccacagtgagaccctatgcgggacttgcggtgggatatacagcgccgacgagttctggatcggctgcgacgtgtgcgagaggtggtaccacggcaagtgcgtcaagatcactccggcgaaggcggagagcataaagcagtacaagtgcccgagctgcagctccaagagacctagacagtag

SEQ ID NO: 12689 - DNA, 2040 bp, Oryza sativa
  Clone ID: TFbOSC419173j.C1.o1.fg
atggcgcctaagatggtgatcagcctggggagctcgcggcggcggaagcgcggcgagatgctgttccggttcgaggccttctgccagcccggctacccggcgaacttcgccggcgccggcggcttcagggacaacgtgaggacgctgctcggcttcgcgcacctggaggccggcgtccacggcgagaccaagtgctggtcgttccagctcgagctgcaccgccacccccccaccgtcgtgaggctcttcgtcgtcgaggaggaggtcgccgcctcgccgcaccgccagtgccacctctgccgccatattgggtgggggaggcatctgatatgcagcaagaggtatcacttcttgctgccgaggagggaatcggcggcggaagccgacggcctgtgcttcgcgatcaaccacggcggcggcggtggcgcggagaaagcgtcgtcgaaagggacgacgacgacggcctccagcagaggccacctgctacacggcgtcgtgcacctcaacggctacggccacctcgtcgccctccacggcctcgagggcggctccgacttcgtctccggccaccagatcatggacctctgggaccgcatttgctcagccttgcacgtaaggacggtgagcctggtggacacggcgaggaagggccacatggagctgaggctgctgcacggcgtcgcgtacggcgagacgtggttcgggcggtgggggtacaggtacggccggccgagctacggcgtcgcgctgccgtcgtaccggcagtcgctgcacgtgctcggctccatgccgctctgcgtgctggtgccgcacctgtcgtgcttcagccaggagctccccatggtggtcaccaagtaccaggccatcagcggccacaagctgctcagcctcggcgacctcctccgcttcatgctcgagctgcgcgcccgcctgccggccacctccgtcacggccatggactaccggggcatcatgtcggaggcctcgtgccggtggtcggcgaagcgcgtcgacatggcggcgcgcgccgtcgtggacgcgctccgccgcgccgagccggcggcgcggtgggtcacgcggcaggaggtgcgcgacgcggcgcgcgcctacatcggcgacacgggcctcctcgacttcgtgctcaagtccctcggcaaccacatcgtcggcaactacgtcgtgcgccgcaccatgaacccggtgaccaaggtgctcgagtactgcctcgaggacgtctccagcgtgctcccggcggtcgccgccggcggcggcgtgccggcgcagggcaagatgagggtgaggttccagctcacgcgtgcgcagctcatgagggacctggtgcacctgtaccggcacgtgctcaaggagcccagccaggcgctcaccggcggcgcgttcggcgcgatcccggtggcggtgcggatggtcctggacatcaagcacttcgtcaaagattaccacgaaggacaagccgcggcgagcagcaatggcggtggcggattcgggcatccccacatcaacctgtgctgcacgctgctcgtgagcaacgggagcccggagctagctccaccgtacgagacggtgaccctgccggcgcacgcgacggtgggcgagctgaagtgggaggcgcagagggtgttcagcgagatgtacctcggcctgaggagcttcgcggcggactccgtcgtcggggtcggcgccgaccaggagggcctcccggtgctcgggctggtcgacgtcggaagcgccgtcgtggtgcaagggagcgtgggcgagcagataaacggggaggaccacgagaggaaggaggaggcggcggcggcggccgtgtgcgaggggagcggcggcggcgagcgcgtcgtggactgcgcgtgcggcgcggtggacgacgacggcgagcgcatggcgtgctgcgacatctgcgaggcgtggcagcacacgcggtgcgccgggatcgcggacaccgaggacgcgccgcacgtcttcctctgcagccggtgcgacaacgacgtcgtgtcgttcccgtccttcaactgttag

SEQ ID NO: 12690 - DNA, 771 bp, Oryza sativa
  Clone ID: TFbOSC413151j.C1.o11.fg
atggacggcggctacggctcggtcacaatcgtccacgacgcgcgctcccccgaggacgtcttccaggacttctgcggccgccgctccggcatcgtcaaggccctcaccatcgaggtggagaagttctacaagcagtgcgaccctgagaaggagaacttgtgcctctatggactgcctaatggaacctgggcagtgactctaccagctgatgaagttcctcctgaactaccagagccagccctcgggataaacttcgctcgtgatggaatgcaggaaaaagattggctgtccctgatagctgtccatagtgattcatggttactgtctgtggcattttactttggggctcgttttggatttgataaaaaggccagggaacggctcttcatgatgaccagtagtctccccactgtctttgaagttgtgtcaggaggtgtgaatacacaatcaaaaaccgccaacggcagtagcaaaaacaagtcaggctctaagccaccaaagcggcccaattctgacagcaagccacagaagcaggtccaggcaaagtatgaggaagagaacggcggcagaggaaatggaggtgatgaagatcaagctgaaaccatttgtggcgcctgtggtgaggcctacgcaaacggcgagttctggatttgctgtgacatttgtgagacctggttccatggcaaatgtgtccgaatcacccctgccaaggcggagcacatcaagcattacaagtgtcctggctgcagcaacaagaggaccagagaatga

SEQ ID NO: 12691 - DNA, 1318 bp, Oryza sativa
  unsure (1)..(1318): unsure at all n locations
  Clone ID: TFbOSC16959j.C1.o1.fg
atggagtcagaagcaggcagtgcacctaatggttgtacatctacagtaaaggggtcagaagagaggcacagtttggaacgtcgtcatgatgatggctcatgtatctcagagattaaacttatttctaatatggttgtaaagaaaaagagggggagaagagcacctccatcttctagaagattaagtggtaataaggttattagtggtgaagatgctgttcaaaatcgcaaccatgctaaagaagaagaccaggctggtaattcttctgatgtggcgttgtcgccatctagcaggaagacagaaggtcaagatcagtcgacaaaccccaaagatttgtttgagaaagcttgccatcaagctacagagatggttactgaaagcacaactggttgcaagaaatccttttgggaagaaaagggaagtgataataggagaggcaggcaagctacactttgtgtgaaacaggatgggcttgatattgaaacaacaggcaaggatgtctctgcaagtgaagcttatgaaaaatccagcacactggaagatacttctgttgggcatgcagcagcaaagagtgttaatcctgaggataattctctagatcctatggataatgtgtctgatacacatgtgaatgccacatcttctgaggacaaaagttctgaagaagttgaggacgtgaaagtgtgtgacatttgtggagatgttggtgaggaggagaggcttgctgtttgcactacatgcaatgatggtgctgagcatatttattgtatgcgggtaatcatccaagaggttccagagggtgaatggttgtgtaaaaagtgcgaaaatgaattggaatatgaaaagaagaagcaactagaaaaatctcagctgaaggttggtgcctcaaaaagccagttctttgaaaggaaaaccaatanaattgccaatgcatcaaaaagcaattcttatgaagatgaaccctcaaaagcccttgaagggaaaattagtaaacctgacactgctttgaagaacagaagttcttttgaaaatgaagtggagaatgaaaatggagataagaaagagttgaattcaacaaaccaatgcaataatagcaattcgaagaggaaggaagaaggtgcagggatcatttcctcgattaaacaaagtattactgaacgctgtggtttctccatgggagctgagtccagaaaaaggttgccattgtcatgtgagagctcatttcggttggatgtagagaagggaaagcaagccgctaccaaagtaccaacttcattggcatttgacgctgccaagaatctgggaccaccacttcgtg

SEQ ID NO: 12692 - DNA, 5091 bp, Oryza sativa
  Clone ID: TFbOSC422248j.C1.o10.fg
atggaggggttggtggggagggcggtgaggaaggagttcccggggttcggggtgttcgacggggtggtggagtcgtacgacgccgaggcggggtacttccgggtgatgtacgaggacggggactccgaggaggtggagcttggggaggtggtggggttgctggttggtgggtcgccggttggggtggagatggcgcatccgctgccgttgacgcccgggcggcgcccgaagaagcggcggcgcggggatgaggaggggggcgttggcgtgggcgcggtggtggcgatggaggtggattccgtggttctggctgtccccgccggtggcgcggagcccgcgtcgccggtggtggtggtggaggggagtagtagggatgaggtggatggggacgtggtgtcggagatggcggagaagaggcggagggtggtgagtccagggcctgagtcgtccgggaagccgcttcggcggagcgcgcggcaggcgaaggcggccgcgcgggtggccgaaatggaggccgccgccgctgtggcggccgccgctgaggctgaagcagctgctgccgcgatggccgaggccgaggcagaggctgctgttacgccaccgcagtctgggagtaagcgtaagcgtgcaagcggggctggcaggtatcggtctgtcgcgaaggatttggagaaggctgcggtggagaggctgcctccgaagccggagcttccaccctcgtcgcagagtttggatttggaaggtctccctgctctcgacgtctttcaagtgtactcctgcttgaggtcttttagtaggcagctgttcctgagcccgttcctgctggagacatttgtggctgcactgcggtgtatatatgtgaaccctttgattgactgggttcatttttctctcctgcgagcgatgaagagtcacttggaagatctcgccaatgaaggagaccctccggcaatgcattgcattaggaatcttaactgggagcttttggacctagcaacttggccaatctatcttgctgagtacctattgactcgtggttcagaactgaggtatggtatgaagcttacagacctaaagctgttgaatacagagtactatactcagccggcaatggtgaagttagagttactgcgcgcactctgtgacgatgttctggaaattgaggctatacgttctgaagttgtttcaaggatgtctgagttggatgggaatgatgagctttgtaaaagcactcgtacaagaagaaaaaggagggcttctgctgtcaagaacctactgaattcttctcgggctcctgaagattccagtgacactgaagatggtaacagcgatgagtgttatctttgtggcatggatggtaatttgttatgttgtgatggctgtcctgctgcatttcactctaaatgtgtgggggtagtggaagatttattgcctgaaggtaattggttttgcccggagtgtttgatacagaagaatgatggattcaaaaatatggtaaagcctggaagaggagctgaggttctgggaatggatccacatgaccgactatactttggcacctgtggctatattttggtggttgagtcaactgctgaggattctctggactcgacatgtcattactatggcatttttgatcaccattcgcttttcaatgtgctaagaacatgccatccctcgtacagttcaatcactaacatgatatctttgttttggggcactgcaattgattcttttgattccaatggtcgatgtgaaaataacaaggaattcagtatctttgatgccaagatagactgtagtcatttattgccatcgaagcaacacacagaacatgagcagcttaagtcagataagaatggctcctgtgaacaattggcctgtgggaaagctcatgcctcggatccagatcggctggatcatgacacctctcaccacaagttctccttgagatctgcggttatttctgaaaatggaaatgcaactagtgccaagactcagcaagatgtttgttcttatgctaatggattgcctgctgagaataagatagaccaatcacctcacaaaaagataagtgattgttatatccattcgaaccctgctatgtacgtaaactactacagttttggtcaaatagcagcatcagctgctgaagagttgaaggacaagctatcggaaaacaaagaaggaaagaaagttggtcaggatgcagcttcattccagctaaaaacaatatgtaagaaatatgccaatatttttgctctgacagatcaaaagttgtctgtagagctgcgaaaggaaaaatgtggttggtgtaattcctgccaaatcagtggcggtgttgattgcattttcagagtcaccgatggcaaatgcatggagggtcttcagtcagaaaagaatatgaacagccatattattcttgccatacatatcatcttgtcaattgaagaacggctaaatggtctactgattggtccatggaaaaatccccaatttagcagttattggcgtaaggcagttctgaaggcttcagatgtgtcatcattgaagcaacctctccttatgttggagtccagtgtgcgacgtgttgccttctcagtggaatggcaaaaaccagcagactctgttgaagttgttgggtctgcagctcatgtcttggttcgtacatctaataaatcctcgagacatggaagcactagaaagccagggagaaagccatttattgttgaactcaaagttgactctcgtgatgttggtgtttactggcgaaggggtgggagattgtctcgtcaagtgtttcactggaagaggttgccaaagtccttgacatataaagctgttcggcaagcggggcgaattaaaatcccaaccatattatatagtgatggttcacagtttgccaggaggtccaaatacatagcttggcaagctgctgtggaaatggcagaaaatgtggcccagtttattttgcagatcaaagagcttgaattcaatatcaggtggactgagatattgagcactctccctgctagccttgcaacaaaggaaacccagaaaatagcacgtcttttcaagaaagttatagttcgcagaaagcgtgtagatggaacaaatgtggaatatttacttgattttgggaagagggagaatattcctccagttattgctaaacatggaaaaaaacttgacgaaccctctaatgagaggaacagatactggttaagtgaaggacatctccctctgagtcttttgaaggcatatgaagctaaagcattaactcgcttactgaaaaagaaagatattgatcaccttccaaagaagatgattgacttgaaacccccaaagccaaaaaaatcaggatttgatgatctcctagaaaaagcaaaaaagcaagtccttgggctttgtggccattgtgacaaagaagtaaagatcagtgatgctgtgaactgccaatattgtgaagcacttttccataaaaagcacttcaaggttcctagaggtgctactgatgcttattatgtttgcaacaagtgcctatctgagaaggtcttgaatgtgaagtctccacagaaaaaggttgtatcaaagaagaactctctgaaaaagaagacaaagaagcaatcacttaagattgtaacaagaagtaaacagattgttgccaaatccaagaagaagatgggcaagaataagggcaagcgtggccgacctaggaagtacccgctgaatgagtcaaagaataaattgccagagttgcgtgtgaaagaaccagccaatgtgcccaagaatgagccagctaaacgtatatcaaaaagattatattcaaagtacatgaaaggcaattcaaatatatctgagcgttcagcaaagaggaggaggactgcttctcattattcatactggttagatggccttcggtggacacaaaacccaaatgatgatcgggcaatatcttttaggacagaaagagttgtctttccctgcgaagatgctgatctgtctgaagtttttccagtgtgccgtctatgccagaaatgctacagtggagaatctatttatattgcctgtgaagattgtggagattggttccatggagacatctattctattactcttgagaatgttaataatctcataggtttcaagtgccatagatgccgtttgaaagatgtacctgtttgtccgtatgtacaaacagataatatccttatggctcaatctgataaggatgacgtcacaagcagatctatagaggacaaggaagacaggagcccaacagatctggttgcccatgacagtctggaagggtctcatggtcatatcattgagaaagaggttaatgatcatagttttgaaaaggaagttggtgatcatatttgtttgcaagcgcaggaagatcataatgaaaaggagctcgacagtcatagcactgagaaagagctcggtgatcataacaagacggaagagtttgatggcaatatgaaagtgctatttaatcttaacagtacaaaggagcttgatagtactagcactgagaaagagcttggtgatcataacaagatagaagagtttgatgtcaatatggaaatgttcttcaatcttaacaatacgaaggagcttgatagtactggagaaagcatatgtgctggtggagaagcacactgtctgcatgagctcaacaaccatgaaattcttaaggagtgtcatagtcttgacaataacctgggtgaactcgataatcaagactgccaaaaagagtgtcataatcaaaatagtctaaaagagcttgaaaatcatcgaagttcacaagagcttgatagtcataaaagtccagaagagcttgataatattataagtccaaaagagcttgactgtactgaaaataatgaacactctgctgcagtgacgcagtcggatggttttcttgatgaccccttcaacattaggatatctgacaaaggactgatcatagcatcagaaaatggtaagataaaggaatctattcctttgcaaaccaagaataaacctgaggagaatcctgttcctgctgatcatgacattgatcttcaggtggtggtgactttatag

SEQ ID NO: 12693 - DNA, 2922 bp, Oryza sativa
  Clone ID: TFbOSC415418j.C1.o2.fg
atgatctttaagcggaaccagcggtcggagatcctctcgctgaggcggtgcaatgccgggggcggcgccggggtcggggaggacgatggggacggcggcgagcggcggcccaagaggcggaggggcgacgagttcttccccgtggagctgctcggcgacgtgccggtcgccggcatcccctacgccgccttcgggttccgctggtgcgaggaggccgaggtcgcgtccccggccgctgcctcgcgggcagcagccgccgccgcggcggcgtctcgaccgccggtggtgcgcacgtcgcgcgggagggcccaggtgctgccctcgcggttcaacgactcggtgctcatcgacccctggaagaaggataagccggcgaagccacctgttccggccaaggctgtgcagctagtgcccaaaagcgaggtgttatatcgcaaaggtgcaattgctgataggagtctaacaatgtcagagttagatgaaaatggcgatgatgattatgaggaaggccacaactttgttgcctccaggaagtactccatgtccctcagcacggtcacttctgtacacggtgaaccatacagctattaccatagaaagggactgatgaaaaggcaatacgatgacgatgacgatgacgatgacgatgacgatgacgatgacgatgacgaggacgaggaggcggaggaggaagaagaagaggaggaggaggaggaggaagagctatcttactggaggaatgattttgtgtatggcgacattgtgtgggcaaggctcgggaagcggcagccggtgtggccgggggtggtggtcgatccagcacagccagctgctgcccaggcattgccaccacagccacgcagcggtgctgtgctttgtgtgatgctgttcggctgggctgcagaattcggtgatgagaagaagttcatctgggtgaggcaaggagggatatttccatttgtggactacatggaccgatttcaagggcagacagaactaagcagttgcaaacctggtgatttccagagggcattagaagaggcatttttggctgatcagggattcttcgaagttccaatggatggcaacacaacaggacagcctgcacgttacaaaagagcacttcaatgtgagagttgtggaaattgctttccaaataaagacccaagcatgatggtgtatgtaatggaacaacttgcttgcagacagtgtgctaagatactgcggtccaaagagtattgtggtgtatgtttgaaaagctggcaacataaatgtggaggaagatggaaaagtagcaagcctgacaaagttgcagttatctgttttggcatggaaggaacttacctacgagatcttgaactaatttcttgccattgtggtccatgcaagggacaaaaatttttgttcaatgaatgggaacggcatgctggctgcagaagtaaaaactggaagtcaagtattaaaatcaaggacacgcttatgccgtttggaaaatggatagagcaacatcaatcaagttcatattccacaaatcctgcaaagcgctcctctcagaaaatgaagaaacaaaagcttcttgatttgctaagtgaaccatatgatactgtaaatgtaaaatggacaacagaaagatgtgcagtctgtagatgggttgaagactgggattacaacaaaattgtaatctgtaacagatgccagatagcagttcatcaggaatgctatggcgtgaggggaaagcaagacttcacctcatgggtttgtagggcttgtgaaacacctgatcaaaaaagggagtgttgtctttgccctgtaaaaggtggtgcactgaagccaacaaatgttgataacttgtgggtacatgtgacatgtgcatggtttcagccacaagttgcttttgctagtgatgagctgatggaacctgctattgggatattgaatattacgcctttgctattcatgaagatgtgtgtcatttgtaggcaaatacatggttcgtgtacacagtgctacaggtgctcaacttattaccatgccatctgtgcatcaagggcaggctataggatggagatacgctgcttggaaaaaaacggcaaacagacaacaaacaagatttcatattgtgctcatcatcgggcccctaatcctgacaatgttttgataattcaaactcctgctggaactatctcttcaaaaaaacttgttcagagcaatggcactgtagctgcttcaaggctgattaggaaagatcttcccaaggattcagtgtcagaagttgaaatttcagagaacttatctgcagcaagatgtcggttttatgttaagaaagaactaaagagatctcgggagggagcaattgcacaccgtgtaaggggatcctgtcaacatcgatgggatgaaatcgacagtttgaatccacctagggaagagagggatccagagtccttttctacttttaaggagcgtctacactatctgcagaaaacagagcataccagagtatgctttggtaggtcaggaattcatagatggggactttttgctcgtaggggcattcaagaaggagaaatggtgctcgagtatagaggtgagcaggtcagacgaagtgttgctgatttaagggaagaacaatatcgtgtacaaggcaaagattgttatcttttcaaaatcagcgaggaagtagtcgttgatgccacagataaaggaaacgtggcacgcttgattaatcattcttgcactccaaactgctatgcaaggattatgagtgtggggcatgacgagagccgtattgtcctaatcgccaagaaaaatgtctctgccggcgaagagctaacgtatgactacttatttgaccctgacgaggctgatgatcgcaaagttccttgcctctgccaaacggctaattgtcgtaaattcatgaattag

SEQ ID NO: 12694 - DNA, 4437 bp, Oryza sativa
  Clone ID: TFbOSC401520j.C1.o5.fg
atggcccgcgccgagggcttgccggagggggccgccccgggcgtcggggtggacctgtacgcgcaggccaggaaggccctgtcggtgcggacgccgttcgagggcgaggggacggcgcctagggttcccacgctgcccgcgcggctcgtgaactggtcggggcagagcgacgcgcggaagaagcacaagaagattcagccccaggacgtggctgatgtggagctcccgccgcagccagccacggagccctctgcgaagactggcgtgtgggagcagttcgaggcgtatttccggccggtgaatttggatgatattgatatgttaatgccaaagtttccgttcggctatggcgggctcgattcgtgcatcctcataccatttgtgggcagtggcaaggaattgatggacacagctgagacatttgatgtggctgtggctgaaacaagctcgtacttgggtctgggtggtgaagaaagagtcagtaacaaggagcatagcgaacggagtgagcgaagtgagcaaagtgttgagcaaggcatacatgaggtgattgtgcgacagttcgttggtaacaaggaacgcggtgagcagagtgtagagcagggcatacatgaggtggttgtgcaacaggagaattggccattggaagtggagcaagctactagcagtgctggcattgtatcatcaaaatgtgaagaagagggagaatcatcactgaattggttgctaggatcaaaggaacggtttgtgctcacttcagaacggcccaacaagaagaggaagcttttaggtgtggatgcagggttagagcagcttgttctgctaccgcgctcgggagctgaggctagttctgtatgtgatgtttgttgtttgggggagagtagtacggtgtccaatagcatgctcaattgcaaccgctgtaaggtaactgtgcaccagaagtgttatggtttgcatgttgtgcctgatggccagtggttgtgcacttggtgtaaggatttggagtcactgcagtcgttgaagaaagatgcggacaacaccttgtcgatgccttgtgttctatgcccaaaagagaaaggcgctctaaaacctgtcaaaggggagcctggtcaaacagcgcatggggggaaccttaaatttgtgcacttgttttgtagcctttggacaccgggagctcttgtggaagacatggaatcaatggaacctgttactaatgttggaagtgtccaggagaatcagtggaaattggtgtgcagcatttgcaaggttaagcatggtgtatgtgtccgatgtagtcatggaacatgccgaacaccttttcatcctatatgtgcacgagagtccaagcatcaaatggagatatggggaaaatttgggtatcctaatgtcgagctgagagcattttgctcaaagcattctactattggatatgccaattctctagagagaagtaactgtgcatctcaccagagtcctacagaagcaaggctaaaagatgcaaaccttatcactggaaaggtaccaaaactaagattcacgcgcaagaacaaggataaattcatgaactatgaagccactagctttaactctagtaaccttatcaaagtagagaccatagagcaagcctctttaccccacactgttagaagttcagattccctagcaatccaagggatggaagtggatactgacaatctctcggttggtgggaaccttatgagaaactctgctgatgttgctcttgttcttagaaagctaattgatcaaggaaaggttagtgttggtgatgtagcatctgaagtgggtatttcttcagaatctttggaagctgctcttgtgggtgaaaccaccactttttcccatggtctgaaactgaaaattatcaagtggctccaaaattctgcacatataccagctgctcaggcaaagattcttaaagggggcccaatggtggtgcataatagcaaaccaggcaggtctgaggatacaaatagtgtaaacatgaagaattcattggttccgaatgatgagaaaggaacaacagcttacttgtcagattctgctgtgatgaaatcctcatcaacaagatctaaagataataacaagattatgagggataacacagctgtctgtgcaactggagtaacaacccttttgcagaatggaataaaaaagatggctgaagcaggcgctgagcgtgagtgttcttcccctgctgaagattgtgctaaaggtactccaaaggaagagcatggaggattgatatcgaacaacatctctggcaatacacaatttggaacttccatggcgataccaaatgaaaataaaggtacatctcctggaaagaaaagatataacttaactgaggctgaacctggctcggagctggagggtgtctcttcattgaatcaatattttcctccaggtgataatgtaaaacatgagttaaacttggttgaaaatggtgttgggaataaccatgattgcaacgcagatcatgttcctggacagcccttttccaacttcaatgattcacactattatatccatccactcatcaaggaaaagatgactcagctttgggacaacacgttcaagcaagataagctggcaccatgtcaccctgaagatccgttatgttatcccgatgagagaaggcgtgtgggttcctcgataaaacttacagaaacaacagatgtgatggatcaagtttcaagagcaaaatccttgggtatccttgagcactcacctgatgatgaagtagaaggggaaatgctgtacttgcaagccaggctacttgacactgctgcctttctgaagcacagatatgaagatttaatagcaaaggttgtccagaatctctctcgtgagttggatgctttcagtaggagaaaatgggattttatttttgtcaatcagtttctccgtgatgttagagaagctaagaaacgtgggagaaaagagaagagacataaagaagcccaggccattctggctgcagctgcagctgcagttgtggcctcctcacgtaactcaactgtgagaaaagatgccaatgatgatgtagtacctgctaagcaagagaattctccaaaatttggcactggacctccaaacgttggccagcggacttcttcactactacgactcaaggatttgtcaaagccacccaacaacaaaatttcacaagataataaccgcagcacttttcatatgccaaattattccaaagaaaatgcactatactgtgatgtatgcatgcgaagtgagactgtgttgaaccggatatttgtctgctccagatgcaaggctgcagtccacataggttgctatagaaatattgagaatatttctggcccctggaagtgtgaactttgcgaagatatttcaccagaagacacttgtgttggtgatcaatcagattgcaatggcacaaacctgtccttagtgcagtgtgatctgtgccatggcacatcaggtgcatttagaaagactgcagatggacagtggattcatgctttctgtgctgagtggttgttggagactgagtatgtgaggggacaagatagtccagtcaaaggaatggaaagtcttgtaaaggacaaagatacttgctgtgtctgccttcatactgttggcgcatgtctaaagtgcaataatggggactgccaaaccacttttcatccttattgtgctagacatgctggtttctacatgaacacaaaaggatctggtggtattttgcaacacaaggcatattgtagcaaacacagcatagagcaaaaggaggctgatatgcaacagtatggacttgaggagttcaacaacatgaaaagaatgagggttgagttggaaaaattgcgactcttgtgcgagaggataattaagagagaaaaggtgaagcgtgagagggttctatgtgatcatgacatacttgccaaaacgaaggatactcttgttttctcctaccttacacatggagcaagttcagaatctgccactacttctgttaacaacaaatcatacagtggaaccatgcaaaggtctgatgatgtcacagtggacagtactatttctgggaaaaaggcgatcaggttttctctgaataacagggatgctgagataaacacagctgatagctcaaggacactgatatcgttcaaacggaagtttagtgaaagaggatcacttgctggtaagcagctcccgcgaagaccagttacctcacagaaattggaagctggagaaaagaagacgaaggataagaagaatagggaaacatttcaaaaggagctttttatgacatctgatcaagcttctacacagaaccaacgtcttccgaaggggtatgcatatgttcctcgtgactctctttctaaagacaagttgcggaatcgaaatacacaggcccatgaaccacaagagcctggtggatag

SEQ ID NO: 12695 - DNA, 5016 bp, Oryza sativa
  Clone ID: TFbOSC401369j.C1.o50.fg
atgctcgcgtcccgcatcccgctcaagcgctgcaccgccgccgccgtcgtccccctccccggggagttggagatggaggaggggcccaccccccccgccgggggtggtgaggggagcggcgcggcggtggtgcccgccaagcgccgccgcgagcgggtggtcccctcgcggtttagggactcggtggtgtcgctgccgctgccgcccgcgaagaaggggaggcccgcgaagaaggcggccgcgcgggagggcggggacggggaggtgtacgatgtggaggtgcgcgcggtggagcaacaaggcgcgacggcggcggccttcggcgccgtggagaccgcggtgtggcccggcgacgagcggccggcgcagacggaggaggagctgtaccgggcgtgcaggaatatccgcaggagcagcagctccagcgggttcagcggcagcgtggtgacgtcgctgagcaatgccggcgggagcgtggcgccggaggggaagcccgtggtggtggtggagtgcaagccgaagagggagggcggcgataaaaaggaggatttttactggccggaggatttcgtgctgggtgatgtcgtgtgggcgaggtccgggaagaagtgcccagcatggcctgcggtggtgattgacccactgctccacgcgccagcggtcgtgttgaactcctgcatcccgggtgcactctgcgtcatgttctttggattctcttctggcgggcatggcagggactatggatggattaagcaagggatgatctttccatttgtggactacttagaccggtttcagggtcaggctttgtataaactcaaggcaaacagattccgtcaagcaattgaggaggctttccttgctgagcgtgggttttgtgagctcgaaatggatgaggggtgctcactagagaagtctgtcaatgaccagtctgtccctgacgggttacaggaagggagtggttctaacaatgaccaggaatgtcaatcggaggctcaggttgttggcaaatcaactggatgttgtgatagttgtggtaatcgtgttccacccaagatcgcgaagaaaaagaagcaagcgggagagcagttactctgtagacactgtgataagctattgcagtcaaagcagtactgtggcatatgcaagaaaatctggcaccacacagatggtggaaattgggtttgttgtgatgagtgtcaaatttgggttcacgtagaatgtgacctaacatgcatcaacatggaggacttagaaaatgccgattacttctgtccagattgcaaatcaaaacgcaagacagtacctcctgttgaacaaatgaacactccgaacagttcagaatgtgctagcacttctaaggaaaaactgccggaaatgatacctgtgttctgctttgggatggacggaatgtatttacctaagaagcacatgatactatgccaatgtaattcttgcaaagaaaggctgatgagtctgagtgagtgggagagacatactggttcaaggaagaagaactggaagatgagcgttaaacttaagagcaatggggatccattggtaaccttgttggatgatattccctgcgcaaatgtgaagtcttctacaccaagtattaataaagaagagttgctgaaattgctaggtacattggctcttgagtttatgttggtttctgcagttgcaaattcttttagacctgtcaatgctagatggacaactgaacgttgtgctgtttgtcgatgggttgaggattgggactacaataaaattattatttgcaacagatgccaaatagctgtccaccaagagtgctatggagcacgtgatgtacaagattttacaaattgggtctgtcgagcatgtgaattgccgaaacaaaaaagagaatgttgtctttgtcctgtcaaaggcggtgctctcaagccaacagatattgaccaactatgggttcatgttacatgtgcctggtttcaacctaaagtctcttttcctgttgatgagacaatggagccagccatgggcatattgagcatcccttcagagtactttaagaaggcatgtgttatatgcaagcagatgcatggtgcctgcactcagtgctacaagtgctctacttattatcatgcaatgtgtgcatcaagagcaggatatcgcatggagttgcaatactctgaaaaaaatggaaggaacataacaagaatggtttcctactgtgcatttcacagtactcctgacccagataatgtcttgatagttaagacgcctgaaggagttttctcaaccaaatttttgccccaaaataatgagaaacagagtggtacaagacttgtcaggaaagagaatctacaggagaaagtccttcctgctaaaatttctgactgtccagctgcaaggtgcctaccttatgaaatgctgaaaaataagaaagaaccaggagaggcaattgcccacagaataatgggaccccgacatcattcccaagagtcaattgagggtttgaacgcttgcatgaaaatagaaaacaaaagggtctcttgtggtcgatctggaatacatggatggggactctttgctgctaagaaaatccaggaggggcaaatggttatcgaatatcgcggtgaccaagttagacgtagtgttgcagatttgagggaagcacgatatcacagggagaagaaagattgttatctgttcaagatcagcgaagacgttgtcgttgatgcaacagagaaagggaacatagcccgcctaattaatcactcgtgtatgcctaattgctacgcaaggatcatgagtgttggcgatgaaaagagccagataattcttatcgccaaaagagacgtctccgctggcgaagaactaacctatgactacttgtttgaccctgacgagtccgaggactgcaggtttttctctgcagttcagtttcagtttcagataggccgtgagtggcgctgctgcagccacccgagagttgaaacggacctcaaaacacttgctagaagattttggaaagttgctgccccttactggtggtcagaagataaagtgcaagcgaggctgaggcttgctgcagtatttgctcttacattagcaactactggaattagtgttggatttaactttctgggtcgtgacttctacaatgcccttgctgacaaggaccaggaacaatttaccaagcaactgctgtattacttgggaggttttgctgtaggaataccgattgtttatacaagaattatatcacatatcactagattttccttctttgtcttgagagactatgcaagggagaccctttctttaagatggcgatcttggatgacaagttattacatgaagcgctactttaaaaatagaactttctataagattcaatctcaatcactaattgataacccggatcaacggatcaatgatgatctcagtgcattcactggaaccgcgcttgcattttctctgacatttttaaatgctgccgtggacttgatatcattcagtaacatcctttatgggatctatccaccattattcattgttcttattgtctactcccttgggggcactggaattagtatcttccttggtaaaaatttggtcaacttgaacttcatgcaagaaaagaaagaagcagattttcgttatggacttgtccgagttagagaaaatgctgaatcaattgctttttatggcggtgaagaaaatgaattgcaacttttgttggatcgattcaggagggcttttgaaaaccttagcgaattgctaatagcatctcgtaatctggagtttttcaccaatggctaccgttatttaatccagatcctgccagctgcagttgttgctccgatgtacttctcaggaaaaattgaatttggagtaataaatcaatcagtgtctgctttcaatcatatccttagtgatttttctctcattgtgttccagtttcagtcaattagtgcattctcggcggttattgatcgtctaggtgaatttgatgatctgttggatggaaatggttcatctttatccaagcctgataacattgatgggatcaacataattttcaagagcactggtcctactgtactgagttccaatggatcaccgacacaatctaatccatccatggttcttgagatttgtaatttgacattattaacacccaggagtggaaacattcttattactgacctcactatggaactcaaagaaaaggaccacctactggtaatggggcccagtggaagtgggaaaacctctttgttacgtgctttggctggcctttggaccagtggtactggggacatcatataccatgtgagaggttccatggagcttcaaacatcaaattcaggtcctgatgagccatccaacatacagtcaaacggtgaagaactgctacaaagttcaaagcagagaagggataatggtatattctttgttccacagagaccatatatggttttgggaacccttcgtcagcaattgctctatcctacatggactgaagatgtttgtcattcatcaaataatgatcctcaaagtacagaccctcttacctttgaagtctccacatcagatggagttggttccaagtctgagatgcccacaactgatgaactgatcagagtacttgaggctgttaagttaggctatatattgcctcgtttcaatggtttggattctatgcatgattgggccagcgttctctctctgggggagcaacagcgtcttgcatttgctcggttgttacttgcaaaaccaactttagtcctccttgatgagtccacaagtgcactagatgatatgaatgagcgtcatctatacagtcagattgaagctgcagggattacttacataagcattggtcaccggaaaacactgcacaagttccacaacaaggtcttgtacatttcaaattccgattcaacggatagcaacccacgtaattggtacctaaagcccacagaacagatgtcgattgaagagtcatcctcatttgcttcataa

SEQ ID NO: 12696 - DNA, 2133 bp, Oryza sativa
  unsure (1)..(2133): unsure at all n locations
  Clone ID: TFbOSC403241j.C1.o2.fg
atggtggtgaacagccggccgctgaagagggcgaggacgcgggtggaggccagggacttcgctgggttcccgccggcgggggacggcggggctgccgggacgttccgggaggcggtgagggggttcctcgcgaggtacgcgcggctgctgcctctcccctctatcttctcgccggcggccgccgcggcaccgccgcatctgttgacgtggagggtgtcgctgcgggtcggcgaggagggggacgaggagggcggcggcggcgccgtggagctcaacgtcgttgaggaggatgtgctccgatcgcgatctgtgtattgtgaccagtgcagagtcgtgggatggagtggtcacccggtctgtgggaagcggtaccatttcatcatcgagaacgacaacaaccaggtgtgcggcaagcgccacagctgctgcctccgctgcgggactcccacagtcgctggagaatcaagatgcctcctatgcaactttgatatggatggcgaggagctggaggagtgcgggtacatgcatctggacgacaacacccacctgctgcacgctgtggtgcatgcaaatggttatggccaccttctgagggtaaatggccgtgaaggtggctcaagatgtctcacgggccgtgacataatgagtttctgggatcgcttgtgcaaggtgctacatgtgaggaaagtaactgtcatggacatatccaagaagcatggaatggaatacaggcttctgcatgccatcacaagtggccatccttggtatggtgaatggggatacaagtttggcgctggtagctttgcactaacctcagatacttaccaagaggcagtggatacgctttccggtatacaactcgcgttgtacttctcacatcgccagcccattcggacccctctgcagaacacgattgctctgtactgggcactctctgatcgccagcttgtgactgttcgggacctcttccggttcataatgcacctgcttcatcaagcacgcaagaagaacgagacatcaaaacccacaactgatgaacacaaagaagttgcatctaatgtgctctgcaagtggacaaaggaagatattgatcgggcagaaactgcaatgctcaaggtcctacgggttgttcagcctggacagtgggtatcatggcgtgcacttcggggagctgcatcgaaggctgttgattcacaggagctacttgactattctcttcgaggactgggtggaaaactgatggacgatggccatttcatagctgtccgctgcaatgctgagacgagtgcaattgaatacaggctggaagataactccaaccagtcagttgatgcggctgcgtttgggccttctgttgatcatcttctgcacgatctgaagttcctctataacgctttgctgaacccagaaaccatgttggcttcacagccagaggttataggtgcatcatcacacagtgcagcagcaaagattctcgactgcaagcagttcatcaaacattacgatcagcacaccccacgggctcctttgaacccattcctactttctgtgaggtgttccattgaacttcttgatcacccaaaagactacactgcaccaccggtggaactagtgcttttaccagcaagtgctacccttgctgaactgaaaatacaggctacaagggcctttcaagaaacatacctcatgttccaaagctaccaggttgaacagctccctgacttcccaaattttagtgacacaaccctcgtgaagcatgtgcttggctcaagccagctcgtgagggtaagaggaaggtgcactggggataaccgaagaattgtgcaattcaggatggaaagggggttggagaactggacggtcgactgcacctgtggagccaaggacgatgatggcgagaggatgcttgcatgtgatgtttgtggagtttggcaacacaccaggtgttcagggattagtgattttgatgatgtccctgagaagttcatctgcaggaagtgtgctagtccacgcagagaaangggtcgtgtgggtgnaggtgcaatgtggggtagcagaatgaatgcttccatgtcgtggctttacactatgaaaggcagccatatagtagaaagtggtgtcctgcaattttaa

SEQ ID NO: 12697 - DNA, 2151 bp, Oryza sativa
  Clone ID: TFbOSC403247j.C1.o23.fg
atggtggtgaacagccggccgctgaagagggcgaggacgcgggtggaggccagggacttcgctgggttcccgccggcgggggacggcggggctgccgggacgttccgggaggcggtgagggggttcctcgcgaggtacgcgcggctgctgcctctcccctctatcttctcgccggcggccgccgcggcaccgccgcatctgttgacgtggagggtgtcgctgcgggtcggcgaggagggggacgaggagggcggcggcggcgccgtggagctcaacgtcgttgaggaggatgtgctccgatcgcgatctgtgtattgtgaccagtgcagagtcgtgggatggagtggtcacccggtctgtgggaagcggtaccatttcatcatcgagaacgacaacaaccaggtgtgcggcaagcgccacagctgctgcctccgctgcgggactcccacagtcgctggagaatcaagatgcctcctatgcaactttgatatggatggcgaggagctggaggagtgcgggtacatgcatctggacgacaacacccacctgctgcacgctgtggtgcatgcaaatggttatggccaccttctgagggtaaatggccgtgaaggtggctcaagatgtctcacgggccgtgacataatgagtttctgggatcgcttgtgcaaggtgctacatgtgaggaaagtaactgtcatggacatatccaagaagcatggaatggaatacaggcttctgcatgccatcacaagtggccatccttggtatggtgaatggggatacaagtttggcgctggtagctttgcactaacctcagatacttaccaagaggcagtggatacgctttccggtatacaactcgcgttgtacttctcacatcgccagcccattcggacccctctgcagaacacgattgctctgtactgggcactctctgatcgccagcttgtgactgttcgggacctcttccggttcataatgcacctgcttcatcaagcacgcaagaagaacgagacatcaaaacccacaactgatgaacacaaagaagttgcatctaatgtgctctgcaagtggacaaaggaagatattgatcgggcagaaactgcaatgctcaaggtcctacgggttgttcagcctggacagtgggtatcatggcgtgcacttcggggagctgcatcgaaggctgttgattcacaggagctacttgactattctcttcgaggactgggtggaaaactgatggacgatggccatttcatagctgtccgctgcaatgctgagacgagtgcaattgaatacaggctggaagataactccaaccagtcagttgatgcggctgcgtttgggccttctgttgatcatcttctgcacgatctgaagttcctctataacgctttgctgaacccagaaaccatgttggcttcacagccagaggttataggtgcatcatcacacagtgcagcagcaaagattctcgactgcaagcagttcatcaaacattacgatcagcacaccccacgggctcctttgaacccattcctactttctgtgaggtgttccattgaacttcttgatcacccaaaagactacactgcaccaccggtggaactagtgcttttaccagcaagtgctacccttgctgaactgaaaatacaggctacaagggcctttcaagaaacatacctcatgttccaaagctaccaggttgaacagctccctgacttcccaaattttagtgacacaaccctcgtgaagcatgtgcttggctcaagccagctcgtgagggtaagaggaaggtgcactggggataaccgaagaattgtgcaattcaggatggaaagggggttggagaactggacggtcgactgcacctgtggagccaaggacgatgatggcgagaggatgcttgcatgtgatgtttgtggagtttggcaacacaccaggtgttcagggattagtgattttgatgatgtccctgagaagttcatctgcaggaagtgtgctagtccacgcagaggaaagggtcgtggtggtggaggtggcaatggtggtagcagaatggatgtgagcgctgcagggaggtgcaaggatgagataggatcatctgttggcggtgcaggcaaatttgggcgcatggcaactgttggatga

SEQ ID NO: 12698 - DNA, 3084 bp, Oryza sativa
  Clone ID: TFbOSC900067j.C1.o9.fg
atgaggaagggaatatgcaccgggcatattacttatacggggcggacacgaggcccaataacggagggcaaggaagcatcatcggcaatctgccgaggaagcgccaagcgtgaaaacggaacgacatggacgatggaaatggatgggggagatgaggcgaccagctcaggcacaagggaaaaccttggtatccctgaacgcgctgcaagatatggcgcatcattcccgtgtgtggaggagcatggagagaccaaagtcgggcaggccggggtccaggctcctagtagagaagaatgttcaccgggattcaagtggcagtggatcacccactacaggcactcatggggaagccggagggtgtgcgactgcgagctagggtttggggcggcggggagggggagggggggaggattggcggaggcggcggcggcgttggaggggttccttgcggatccatggctgctgaggccggcggcggcgggggagggggtgggggtggaggaggagggaggggtggcgacggtgcaggtggaggtgccgccggtggaggcggcggaggagggggaggaggaggccggcagggcggccgtgctgcggcaggcggccgccgcggaggactacgcgcggaggctggagggcgccgccgccgcgggtacgggtctcaggtttatgccaaatggattttcagtgcttcttacgctttgcttttttatttggggtgtagatacacacgactatgatgttgtcaagttggaggaaggagatgaagaggactggggccaagaagatgtgggcaatgctgctgtcaaggttatgtgtcgtatatgcttttcgggagaaaatgagggtagtacaaaagctgccaaaatgcttccatgcaaactctgcaacaaaaagtatcatagaagttgtttgaaaaactggggggaacatagagatcttttccattggagctcatgggtctgcccctcttgccgcagttgtgaggtatgtcgacgacctggtgatcccaacaagttaatgttctgtaaaaggtgtgatggtgcttatcactgctactgtcagcaaccgtcgcacaagaatgttacccatggaccatacttatgtccaaaacatacaaggtgtcacagttgtggatctggtgtacctgggagtggccatagcacaaggtggtttctgggttacacatgctgtgatgcttgtggacgattatttgtgaaaggaaactactgtccagtttgcttgaaggtttatagagattctgaagtgataccaatggtttgttgtgatgtttgtgaaaagtgggtacatattgagtgtgatggcatcagcgaggaaaaataccagcaatttcaatcggaccaaaaccttcagtacacatgtggagcatgccgtggcgaatgctcccagattagggacacagaagatgctgttagggagctttggaagaggcgggatgtagttgatcatgaccttatggctagtttaagggctgctgctgcactgccttctttggaagatgtctcaccatctcatcctaactcagatgatgaaaaacttggtgcatatgtaatgaaaaatgatggtagaaacacactcaaattctctttcaaaagcaacagtactaagcctgcattagattcatctgaacaagagaagaatgctatcaagagctcagggtcaaataagaagcattccaagaagaaagggaatcaaaataataaaacagttagcgagcaggatgagatatttttggagaaaaggaatgaaactaaatcattgggtagtttgggagatcaaattgcagatgttactcgtgataagagttcatttaaaaatgatgccgatgcgtttgtgctgtcttcagctcaaagtgcagagaaggctttgaaattacaatctgccaaagctgcagcacataatgctgatatgatacccaaagtcaagattaaaggaactaaggttccgagtttgcatttcaaggatgtaggcgaggaaaatgctgccaagagtgacacagggaaaggtaccaagttggttattcatatcggttcacgacacaaaagtaggagtggctctcccaagtctgaaatgtccaattctcagaaagagcaagagctggtttcaatgcatggagggaaagttgatgtgacaagccagttcaaaagctctagaagtgaaataaaagaaaaaagtgtaatgaagctagttagagagactggagtacaacaaaatagccttctaggagatctaggtgcttcaaaaaagcatgcaaccggaaaaaggagcaatgctatagtttctgcaatggaaaatgcaagtgaaagtggtaccagaagcagatcgtttggacaaaaacaatctgttaatcatctgactgagaaccaggggaatgcttcattttctgtgaacaactctcctgacagcttgaagccatcattgctcaagcttaaatttaaacgtccaatttttgagcagccaagcactcagtcttctcaaccagaggagccgggcacctgggcttcaccgcaagaggagttaaatgttgctaaaggccagagatcaaagaggaagagaccttcattagacaagatggatggttcggaaagtaaggctccagctgccaagagacatgagcagagcacaggagaagaagcaatggatgcgaactggatcctgcgcaagttgggcaaggatgcgattgggaagaggattgaggtccagctagcttctgatggcaaatggcatcagggggtagtctcgaatgtaatcaatggcactttgtgccttcagttagataatggtaggtctgagaacatagagctgggaaagcgggcaatccgcttgatagcacaaagtcaacttcctgccaccagggtagtaagcagacctctccaggctccagcatttggatcgtcgcagtctctgattcatgggagattgggaggtctgaagcgcattggcttcattttgacttctggtagtgtaggaacaaacaactgggaaggctttttaggggccaccctggatgtagaagaaatgcctgatgatggccatgtacatgtagctgtagctgctgaatga

SEQ ID NO: 12699 - DNA, 804 bp, Oryza sativa
  Clone ID: TFbOSC416032j.C1.o4.gm
atggacgagggaggcggcgctggtgctgcggctgccgccgccgggaacgcggcgggggcggcggtgcaccacaacgcgcggtccgcggaggacgtcttccgcgacttccgcgcgcgccgcgcgggcatcgtcaaggcgctcaccaccgatgtggagaagttctaccggcagtgcgaccccgagaaagagaacctgtgcctttatggattgcccaatgagacctgggacgtgacccttccagctgaggaagtacctcctgaacttccagaaccagcactgggcataaactttgctcgtgatggaatgatcgaaaaagattggttgtcgctggttgcagttcatagcgatgcatggctactgtctgtagcattttactttggggctcgctttggatttgataaggaagccaggagacggctcttcaccatgattaatggtcttcccactgtatatgaagttgtgacgggaattgccaagaagcaaacaaaagtctccaacggcagcagcaaaagcaacaagtccaaccctaaaccatcgaagcaatccaattctaacagcaagcctgcaaagccacctcagccaaaagatgaggaagacagcggcccggaaggcacagaggatgaggaccaggcttacatgtgtggcgcttgcggagagacttacgcgaacggtgagttctggatctgctgcgacgtctgcgagaagtggttccatggcaagtgcgttcggatcacccctgcgaaggcagagcacatcaagcagtacaagtgccctggctgcagcagcaagaggagccgagaatga

SEQ ID NO: 12700 - DNA, 4329 bp, Oryza sativa
  Clone ID: TFbOSC400485j.C1.o3.fg
atgccaccggttgcgtccggctccggccggaagaggcagctggtgctggagtccagcgattcggaggcggatgagttctttgtctcgacgcggcgcaaggaggatgatgatgatgatgccggaaatgccggcggcggaagcggaggaggtggtgatcagggtggggaaaaggtggtgactgttagtcctgagaaggtttctggtgccaagtctactgatgaaggaggtggttcagacaagagcaagggaagtgaggtgggtaagagtgttttgcaacctgatgtgaagaggatcagaactgaggctgcccatggtggcggcagcggaagcggtgggagtgtatcgaaggatggaaccggcgggaaaatgctgcgcccggggttccccaagtggcgatttgagaagccggaggtaagggcagggcgggttcttgatgagaaaggtggggtcgagacgaaggtaagcagttcccaaaaggttaaggaccatgcatcgagttcggtttatgagagaagacggccagagccactgaaacctgagaaatcgacgccatcgaagactaaccaagaggttataagggtacaagggaaaagcggtgtcttaaagatccgtccgaagaacaataaggtggctagtgaaactggtgatggcaagaacctgccgaagaatgctaaggtggatggggatactggtgatggcaaagttctgccaaagaagactacagtggaggaaaatggtgatggaaagattttgaccaagagtggtgttttaaagctcctcccaaagaacaataaggtggccaaggaaaccagtgatggcaatcctcgaagcaagaacactaaggtggttggggaaaccagtgacgccaagattctgatgaagaacaaggcgaatagggaaagtggtgatgataaggcaccgaagaactgtacggtgaatctagaaactagcgctggcaagattttgtccagaaacactaaggaagatttgaaaaccagcgatgtctgtagacaagataaggagaaaagcgatgcaattgatgtgtcccaaaaacagggtgcagatggtgagaagagaatcacagaaaaactagtctcccccatcctattgaggaaaagtgacccaagtgtagtgggaatttctttgggccagaaaatgaagcagcaaaattcaaaggcgcaactgaagatatcctcactaggccaacgtcagccttcacttaatttgaaagatgagaagaataagaaaaaaagattgcttgatcataaaatgtcaccagaaaatttgtccaagaaagcaaaaccaaatgccattgatcaggatacatctcgtccttctcttgagaagcatggaataaagaaggaaaggaaagggcctcgttacacaatgaagcagaagctcaggggtcagataaaggacattcttttaaacaatggatggaaaattgatctaaggcgcaggaaaaacaaagattatgaagattctgtctatgtttctccacaaggaaatggctattggtcaatcactaaggcttatgctgtgttccaagagcagtctaaaagtgggaagcatacaggtaaatcatctaagcataaagcaggtgttgcagatgctgcctgtaatgccatatcagaaaatgatttagcaatgctacagaggaatgtggtgaaaaggaggaccaagaaagaacttggtgcttctaaaaagaagtatgaggacagcagcagcaggaactccaaagacaacaatgctggtagaagttctggaaacaagcatcaaagcagtggagttaggggatgtgcgcttcttgtccgtggtagtactcatagcatggaaggcaatgtggacggctattttccttatcgatggaagcggacagttttatcatggatgatagatatgggggttgtttctgaagatgcaaaggtcaaatatatgaataagaagggcacacgggcaaggttggagggtagaattactagggatggcattcactgcggatgttgctctaagattctcacagttgctaagtttgaacttcatgctggttcaaaagagcagcagccctatgaaaacatctttctggaagatggtggggctacgttgtcacaatgcttagttgatgcgtggaagaagcaatcacaatctgaaaagaaagggttttacaaggtagatcctggtgatgatccggatgatgatacttgtggcatttgtggtgatggtggcgatttgctctgctgcgataactgcccttcaacttttcacttggcttgcttaggaatcaagatgccttctggtgattggcattgcagtagctgtatatgtaggttctgtggttctacccaagaaataacaacatcgtctgctgagttactttcttgtttacagtgttcaaggaaatatcatcaagtttgtgcacctggaaccatgaaagactctgttaaagctgaatccaattcctcaactgattgtttttgcagcccaggatgtagaaagatttataaacatctgagaaaactacttggggtaaagaacgctattgaggctggattttcctggagcctggttcgctgttttcctgataaactagctgcacctcccaaagggaaagctcatttgatacattgcaattccaagacagctgttgctttctcagttatggatgagtgctttctgccacgtattgatgagagaagtgggattaatataatccacaatgtcatatataactgtgggtcagatttcaatcgtttaaattttagtaagttctatacatttattctggagcggggtgatgaagttatatctgcagcagctgtcaggattcatggaactgacttagcagaaatgccattcataggaacaaggggcatatataggcgccaagggatgtgccatcggctactcaatgcaattgaatcggccctttcctccctgaatgttcgaagactagtaatacctgccatacctgaattgcaaaatacctggactactgtttttggttttaaacctgttgaaccttccaagagacaaaaaatcaagtctctgaatatcttgattatccatggcactggtcttctagagaagcggttgcttgcaacaggcactattaaccaagagaacactactgttaatgatatgatggatgctcaaacacatgttgaagcaaccggatcccggacacctgttcatttttcctgtgaattaccagtgggtggtgatcctgatattaagcatcatgatgactctcatcctttagttgggaactccaaaggcttgacacttaatctgccttgtgttcctgaagaaaaaactgcagaattgacatctccagtattagatgttgttcagtgcatgcctgaatctgaaaatactcaagaaatgaaaaatggagaaacagatgcgacactgacttctgaggacataattgcagaacagaagtatgaagataaatctaattccagtcttacagattcatctgctattcccatgacagtggatccaggctcatgttcatccaatgagactgtgaaaggagaacatcacacatctagtgaaccttctgttgaagctattctagtaagagacaaacctgaaccttccatctcttgcaacgttaccaaccaagaagacaaaaactcttccatggttcctgttgatacgacagttcatttagccactatagttgggaatcatgatattcagaattcagtggaagtcaaaggtatggaacataatacagctaaggatcaaacttttgttagtgctgtagctaataatgttgctactactgaagatcccagtgattctgtagctgactgtgaagtgccaatagtgaggtctattcagcagaaggatgaggttatcgcagacaaaaatgcttgcgcaactatagatcaaactgctgttgacgatgtagctaataattttgttgctaccactgaaaatgacactgattctacagctgaacttggagtgtcaatggagagatgtatccagcaaaaggttgaggttatcaaagacaaaagtgattcaccattgagaacttctataagcaaagttatgttggagaaatcggatcaaatgaagtctactgaaagtgatagtgttaaaatgaaggacatggcgattgaggtgaaagtcacagttgagaacttcagtgaagcaggtaaaccagcttcagcgcttgtcatgtcaaatgacattaatggtgaagttatggctaagcctaatctaacttgtggggatgatcaacttcatggaggggatgggacatacaaaaatagcatggaagatgacctagcttccagagaacctgttaatgcatga

SEQ ID NO: 12701 - DNA, 1167 bp, Oryza sativa
  Clone ID: TFbOSC401369j.C1.o51.fg
atgggggagccgccccctgccggagaggggagcggcatgatgatgccggccaagcgccgccgcgagcgggtgttaccgtcgcggttcaaggactcggtgctggtgctcccgacggccgccgcgaagaagggcaagcccgcggaggccgcggcggaggggggagttgtggacggggagctctacgacgtggagctggaagaaggggatcccggcatgctgtggaccggcgacgagcggccggtgcagacggaggaggagctgtactgggcgtgcaggaacatcaggagaagcagcacctccacctccggtagcttcagcagcagcatcttcagcggtagcagcgcggtgacgtccttgagcaatgccggcggcggcggggggaatgggcggccggaggggaagcccacggtggtggtggagtgcaagccgaagagcgatggcggcgagaggaaagaggatttctactggccggaggaattcgtgctcggggatgttgtgtgggcgaggtcggggaagaagtgcccggcatggcctgcgctggtgattgatccactgcttcatgcgccaagggtcgtcttgaactcctgcatcccgggtgcactctgcgtcatgttcttcggatactctaatagcggcctcagggactatggatgggttaagcaagggttgatctttccctttgtggagtacctagataggtttaagggccaaactttatataagatcaaggcaagcagattccgtgaagcaattgaggaggctttccttgctgagcgtggcctttttgagctcgaaacggatgaggggtgctcactagagaagtctgtcaatgaccagtccatccctgacgggttactggaagggtctggttctaataatgagcaggaatgccaatcggaggctcaggttgttggcaaatcacctggatgtgatatttgcggtaatcgtcttccatgcaagatagcaagcaaaaagaagcaagcgggagaacgattactctgtaggcactgtgataagctattacagtcaaagcagtactgtggcatatgcaagaaaatttggcaccatacagatggtggaaattgggtttgttgtgatgagtgtcaaatttgggttcatgtagaatgtgaccagacatgcatcaagatggagacatgtagtatgtag

SEQ ID NO: 12702 - DNA, 5967 bp, Oryza sativa
  Clone ID: TFbOSC900258j.C1.o11.fg
atgccaactccatctcaaacgatcgtcttcggctccatcactggccttgtcaaagaaaaagaagactcttatcttgagttctcttggtggttccgtgaggattttggaggggttaatggtttgttgctctgttcatctggtgctttgcatctaggaacaaatgctgcagatggagcgcatttgactgagtttgctgtgcagctgccacattttgaggggcttcacttaaagaacactgctctttatgatgggaatcagtttatgccagcatttggtcttgctcattgtctgagcatgagacaacaatttacttccatggaccgtgatatcatggctgatggaaacatagtgcaaaggtcaattcatttgcgcagaaagagaagggatcttccacagacatcatcattacccaagtttgctgagaaccacgagcttggaagtgccaatatctttatggatccatctttttacacaaaagcaacagagtctagttctacagaaaacaaaagttcatcaaagcctccaaaatttcttggggaaaatagtagccgtcgaccacatcatcgtactgttggcctacctgttcaatatagtgatttctttatcaccagtttgggagaaatcgataaaaggccaagctaccataattcctaccagatatggccagttggttttacgtcttactggcatgacagaattactggttcactgttcgagtgtgaggtgtgtgacggagggaattttgggcctttgtttaaggtgagaaggatatcatgttcagtgttccctcttccagatgcatcaacaattctctctcaaaatagtacaagaaaggctgagacaatagaaacaaatgaaaacaacactttgcttgaagatactgctaatgatacagatgataatatcttaatgctcctatcagactcttctgagaccaatcaagatttgttatcatgttttagcaatgatatggagagcaaaatgacttctttaggttgcaatgatttgcatagttcaaataggtcggtaccaacagtaccgtcacactctgggactgacaaaattggcgagtttacgtttgagggaacatctccttcctcagtatggaggatgatttcttgtgctatgatggaagcttgtgaaaaaatgtacaaggaacatggccatttggtgttcttctgcacacatggtactgaaaagcattcatttgacagtgggagtggatttcaggactttaatggtccttacactccattaactagattttgctcatcttatgggcccagtataccgagaattgtagaaaaggagaatgatgtggagcctacttattcactactcaaagaatggctataccaagatagaattgggtttgacttggaattcgttcaagaaattgtagaatctcttcctagatctagggcttgttcaaattaccagttcttgtgcaacagggctgaattcgtctcttctttgacagttgcaagtggttcacttagagttgtacataaaaatggtcagagtaatggagacgtcatgtcatatggcagacatgggtctgtggtgactgggctacaggatcatacccagcctagtggttttagaatccgtgaacttcctctgggacgtcctattagcaataagcttccgccagagttggcaggagaggttctccagatatgggaattcctgggacgtttctctgaaataattggcctgaaagaaattccttcatatgagcagctagaagatgaacttattgacccatggccaatttgtgcagatcagaaagagaagttatcaaatgacattcacagggatcacacttcgccgattaattcccctgcaaatgtttctacatcatattcaaatggtgaatcgggtctaaccagtaatgaagagattgtatctttgttcatccctgttgaaacttcttctatgaagaaagctgctcaagataaatcggcagctcagacgcttggaagatgcagtggcgtagtgttgcctggggttcaccttacactctttagggttctttttggtgagctattatctaaggttgcaatttttgtagatccaaacattgatcctaaagaatcaaaaactaggcgtggaagaaagaaagacactgagaatctcatttcagcaaaagaatttaaatttgacatgctaacagctaacaagttgacttggccggaattggcaagaaggtatattttagccatttcgtccataagtgggtgcatggatttatctgatatttcaagtcgagaaggagtgaaattattccgctgtctacaaggtgatggtggtattctgtgtggtgcactacctggggttgctggcatggaaaaggatgcgttgctgcttgtggaggctgaaaatttgatatgcaaatcttcggtgaatgaagaaagtaaggtttttatgatggatcaaaaggatactgacatggtagattctcctgaggtgtctgctactgataataaaacattgcctgactgggcaaaatcactggagcctgtgagaaaattaccaacaaatgtggggacacgaattagaaaatgcgtttatgaatctttggagagaaaacctccggaatgggcaaggaaaattttggagcattcaatcagtaaagaggtctacaagggtaatgcatctggaccaactaagaaagcagttctatctgtgttgacagaagcatgtcgtgtaaaagtaccacataatccagaaaagccaagaaaagagagaaatgctatttccatctcagaggctatcttgaagaagtgccgtattgccctgcgctctgctatttcctcagatgaatccaaactttttgggaatttgctcggaactactctagtgaattccaatgaaaatgaggatgaaggcatactaggattccctggtatggtgtcccgccctttggacttccgcacaattgatataaggttggctatgggagcttactatggatcatgggaggcttttcttgaggatgtccaggaagtaatacgcaacctgcacactgcatttggtgatcgccctgatgtgcttgaaatggttgttgcattgtctcagagttttgagtcattgtacaagacagaggtgcttgaccttgttgagaaatttgacaaatacctctcggacaagaatgctggttcagaaatgcacgaggagctacatgatattctaactgcagcgaacagcttacctaaagctccatgggaagatggcgtttgcaaagtatgtggtattgatagggacgatgatagtgttctgctatgtgacaaatgtgactcagaataccacacttactgcttgaatcccccactagcccgtataccagaagggaactggtactgtccatcatgtatgttaggtcaaacgaaagcacatcatgatcagggtgttcaagatgtgaaacggcagcaaaagaaatttgttggggaggaagcccatgcctttcaagaggaacttaataaattagctacagcaatggaagagaaggaatattgggaccttaacatgcaagagaggatatatttactgaaatttctatgcgacgaaatgctcaacactgctctaattagagaacatctagatcaatgttcagataagttaggcgatcttcagcagaagttccgtgcttcaaattttgaattgaaagatttgaaatataaggaggagatgaggacttcatatgctagacaaagtagatctagtaaaactgaacagcattttaacaacagttctggacccgtggaaaatcaacagcagtgcacgcccacagcattggaccatctggaagaggctgaacagggtaatgttggagttaacctaaacaacccagctgatggggttcctgatgggcaattgaatgtaggcaagccttacaaaagtgacaaagacatatccagtgcatctatggttgaagaacgcaaatcttcaggactttctgaacaaccatcaggaatggctattgaccagattgatggggatgctattgatgaagggtcccagagttgtgagaagaggtcattaggtgccaagagcagtacatgtgataacttgaacttgaaagacactgaatttagcacacctggaagagagttgcctgatgaaagagccagcacatcattccaagataatcttgaagcatcatcaactaaatcaattgagcttgatgctgataataatgaaatggatactttatcggatgacatttcaaaattgcaggattcaattagcttactagagtcacagattaatatggcatcatcgagaagagagtgtctgggtaaggattccattggtcgattatactgggttataggaagaccgggtaaacgtccttggttggtggctgatggaagcatgctgaaacccaaggagagagatatcagtatggttaacagttatcccccatctgcttttgattgcaaaggttggaattcagcatctattttcatttatgaatctgatgaggaaatccagtgccttcttgactggttaagagactatgacccaagggagaaggaactgaaagactctatcttgcagtggcaaagacatttctgtcatcaaagcagttctcctctcgttgatcctccaatttctggtccaaagggtgaacagcttatggagcttccaaataccaaggctgcagtaattttggaacaaaagtatggtctgcaattggaccaggacacaagtgatctaccgaaaaagcgaggaaagaagataaagttaagttctgaagatagaacatatcgctgcgactgtttggaacctgtatggccttctcgataccattgtttaacatgtcatgagacttatctcatatctacagagtttgaggggcataatgatggaaaatgcagtaaaatccaccagtctcctgatgaaagcagagaaaatgatgagccaaaagtgaaggttaccaaatctgatacgaaggaaaaagattcccttgaatgtagctctgtcattgaaccgtccagtgacagaaaattgatgcaatgcccatatgactttgaagaaatttgcagaaagttcgtcacaaatgattcgaacaaggagacagtaaagcagattggacttaatgggtccaatggagttccatcatttgtgccttcacctgcattttttcttgaacctgcaattgtacaaagtcaaaacagaaaagatgatgaactcaaggattggacctcctctttagaggaatgcaatgcaatgtctgctcaaaagctagttcaagaggtttccaaatctggtcaaagttgtcctggcaatgtgggtgatgagaaggtgcaaaaatctaaaaagcccacccctgataatacttctggtgaggaagcacattctacaacaggcaagccaacacgattgctagctgttaatggggggttggttccagagtcatccttgaggcctcttataggacgaaactctcacatacttaagcagcaaaagataaacttgcttgacatcgaagcagccttgcctgaggaggcactgagagcctcaaagtgtcagcaaataagaaggcgttcatggcgtgcatttgtcaaagatgcagaatcaatatcccagatggttttggcggctaacttgttggagggcatgataaaagctgagttcttgaagaacgattggtggtactggtcttccttcacagcagctatgaagacatcaactgtatcctcactcgcgctcagggtctacactctagatgattgtatcatctacagtaaggatcaagttccaagcgttgagccagctgacaatacaaggttccagaaggaagaattggtactccatgtgcgagcattcgatcttgatgccaccatggggggcgctctggggcgttgtattgatcatttgtttgatgtttctggcaagtttgcaacatctgataggaatgtagattcatcttgcgacagatataattttgattgtaactaa

SEQ ID NO: 12703 - DNA, 564 bp, Oryza sativa
  Clone ID: TFbOSC400909j.C1.o25.gm
atgaattggatttcgtcgatcttcactccaccagaagctccagatcccatcaatctcatctcccatcgttgttgttcccccggctccatcgctttcatcaagggctggccgacctcttccgcaatcgacgcctctttcgccacggggtgcggctggccgcaacttgtggtgaccaactctgagatagtacgtgacaaggcttccattgaagatgaagccatggataatggcgcaagagcactcatcgagttgtcacagggcactccagggagcttttgtaaggtgcctaagatcatcctttgtgatggttgtgatgagggataccacctctattgcttgatcccaccattgacattagtgcctgaaggggaatggcactgctcgtcctgcatagtacaagaggaaaaggagacgaagaggaggctccatgggaaggacattgccaccaatgtttccatgctcgagacagatggctttgctgaacttgaagctgccaatgtgctcatgctattgaagaattcgagcaccgatggagagattgtggtgtcacctgtgtctcagtag

SEQ ID NO: 12704 - DNA, 1158 bp, Oryza sativa
  Clone ID: TFbOSC401197j.C1.o44.fg
atgggccgccgcgcgctgccgccgtcgtcgtcgtcgtcgtcgtcgtcgtcgacgacgaccacctcgccggagctgcggcggaagcgcacggccgcgccgcccccgccgccgtcgccgcggaggtaccgctcgatctccgacgtcatgcgccgctcgctgcccgtcgacgcggcgccccccgtggcgcgcgcctacgagagcacgcggtgcgacgtgtgcgggtccggggagcgggacgaggagctgctgctgtgcgacggctgcgaccgcggccgccacaccttctgcctccgccccatcgccgccagggtccccaccggcccctggttctgcccgccatgcgccccgcgctccaagcccgtcaaaaggttcccgatgactcagacgaagatcgttgatttcttccggattcagaagggcgcagaggatgccgaggcggagaaatatgggctttttcaagatgttaagaagcgaagaaagcgttcccttgttatgcacaagaagaggaggaggatactgccatatgtcccaactgaagataaagttcaaaggctcaaacaaatggcttctctagccactgctatgacatcttcgaagatgaagttcagtaatgagctgacttacatgcctggtatggctgggagatcgtgtaatcaagctacactggaagaaggtggcatgcagattcttccaaaagaggataaggaaactatagaactttgcagaaccatgcaaaaaaggggagaatgccctccccttcttgtggtgtttgattcacgcgaagggttcacagtgcaggctgatgctgatattaaagatatgaccttcatcgccgaatatactggagatgttgattttttggaaaacagagcaaatgatgatggtgacagtataatgactcttcttttgacagaagatccttccaaaaggctggttatttgtcctgataagcgtggaaacatttcccgtttcattaatggcattaataatcacactctggatggcaaaaagaagaagaatattaaatgtgtccggtatgacatagatggtgagagccatgtcttgttggttgcctgccgtgatatagcttgtggtgagaagctatattatgattacaatggatatgagcatgagtacccaactcatcattttgtctaa

SEQ ID NO: 12705 - DNA, 3441 bp, Oryza sativa
  Clone ID: TFbOSC401058j.C1.o97.fg
atggatggtgttgacaaggataaagggaatgggaaggtgcatttcagggattcctctccccaggaagctttccgaacctacaagaggcgccggcagccacggccggagccgcaacagcaaccgcagccgcagccgcagtcagagccggaaccacagcaacagccacagccacagccacagccacagccacagccagaggcagaggcagaggcagaggcagaggccaaggctgcagatgttctggcacggcaggtgactgaaacattttggaaaagtagggacattggatggaagcatggcataatgatcgacgagaacagacaacactggaagtgcatgtattgtcacctgactagatatggtggtggtgtctctagacttaagcggcatcttgctggtgatctggatgtcaaaatgtgcccaaaagttccagctgacgtctctgaaaaaataagggagcatttgcggaagaaaagagaaaggcgaaagaagcgagctgcacaaaatcgtgataactgtgtgacggctaagagcacctctgatgatatcaagtctggcaaagatcctttacccgttgattcagaggtgctgactggagtagacactgttcttgaagaagttactaaccaaacgaaccatgataatcaggatcttacttatcccaaggctaccatgttgttacgagggataagagatattgggtgggagcatgcagtggatcttgatggaaataaaagacgatggaagtgcaagtggtgttctttatgtcgaagtggtggtgtaactacattgaaggctcatcttactgatagtagttgcccaaatattcctaaggaaatatcaaaaaaagtgttgaactttattgaagagaaaagggcagcacgccatctttttaatagcgctgcaaaatctcctttcaatgtcaaatttgacgaggatgcagttaatctctcagaaatacaggtggaaggtactccaccattgacagatgatcgacaacctttaggaaattccttgcatatacaaacatcagagtgcaccattaatgagtttgaaaaggtggcagctggaagcaaccaacagggtgcagaacatagcaaccaactacttaaccatggtgaacagctgatgaaaagcagcgatcaacctgaggagcactgcaccttggaacatggaaggtgccaagtacttgacaataataagcagcagactatggacaataaaactgataatccggaacacaaagaggtcttgaaacaccctaaaaaaactaggtttaacataaggaagcatatagttatcgttgatgaatctgcaaggcattggaggtgtagatattgtggtttggatgggtatggcaaaacgtctaggctccattttcatcttgctgctgtgtttcgacatcctaagtgcccaagtgttccaaaagaagtttttgcaaaggcacggcatcatattcacttaaagagaaggctcaatgtgaaaaaggctgggcaacaagctcgttcaaggccacatattcttgggcaatcgagtcagcaacagcagaacaacaatccggtactttccaattacccaacaagattgagggacaatgcatgggaacattcgcttattcatgacaaagagaagggccattggaagtgcaagtggtgcagtttagagggttatcatggcataactagattgaagtggcatcttgttgggtggcagaatcgtcctcaatgcctaaatgttccagaagatgttgctaaaactattcgggataaaatgatatcaagagagaagcagaaagaaggaagattgaatcttgatgttattgacagttgcaacatgccatgctcttctgagagtttacagtttgatcaagagaattttgctgaggtaatgcagggaaaaggttcttctgaagattttaatcaagctgaaagacaatcaaacacattgaacacagtatgcaataccactcatcctccacagaacagcaacaattatcagggacttcaagaaaatggattatatagtagcaaaaacaaatctgagaagcaaactgaaagatatgactgttggagtcactggcgatatgttttagatggactgatgcatttgccaggtgcactagagggtcctggcattcagagttgcatccgtgatgtacttctttacggttctgctgaatttggaactgttggggacaaagtggaaatggattccaacagaaaagtgtcaagtgatgggaatattgctaagtgtcagagtgttcttgtggatgttttaaagtcagagaattttgccttattgtgcaatgtgcttggcagaactgtccatcaagatgagcaaaggactaagtattttgattttaccatgattgactcaaggatgaaaaatggagattatggccgtgcaccattattattcaaacatgatttgaaaatggttgaaagagagaggggatcagatgatagtgaagagaatctgaagggagctgcggcgaccaatttggaacccatgaacatggtcaagtcaaatgcattggtactttcaacctcacaaggcttcaaccagttggatcaaccagatccaatggatgtttgcgatgaacaaaacggtactaactgcaatgaatgtggcaaggtagcgaaaattgatagcatcctcacatgcaagagatgcatgctagcattccacgtctcatgcattgaacctcctgtgccatccacttcaactggaagctggtgttgtaaaacctgcagcaccatctgtaacgaatcagctgaagttggcatggccttggtccattatgaaccaaatcgtttgcacggacattgcgtcgcatgcaaggaccttgagttttgcaggcctccaaggtgtgaggaaactgccagtgaaagggcacctgctgataactccagagcaattgtgattcccagtgcagagcctgttgaggatgtggaattgtcagatattgatgtcaggggcttatgcaagatgtgtggaaatcccgaggagaaggacaagagattcttggtatgtggtcacacccattgtctatataagtactaccacatttcttgcctgaaggctacacagatcgctagtgacaagcagctggacaagccctgctggtactgcccatcgtgcctttgccgagtttgccattctgacagagatgatgacctgaccattctgtgtgacggctgtgatgaagcttatcatctctactgcataacaccccgtcgaacttcaatacccaaggggaaatggtactgctcatcatgtgcgatagagagagcaaaggaggggatggcgcggcatgagaaaaggatgctgaaactccataggaaggatgatcctgggctgcaaggcatgagatatgaaatggtggacatgatactcgctgctgcggagatgcttagcgatgatgagcagcaggggacctga

SEQ ID NO: 12706 - DNA, 235 bp, Oryza sativa
  Clone ID: TFbOSC400756j.C1.o2.gp
tcttggaggagctgctgctgcagtcagggcacttgtagtgcttgatgtgctccgccttagccggggttatcctgacgcatttgccgtggaaccaccgctcacagatgtcgcacccgatccagaactcgttcgcgttgtagaggccaccgcaagttccgcagaatgtctcgttgtgttcttcgtcgtcgtcctcgtactcctctgcgacaaccctggagcgctttacctgcccttc

SEQ ID NO: 12707 - DNA, 891 bp, Oryza sativa
  Clone ID: TFbOSC400756j.C1.o3.fg
atggcccccgcggcgcaggtggcgtcgaacccgcggacggtggaggacatcttcaaggattactcggcgcggcgcggcgcgctcgtccgcgcgctcacctcagatgtggacgagttcttcgggctctgcgacccagataaggagaatttgtgcctgtacggcctcgccaacgggagctgggaggtggcgctgccggcggaggaggtgccgccggagctgcccgagccggcgctcggcatcaacttcgcccgcgacgggatgaaccgccgggactggctctccctcgtcgccgtccactccgactcgtggctcgtctccgtcgccttcttcttcgccgcgcggctcaacggaaacgaacgttggcgcatgtgtctgcatgtgcacatgtatcccgtgctcttctttttgtttcctttctttgctttgagtgaattggagtcatgcgttctggatgtgctggctgtagtgtactggccgttctattttaagaagtctgcgtatgctatgtcctggaagcggctcttcaacatgatcaatgatctacctactgtatatgaagcattggttgacaggaagcacgtcagggataggtctggtgtcgatagcagcggaaaatccaaacattcaacaaagagaacaggcgaagggcaggtaaagcgctccagggttgtcgcagaggagtacgaggacgacgacgaagaacacaacgagacattctgcggaacttgcggtggcctctacaacgcgaacgagttctggatcgggtgcgacatctgtgagcggtggttccacggcaaatgcgtcaggataaccccggctaaggcggagcacatcaagcactacaagtgccctgactgcagcagcagctcctccaagaaaaccaggctatag

SEQ ID NO: 12708 - DNA, 1432 bp, Oryza sativa
  Clone ID: TFbOSC900059j.C1.o1.fg
gacatcaaagattggccggaatcctacttcctctgctaggagatccaagaatgaatccccaggttcaaagtattgcaattcatctgctaggggatccaagaatgcattcccaggagtgaagactactagcacgggaaggattacaagaaaggataagggattgcataagttggctttcatgagtggtgttctgccagagggtaccgatgttggctactatgttggtggaaaggttagcccttcgcagtttgaagcccatgctggccgtgctgctcgacgcaaaccgtaccacaacatatatatgtcaaatggtgtttcattacatgaactgtcagtttcactttcaaaaggtcgaaatatgtcaaacagacaaagtgatgacttgtgcagcatttgttcagatggtggggagcttctcctttgtgattcctgcccaagagcttttcacagagagtgtgttggctttactactatcccaaggggaacttggtgttgtcggtattgtgagaatagacaacagagagaaagttctttggcatataaccacaatgcaatagctgctgggaggattgacggaattgatccaatggaacaaatatttacaaggtccatacgcattgccacaacaccagtgactggatttggtggctgtgcactgtgcagtatgtcaggattcatggacaagcagagtgtattaagtcgaagtaggccagattatgatgatgagctggcagtactagaccagctccatgatttcagcaaaaagaaattcagtgcgagaactgtgctgctctgtgaccaagccttgcctgagggagcatggtattgtactgcggactgcgttaggatcagcgagacactgaaggacttacttagccgtggagcagagcctatttcttctgtagatgtagaaattataaagaggaaatatgaacagaaagctctaaataaagatggagatcttgatgttagatggagggttttgaaggacaaaagttcagcagacagtaaattggttctctccaaagcagttgcaattttccatgaatcatttgatcccattatccaaattgctactgggcgagaccttattccagccatggtttacggcaacactgtagtatctgcgggtcttttccgtgttatgggtagtgaaattgcggagctacccttggttgctacaagtagagatagtcaaggcttggggtatttccaagcgctgtttggctgcatagaacgattgttggcatctctgaaggtgaaacattttgtgctgccagctgcagatgaagcggagtctatctggacacagcggtttggattcgtgaagataacccaagacgagctgcgtgagtacctcaagggtgggcgaacaaccgtgttccagggaacatcaaccctgcacaagctggtcccaaaattggatggctag

SEQ ID NO: 12709 - DNA, 5223 bp, Oryza sativa
  Clone ID: TFbOSC400295j.C1.o8.fg
atggacggggggacggggccgggggcggagctgctctcgccgggggaagccgagtggccgcccgagctccgcctcccgcctccgccgccgccgcatcctcctcctcctcccccgctcgagccggctccgccatccactccccagctccgcggcgaggcgtccccgcccccgcctccgcctccgcccgtgggaccacccggcgcggcggtggtggccgccgccgcgaggaaggaggcgtccgcgtccgccgaggggtttgatgactcgcacttcctcggatcgatcatgggggcgcccgcgcaccagcaccagcaccagcaccagcagccgcctgccgtggggccgccggtggtggtgaagaggaagagagggaggccgccgaagaacagggatggagcggcgccgcctccgccgcccaagccggtgaagaagagggaggacgacgaggacgtggtgtgcttcatctgcttcgacgggggcaatctcgtggtctgcgataaaaagggttgcacaaaagtctatcatcctgcttgcatcaagcgcgacgaatcattctttcgatctcgggcgaaatggacatgtggttggcacctatgcagcacctgtgaaaaggcagtacagtacatgtgctatacttgtacatactccctctgcaaaggttgcatcaaacaaaagccagtcaaattctttggtgtcagagggaataagggcttctgtgatacctgctatagcactatactgttgatagaatccaaagatgatcgtgccaaggctaaggtggacttcgatgataaaaataattgggaatatctcttcaagttgtattggttggatcttaaagggaaacactctctaacattggaagaacttgtcaatgccaaaagctgttggactgttcgtagcacttccgctaggagagaaaaggaagattcatccaatgacctctatgatgcaaattttgaccttgatgccagttctgatggcgcctcaagaaaacgaagacggaatagtttttcagggaaaaggggacggaaacgccaaaacaatggtgctgaaagcttacctaagagagtgcaaaatgaaggaatgacttttataggtgacacacaatgggcatcatcagagctcttggaattcattgggcacatgagaaatggtgatatttcttatatttcccaatttgatgttcagattcttctgcttgagtatgtaaagcaaaaaaatcttcgtgatcctcgcagaaaaagtcaaattatttgtgatgcgaggcttgccaatttgtttaggaaaccacatgttggccactttgagatgttaaagcttttggaaatgcattttcatgcgaaggagacggtaaatggtgatggccaaaaaggcattgactcagattcagctcaaatagacagtggaggatatagtgatatgccaagtaaattatgctctgataagaggaggaagattcataagaagattgagagagaatcaccagctaatctagaggattatgcagcgattgacatgcacaatatcaatttgatttacttgcgccgcagcttgctagaggatcttattgatgataatggcacgttctctgacaaaattactggtgctttcgtgaggataaggactccttgtgttggccaaaagcaagatatttaccgcctggtgaaagttcttggtacacataaagtagcagaacggtacagcgtcggtaagaagacaactgatcatgcgcttgagatattaaatttagataaaaaggaggttatcacgatggatacaatctcaaatcaagatttcacagaggaggaatgcaaacgcttacgccagagcatgaagtgtggtttgattacccgactaaaagtggtactgttgatcaagattcattatacgggagacatccatgagaaagccaaaatattccaactgctgcgagttaatgattggttagaaaatgaaaagcagagactgagccatctacgtgatcgtgctagtgaaactgggcgcagaaaacaatatccttttaacttaatcaaagatttgcatgcctatggtcatcatagattaatctatgaagcgttcaattcataccatcattgcgaaattattatttgcatgaggatacatttcttcatgcatactttactaatggagtatgtggagtgtgtagagaagttgcaacttctgggcactcctgaagaaagagcacgcatcattaatgaagatccagaagtacatgttgacccatgtatgtctcctgattatgaatctgctgaagaattggatgttaagaaagctgttgattcgacaagtaggaatggatcagacctgttatttcttggaagaaaaggaatcgaaacaaactctctgcagaatcatagacaaaattgttctgccactagtcatcacacgactacaagtccacctactgagggtatgactcatggacaaggagaagaagcatcgtttgcatcgtcagaaattgtatcaggtgacatggaaccagaaaaagtatggcactacaaggatccttcaggaagtgttcagggcccattcacacttttacagctgtccaagtgggcagcttatttcccacgtgacctgagaatatggctaacatttgagagtgaacaaaactcactgcttttgactgaagttctctcgaaacaacaaaaagatttcattcagccttctcccaaagttgacaataataggtcaacatgggaaggcgttgggcaagatagagttgactcaagtttgactggaaataactcttcctctcctattggttataatgtgatctactcttctcggttgcctagcccatctgctgactattgtgcatcagctagagaaggcccaaaccttccgagtggaaccttgccattcatgacaagccagaaaacacaaaaggatcctcagatgttgcatggccaggcacagcatcagggtgattattcatgtaccatcccgtcatctgtggtttcatatagaccagctggttctcatgatgagtggccccctcgaggcaacattggtgaatggaacaatagtcaggatagtggtggtatgtggagcccaaccacacctcacatgagtcggagcaatttggagcatcagcctgacaggtgtattacgaagaagcaattgcagaatgattccaaacgtaatacgctagcaggatctgcagaaaatctaaattcccaaatggattttggttcacagaaagtacacattcctactccacaacaacctgagagagatcttgccacttctgttggtacttcaaggcaatttgagtttaaaacttgtcatcaggaaggctctcactggagttcaacagcagactccattactcatgatgggcttcaattatctcttgcttcagcaaagcctgagagctgctctgcagtaaatcctattagagatggagattccagttcagcttctcgtgtgcctaatcaatcaggagctcatgtctatagcccaccacacccagctacaactaatttaagcaagagtgaggagactatgaatcagtgtaaatcgtgtgagcctgaagcatcaaataaatcacgcaagcctgatgcatcacatgctccagttaatcaacatcctaagcctgaaagtgatccattgttacctgatactcaagattttgagcgcacgcatcctagcccaagtactgaacatgacacaaaggagccattgaaggatcaatcgaggtcaacatcagtagcacctgaagggtcgggtacaatggcacatggacagtcttccatagcttttatatcagaagcatctggcccactttctagtaaaattgttggcttgcaaccacccaaggatacatcatttcttgtcgaaaaagatataaaagatggaggttccattacacaaacagagcaacaaaaagaagagagtacagcatttaagaaagagaacgtagctgttgatcctatctctgacagtgaagcaatagtatctggtgtgttggaatctttgacagagacatataatctgcatgaagaaaccgctttggaaaatttcacgccaacatctgccgaggaagaacaaccgcaatgctctacccctattgcattatctccttgggatgaaacaagtgactatcaaggtgaagctgttgattctgctctatggggtgtccaagatgaccaaaacaatgaaatgtggtcattgtcttcaccaacacctactctccaaccttcaggtattggagctgataccaaaggtgcttcctgtgctatagaagaggtgatagtagcccaaggaaatagtggtgttgttgaaccgtcaccagcactggagaagaaaaggattgaaaaagtaccaagtgcttccatagatcgtggagtaccagagcaggtaaaaccaaaatcagatgctgcattatctccagaagagagcagaaaaccttcaggtttgcaactatcaagcacatatctacaagggagcacaaaatcttcaggtttgccaccgtcaggcacatctctagatgggggcatagaaccttcaggtttgctaccttcaggaacttctttggagtggggtacaaaaatttcaggtgtgcaatcctcggcctcatctctagaggggagcaaaaaggcttttgttaggcaaccatcaggctcttcactagagggaaacacaaaagcgtcagaaaagcttcagcatggcaatcatcaggttcttcgcctgttgcagggagctcaaaagcatcaggttggcagccatcacctcgcgagagctcgaaatctaagcctaattccacatggggtgccggccaaagccgcaactcgtcttcgcaccaatcaacaacaccaacagctaaatactcatcagaaaccccaaggagacaaggaaacaacaacacaaattctgctggctggggagactctctcggaaacaagagctggcattcaccctcaggcaatgcgagcagccgaggcagccattctagccaccaccatgaccggcacaatcagagcagcgaaccatggcgtggtggctcaaatcattccaggagatcagatcatcgtcaagaacatggcaacggtggctcgtcgagatcatcgtcgtcgagggggcaatctcaaagggggatctgtagatactacgagaatggctactgcaggaagggcacttcctgccagttcctccaccgttgaaaacgccctcacatttttgtacagccctaaatga

SEQ ID NO: 12710 - DNA, 1942 bp, Oryza sativa
  Clone ID: TFbOSC421069j.C1.o1.np
atctgtctgtcacaggaccagaccacttctcactctacagcaacacagtctatgatactacgcttctgcctcacctgtcccgcgactctactgcttctgctcactttgtccaacttgacaacctctgtcagaattttggtacgccaggcgcaaaaggcagttgctgctaaaagaaaacctcaagcttgggagaagtatgccaagaaaaggccccgtgtgttacgtatcaatgacgatgatcttttgatcacagctatggtgaaaaatagggatcttggctatgcaaagaagtttacaaagtttaagagctcaaagaaatgtggcaggctacttgctcgaatgtccggaaaaggaggatcaaatctgttgggtgggaagagagtaagtttggcacggaaaacagttctctgctggttgattgccactggctttctgaccgtaaaagatgttatacagtaccagaatctgaagagcaacgaagttgttaaggatgggcaggttacctgggaaggcattctgtgcaattgttgcaccaagaccttttctatatcagacttcaaggttcatggcggttgcagtttaccaaagtcctcattgggcctctttctacagtctggcaaatcgtacactctatgccaggtagaagcttggtctgctgaatttctaagtaggaaatgtgatgcatctggtagaaaagttgaggcgatggatgaaaatgatgatacgtgtggtttctgtggagatggtggtgaattactttgctgcgacaattgcccatcaacatatcatcaaacttgtttgtctgaccaggaacttccagaaggcagttggtactgccataactgcacatgccggagttgtgggaatccacttagtgaaaaggaggtttcaacattctcggctatcttgaaatgtttgcagtgtggagattcataccatgatacttgcattgaccaggagatgctcccctgtggggataaacaatccaacatatggttttgtgggagatactgtaaagagatatttattggattacacaatcacgttggaatagagaattttcttgacaacgagctttcatggagcatattgaagtgcaacactgatgggcagaagctacattcttccaagaagattgcgcatatgacagaatgcaatacaaaattagctgtggctcttactatattggaggaatgttttgttcgcatggtggatcctagaactggtgtagacatgataccgcatgtcttgtacaataccagatcaaacttcgctcgcttagattaccaggggttctatacagtaatcctggagaaaggtgatgagattttatgtgtagcatctatcagagtacatgggaccaaagcagctgagcttccatttattgctacttctgtggattatcgccgccaaggaatgtgccgaagacttatggacaccattgaaatgatgcttagatcattccatgttgagacattggtcctttctgccatcccagagttggttaatacatgggtgtcaggatttggtttcaaacccattgaagataatgagaagaaacaacttcgtaatgtgaacttgatgttatttcctggaacatccttgctaactaaaagattggatggaattacagctgccaatgctggggaagttcgaaatccagagcaaataaaaatcaatggaaggcgggaggagctgggacttgcggcgggtgtcgcgcggggggagggggacggcgaggaagtgcttggtcttggagatggggcgggagcggcggagctcgacgacgtcgccgaccttgaactggttgtccgggtcgtgcgcctggtacttcttcttgatgcgctcccgccgcttgtactttgggtgaggagccagccgcaccacctccacccccaccgtcttgtccgccttcgtcgtcaccacacgccccgtcagctgc

SEQ ID NO: 12711 - DNA, 3288 bp, Oryza sativa
  Clone ID: TFbOSC900258j.C1.o16.np
atggggagcaaacagatagtagctgttcttcaagtaggtggagaattcaaaactgatgatgatggacagatgtcctattctggtggagaggcgcacgcgatgcatgtgaaaagtgattggacttttaaaacattcaaacatgagatatcttcaacgctcaataacctcaaacttgactcctatgtgttcaagtacttccttccgaggaataacaagactttgatttcaatttccaatgacaaagacctaaaacgcatggttgaattccatgcagagtcagagacaacatatatttatgtcatgaagaaggctgacaacagggtaaaaacatctgccgtggtgcctgctgcttctgcagatcatgctgtagcagcaactactccagatggatctaagaggcaaaagatttgtgcaagttgggagaatgcgattactggagctggtcaagtgtttgaaggtccaaaggaattccgtgatgcactacacaagtatgccattgcacataggttccattacagatttgtcaagaatgactcttctcgtgtcactgtggaatgtaccgctgaaggatgtccatggcgtatacatgcatccaagtctcctgcaaagaaggatttcatgattaagaaagtttttggaagtcatacatgtgaatcagagtcagtcaaaagtcatcgtctagcgtctcaaaagtgggtggccagtgttattaaggaaaaattgcgtgatagtccaaactataggccaagagatattgctaatgatcttcagcgggaatatgggctaagcctgaattactcccaagcttggcgaggcaaatcaatagcccagaaagaactatacagttcacatgaagaggcatgcaaccagcttccttggttttgccaaaggattgtcgagacaaaccctggaagtgcggcaacagtagaggccttggaagattcaaaattccgcttctttgttgcatttcatgcctccattcaaggttttgtgcatggctgcagacctctcctctttcttgatgtgatatctgtgaaaccgaacaagcattggaagctgttggctgctacctcagttgatggtgaaggcgatatgttcccagttgcactctctgtagtggacgacgagagtcaagaaaattggcattggtttcttgaacagctaaaagcttcattgcctgtgtctggagaactaacattcatatcaaatggcaaatgtggtctgttggatgaggtctctcttatatttccagatagctatcatggctaccatgtcaactattttattgaagaatttaaggcacaattggatgacagttggagtgaagaactaaaagatacaatggttgagcatgttaagaaagccatgtattcatgcaaagttgatgaattcaaccagtgtattgaactcatcaaagttgaatctgataagcttgctgaatggcttttggagactaaacctgagaagtggtcagatgccttcttcaaggggtcgcgacttggccagtacacctgcaatgttcccgagacaattcttcagtgggtccccagtagatatgagctctcagtagtgcagttggttgatacaatcagatgcaacttgatggagatgatgtatacgcgcagggaatattcgaattcatggacggaaccgctaactccatcaaccaatcagaaaattcaggaagagatgggcaaagctcttacacacagtgttgtttgctcaacaggcaatgacggaaacaataatgtgtttgaggtatgcgatggcgctgtcaatgttgtcaacattgatacatgggactgcacctgcagaaagtggcatgtctctgggatcccatgctcacatgcaattgcggtgtttgagcgcactgatcataacccacttgacttctgtgccaagtatttcacaacagagtgctaccgcttgacctatgccatgtcaatcaatccaatacctgacattgttgtggctgctccatcaactgacccatcacaaggcgaggcattacatcaatcaccgattctaacccggaggcaggttggaagaccaaaggaaaagccagctgatcctcgaatcgcaatcaaaagggcggtgcgctgcagcaggtgtaagggttatgggcacaacaaggcaacctgcaaagtccctatcctcatcgatagatacacatcaacccgttttacttaccatgagaacacatataccccttcccggggtgctaatgggttctcgcgccgggtacaccagccaaaacacaccagcgcatcaccaccagaaacagccgcgcggacggacacagccaccaccaccggggcacgcgcaacccgtgcgtccacgctcccccaccccaccccccgcgcagtcatcgacagcgagacctctgacttttttgcggcccccatccgactccctgacacgtgggtcccacacctaccgcagcccacacgtcagcggcacaaccgcaaaggaggaaggcctcatcagcgagaaacctctgaccttttgcggcccgcatctgagtcaccgacatctgggtcccactccaccacggcctcatcatccgccccacacctggccccccgactcgactctccgcgaattcccctctcctcgcttaaccctctcctcgctttgctcgtgctttgctttgcttgttgctctcctcgcccgacggccccggccgccgtgggcggcgccgtggtgagccaggtggggatgcttccttacgaggcgcgtgaggtggcgatggggatccatcgggacgcggtggcgcaggcgcaggcgctgagggtggcggcggcgagcgcgatcgagtcggtgacggcgagggcgccgccgttcgggccgccggcggcgcggcacccgggggaggcagggcgtgggaacccgccgcccccgtgcgcggcgtgcggcctccccgagaaccccggggggaccatcgtctgcgactcctgcgagcgcgggttccacctcgcctgcgtccgcgtctggccgccgctcatgccgccgccgccgccgccgccggccccccccggcgcgcgtcggccccgcgccaccgccaacgaggactggatatgccccgagtgcgagatgcgtggcgcccgcaccaacaggtggaagctcggccccgtgccgctcgacatcaacgtgcccccgccgagcaccccggacgcggaggaccccgtcgccgtcgccaccagagacgtcaccaggcagttatctcagctctcatttcctcaactccttttgcttacggctgacttgatccgttggtctaaaaagtgc

SEQ ID NO: 12712 - DNA, 1113 bp, Oryza sativa
  Clone ID: TFbOSC401605j.C1.o16.fg
atggacgcgcagtacaacccgcgaacggtggaggaggtcttccgcgacttcaagggccgccgcgccggcctcgtccgcgcgctcaccgcagatgtggaggatttcttccggcaatgcgacccggaaaaggaaaacttgtgcctttatgggtttcccaatgagcattgggaagtaaatttgcccgcagaagaggtgccacctgagctcccagagccagcattgggcattaactttgcacgagatgggatgcaggaaaaagattggctgtccatggttgcagtgcacagtgatgcatggttactttctgttgcattttactttggtgctcggttcggatttgataaaaatgacaggaagcgcctgtttggtatgattaatgatcttcccacgatttttgaagttgttagtgggaagagtaaagccaagccaccgagtgctaataaccacagcaatagtaaatcaaaatccagcaataaaacgaagtcttctgagcctcgggcgaagcagccaaagccgcagccccagcccccagtgaagaacgaaggccgcgaggaggaaggcggcccggacgacgaggaaggcggcggtggcggcggaggaggcggtagggaggaggagcacggggagacgctgtgcggcgcgtgcggggagagctacggcgccgacgagttctggatctgctgcgacatctgcgagaagtggttccacggcaagtgcgtcaagatcaccccggccaaggcggagcacatcaagcagtacaagtgcccctcctgcagcggcggcaacgggcggtggcggcggcgtcagcggcaacggcaagcgtgcgcgcccgtcctaagtactaaacgagaagccattataagccagtacctcgtgagagatgagagaagcaaaaacacaagcacgcatgcccggagtccactgataagtgacaacccctatgaagtgattagtgatattcgcatcatgttagctgaacagtacactactaatgcacgggaagacgactttgatgcaaaacctaatgacaaggacaaccagggcgaaggaaacgtggcctggggtggtataaacaaagaattgtacagcttacaagttacaatccagaattaa

SEQ ID NO: 12713 - DNA, 5373 bp, Oryza sativa
  Clone ID: TFbOSC1881j.C1.o2.fg
atgccccccacgaggcccaagcggcggcgcggcggctccgcgcgatcccgcggccggaagaagcagaagcgcctcgacgccatccacgatgtcgcgccggtatccgcccctcccgccggagccgccgtcgtcgtcggcggcggcggcgagagcgaggattccgacgcggagggcccccgacggagcacgcgggtgcgccgcgcgccggccctgctcgacacctcgccgctcccctccccgcgccgtaagagggcgcgcggcggcggcggcggcggggtggccgggtcgagcggcgggagctcgcggaggagaagcagaggtagggcgaggggcgaggcgggggttgcccgcgagattggcgaggaagaggaggaggaggaagacgacgaggcggggaacgtggtgtggcgctctcggctgcgggatagggtcaaggggaaggctaagctggataagcgagttaggagcctctggttcgacgaggactacgaggtggagctgaaggaggaggaggaggtggtggtggaggaggaggaggaggatgaggaggagggggatgaggaggaggaggaggagcaggttaggacattggtggtggaccttcgggagggagctgaggaagagacaatgggcgagggaagtgggagcttgccaatgcgagggagggaagtgatggatagggaaatcaatctaaccatcgatttgaatgtggaagaacatgaggctgtcgagggtgtcaatgtggtggaagaggaagatggggaaaaaggaggcgaagcggatgaggagaaaggagatgcgattggtcctggaaatgatctacacgaaggcaagcatgaggaggtaggggacgaggagggtttacatgagaaggagagaactgaagagctgggatcagcagtactagaagggcgaaatggtgatgagctaccttgcaatgagaataatgctgaggatggcactggcagttcacatgaacacgagcatcttcttgtgcaaaatgagcagactgtggaagagagcaacctttgtgttgagcagcaaatggaactggatggttctagtcctagtgagcaattgaaagaggttcagcaggatgtacagacaggtggtgcctcaaatgtagtactgcccgaggaggccccaaaggaaggagtccgcaaatttccagtttcggaagaaaaacagggtaccatggagattaaagaagggagacgttgtgggctctgtggtggagggactgatggaagaccacctaaggttgcattacatgatacagttgacagtgataatgaagcctatgagggggctttgccttcagaggatccaaactatgatatgtgggacgggttcggtgatgatcctgggtggcttggaaggttattgggtccaatacatgatcagtttggcattgctcgtgtctgggttcatcagaattgtgcagtttggagtcctgaggtttactttgctggtttgggctgcctaaaaaatgtaagagcagcactttgccgtggaaggcttttgaagtgcagccgatgtggcagacctggtgcaactattgggtgtcgagttgatcgatgtccgaaaacctaccatttgccttgtagtcgagcagaagcctgtatatttgatcaccggatgtttcttatagcctgcaatgatcatcgacattacttccaacctcaaggagataaatatgttgaactgctcagaaaaatgaagataaaaaagatgaaggcagatatcagaaaggtgtcacatgatgcatggagaaaggacatagaggccgaggaaaaatggttagagaactgtggagaagatgaggaattcttgaaacgtgaggggaagaggctaaacagagatctttcgagaattgcacctgtttacataggaggcacttctgaaaatgaaaaggcgtactgtggctgggagtctgttgctgggctcagtaacgttattcagagcatgaaggaagtggtgatactgcctcttctgtatcctgagtttttcagttctttaggtcttacacctccaagaggtgttctgctgcatggccatcctggtactggtaaaacactcgtagtgcgtgcactaataggggcatgctctcaggggaacagaaggattgcttattttgctcgaaaaggtgctgattgtttgggaaagtatgttggcgatgctgagagacaactaagacttctgtttcaggtagctgaaagatgtcaaccttcgatcatattttttgatgagatagatggcttagcaccttctagatccagacgacaagaccagacacacaattcagttgtggcgactttgctttctttgctggatggtttgaaatcacggggttcagttatagtaatcggcgcaacaaatcgtcctgatgctattgatcctgctcttaggaggccaggaagatttgaccgtgagatatacttcccgctccccacctttgaggatagatccgctattctttcattacacacgaaaaaatggccaagtcctatttctggggcattcctctcagttattgcaagccaaactgttggatatgctggtgctgatctgcagtcaatttgcacccaagctgcaataaatgctttgaaaaggacttgcccattgaaggaaatcttactctctgcagagaaaggatttgagcatgggcgacttcctctaccatcaattcttgtggaggaaagggattggcttgctgctcttgcagctgctccaccaccctgttcacagagagaagcagggattgctgcaaatgatctagtttcctctcctcttgtctcctatcttgtgccgtgccttcttaaaccattgctgcacctttttatctccctctatttggatgagcgaatctggttaccttcatctcttctgaaggcatttgcttctattaagcaagttatcttctcatctatggagaagaataatgtgcctcacacattttggtcttcctatctcccatctttgatacaacagaaaggtattgcaaaaagaattgcatcaatcttgtcaggctatggtctaatagcttatcaactaggaaaccatgattctgtgttaaatcacaatgaacagcacgagaagtttgatgcccacagattgaattccaccggttctcacccaaaaggaggtttagcacataaattatcaggatttagagctttagctgctggagcgcccagatcaggccaacaacatctgatccgttgccttcttcatggttttgtgggtcatactgtaatacacaagcttgatcttgcaactatggcacaggagggaaacggtgatattcttagtggactcacacaaattcttcaacacacaataccaaggttctctgtgaatgttgacagctactttacctgggatgaggttattgacgcatgctgtttgcggatatcacatgatttagttcagcagcatgttcaacttttgcatgacagggctcataacaatcatgatgaacagaaagaggtctttgttcctatggaaattagtgcaccaggtgaacatagatccagtgggagtaaggaagccagcatgttaacgaagtatccattgaacatggacaagcatccctcatgtggggtttcttcaagagagcatcctactcagctgggcacatgtagtgctcagcaagagccaccaacatctaatgttgaagataaagaggacaatactgagaaaattgatttcaatgagaaagtcgcaacaaatcgttctaatagaattgtgaaggacagtgaatcactagctattatggcctttggaattcagatactacagcacccgcaattttctaaactttgttgggttacatcgaaactacgagagggcccctgcactgatataaatggaccatggaaaggctggccatttaattcctgtttattgcaaagcactacagctgataaatcattatctggaggaaacaatgttcttaagggcaaagagaagattccgtctgtcagaggacttgttgctgttggtctattagcatatagaggtgcttatgcatctgttttggaaatctgttctgaggtgagaaaggtcttggaactgttagttggacaggtccgaactaaaattttggaaaagagaagtcgatatcggtacttccatattctgtcccaagttgcttatctggatgatatcatgagcagctgggcatacacctttcaaaggttacatagtgaaaacaggagagtaaaaacaagtccaaaggtaactgttggaaagtcatccacaagagaatgtcaaggcgacagcaacactgcagaagcaaacatacttggtgctcctgctggctgctctgaggcccaaggcactcctggccaacatacagatgaccttgaagttattcctgctcactgccctagtgagatgcaagagaattcagtccaacatgctccaggccatcttgaaatccatggcattgtctgcgaccttgacaatgataatgtgacatctatatccagcataaatgcagtggaacctgatcttatccattcagcttcacttgatgtgcacacagattcacttaccccagcagatgcagtaataaatgatgggcaatcttgtggggttgacaatgatgggcaaatgtccagagtaatcaatggagaagaaaaccacatatctaatattgaaagacctgaaagccacacagtatctgttgcggatttcaatgagttgcaaaggaaaaatgctgttgcatcctcaactagtaccgacagtgcaggaacatccaggaacatggtgtcttctgaagctcgtggaagtgacaatgagcggaatactgatttccctgtggatgatgtcaaattaggtcatttggttaatcctcaatcacaggataccatgaaaagtctctcagttctgaaacctccatgtctctacaaatgttgccctgtgtgtttcaatgctgtttataagatggttcatgatattctttcaaattcagtaaggcctagtctgcattgcttagcagtcgatgatatgcatgaccttttgtcatcatggtcagtgaatcttctagcaacagttagaaaatggtatacttctcaaggtattgttggctctgaagaaaattctggagaagggcattgtgtttgtagcagtgataatggttgtgttccaagggagtgcacatgccatttggaaagcaacgaagatgctggaactataaaggatgagagctattatctaagtggacagccattaagttttttctttaaagatggtgtattgataccaccagatatcactgcaccaactacacttcattgcagttatatgagattatgtgtttgctcgataccaggttcaatttctatgttcaatcggatctcgagttga

SEQ ID NO: 12714 - DNA, 392 bp, Oryza sativa
  Clone ID: TFbOSC401827j.C1.o19.gp
agaaacaaggcatgaacaaatttcctctaaaggctacaatgtaacagtatccatatctcaaatgaacaaccacaacagtaaccgaccagtttatgaaacaaactatcctgtaaagtttcttcttttttgttttccagcatctaccacaacagtgcgcaatgttctagagcaaattcttcacatctgccgccaacttgggactggaagagggatggcaagtatcatttgattgatcagcttagtcagcagtagagagccacagcagcagctccatggtttttattgcctactcttcttggagctgctgcaatcagggcacttgtagtgctttatgtgttccgctttcgctggtgttatcctaacgcatttgccgtggaaccaccgctcgcaaa

SEQ ID NO: 12715 - DNA, 4038 bp, Oryza sativa
  Clone ID: TFbOSC403329j.C1.o21.fg
atgaaggatttggagaagtctacctccttggaggtggacgactctaccattgatggtgatgtggatcttggtggagggctcactgtggtggggaggaagaggaaagatggaaggggttccgtggatgagaatggggcctcgacaaagaggattttgaggtccaactccatgaaaatgcatgtggatgctgagacagcggggggtgtggctttggatgtttgcaagggtgacattttggagaagaaacagtgtgatatcatagcagagggtgatagaggaggggtgctgacagttgatacttgcaatgctgaggaagatggggaagtgactggtgcggtagtgagcgatgctgtggttgaggcagttaggtgttccgcaaataatgtggaaagtttgggtcttgctgaggttgaaattgctgaagggaatgggttggacgctgacattcaggaatctgatggtgagatggataaggcagatgacaaactgtctacaccttctgaggagcagaatgaatctggaggtggaacaagtgttgggggcatcaatgactcccaggaaaacaagggggttaatgggctttgccagggagaggtcatagacccattggctacagcaaatggagatgaattgagcatgggtttaagcagaagcgcaagtggacgagaatctattgagcaagaggataccgttatgtgcgctagtgatgatcagaaagttgagaaccattgccagtttgacgataagcataaagaagctgaaatttctcagattgagctcgcagttgataaccacattatgctaactgattgcactaaccaaaagaaggggatcgacagtcctgtgaatgaaaccaagggggattcaactcctgacattgtttttataaggagaaaatcaataactagaaaaacatgtgaagcgaagcaggtgaaatctgaagatgaggttcgatttgagaagcgagttacaaggtctgctactgttagacagagagaggtttctgctagcatgtgcgtaggtgctacaaacgatgctaacttggaaagcaaagaaaggaaggaagatgttcatcattatacaaggaaagtgggcagcaccgtgcgctcaaaagttcatcacacaggggtggcagaatgcgacactgatacaaagaagaaactaaaaggaactgttaccactcgaagaaactcagatgccattgctaatgatgatcctccaagtatcacgcagaacaaggaatcaaaaactcagatgaagatcgatatcaagtctcaaccactcacaagaaggggcagcatagtaaataaaacagaagacgcagtttctgggttagaccagaatatctgtagttcagccatcactgataaaaatgatatagagctcacagattctgaaggagttaaatctgagaacaaggccgctgtgaggaagtcaatattatcagttggcgctaagattgttgccagtaagaagaggatattggaatcaggacttgataaagctagtggagagtcaccagttgcaataccatccctaaagaaggcaagagatacatcctcagacactgagctagagcaaccaaaaatgtcttctggaaagaaacttaccagaaataactgtggctcaagtaagaaaggtatgtcgacaagacggcaacatcagagtcaaacagctaagttgagtacatctgtgaattgctccaataaaaacgaatctaagctatcacagaatgaatccgatgatgatggaactggcagtgatacttccttgaagaacacttgtgtaagacgtactcgaagtggtggtgttgtccccaaaaaacaagaggattctagtgaatctgaggaaccgatcatactgagaaaaaatcatcaaagaggaaaatattctgggaaaagggctggatctacaccaaggaaagttaaagctcccaaaggcaatagaaaggaagtcaaggcttccagtttgaaatcttcgggtccaagtgagcagataaatacaggaagtcttcgtgaagaaaaacaaaaaataagtgatcatatcaagggcatgcttctagatgctggttggacgattgatctgagacccaggaatggcagaaattacttggattctgtgtatatacctcctagtggtaaaggatcttactggtctgtcacaaaagcttatgctgtgttccttgaaggtatggaatctgagaagaagggcagagctaaagatcagcgaccctcaaagaaatctgtaggtagccctgggaaaagtcatgtttcagaggaaatccttagcaaattaaaaagaatagtcgttaataaacgaagaaccaaagtagaacttcagaagttgaaaaagaggaaacatggtttactgaaaaagcagaaaacttccaagcgcaactcaaggggttccaaaaataaaatttcaaattctagaaagttgcatttaggcagcgaaagaaaaaagcgaggtggttgtgctctacttgctcgtggatcaaataaggatggtggaagcagcactaacggttttgttccatatgaatggaaacgtacagttttatcctggttgattgatcttgatattattgatatcaatgcaaaactgaaatgtgtggatgaaacccactcaaaagttttactggaaggtgtaaccactagggatggaattaactgcagatgctgcagcaaggtctttacagtacttgaatttgtggctcacgctggcgggccagtcagcaaaccttatagaaatgttcttgtagatgggctggacactgaccttttgcattgtctcattaatgcatgggataagcagtctgattctgaaaggcaggcctttttccctattagcactgagactgatgaccccaatgatgacacatgtggtatttgtggtgatggaggcaatttgatctgctgtgatggatgtccctcaacattccacatgagttgtctagaacttgaggaacattcaaggcaggatgctcaagacattgctgaggttgactcttcactctgtacttgttcccagtgcgaagaaaaatatcacccaggttgctctcctgagactactaacacatccaatgtctccagtcaggcatgcgatttattctgccaacaaagttgcagactgttttcaattagatttctgggcggcaatgatatctatggaactgtcaacagtgctctcatgcagtcattaagatatatctatagtttattttcctgtgatattcattataggggaaagctgtttgagggattgcgtaatcttcttgctgtgaagaaggatcttgaaccagaattttcatgcagaattattcagcgtattcatgaaaatgtaccagaaacagttgttgctttggatgagagggttgagtgtaactccaagattgcagttgctctttcgttaatggatgagtgctttcttccgattgttgaccaaagaactggcatcaacttgatacgtaatgttgtgtacaactgtgggtcaaattttgttcggatggacttccatgggttttatatctttgttttggaacgtggagatgaaataatagccgcagcatcggtcagaatacatggaaccaagttagcagagatgccattcattggtactcggaatatgtatcggcgtcaagggatgtgccgcagactgctagatggaattgaaatgatcctcagctccctcaatgttgagaagttgataattccagctatcgctgaacttgtggacacctggacatctaaatttggatttagttcacttgatgtttctgaaaagcaagaagtcaagtctaccagcatgttagtttttcctggaacaggtcttcttcaaaagccattgctaaagaaaacttcacctggggaaaattcaagctctcaagaagttgatggtgttttctctgagctcgagtctgggaaaacttccaatgtggccaatgaagactctctttgttctgcaaatgctgagactcaaggttcggctgccccatgttatggggacaacagcaaagatgctagtgcttgcaatgattga

SEQ ID NO: 12716 - DNA, 493 bp, Oryza sativa
  Clone ID: TFbOSC401520j.C1.o8.gp
tgtgcaagaaaaattatctgcaaaacactgattctaaataacttaaatgtatatatacatatagttcatctaactaaaatagtaaaatggagacatagggtaaaatacataccatgactacatcggacacatacaccatgcttaaccttgcaaatgctgcacaccaatttccactgattctcctggacacttccaacattagtaacaggttccattgattccatgtcttccacaagagctcccggtgtccaaaggctacaaaacaagtgcacaaatttaaggttccccccatgcgctgtttgaccaggctcccctttgacaggttttagagcgcctttctcttttgggcatagaacacaaggcatcgacaaggtgttgtccgcatctttcttcaacgactgcagtgactccaaatccttacaccaagtgcacaaccactggccatcaggcacaacatgcaaaccataacacttctggtgcacagttaccttac

SEQ ID NO: 12717 - DNA, 2190 bp, Oryza sativa
  Clone ID: TFbOSC900333j.C1.o1.fg
atggtgatcgcggtggaggggggcttcgtgcacgaggaggaggaggtggaccacccaattcgctacctcccacttggccgcgtctactcctcctctgctccgtgccctctccccaagaagccccgctccgccgaggacggcaagccccccgtgatcgtctactaccgccgccgccgtaagaagccgcgggtcgaggggccacctccctcgcctgccacagcaccaccgatgctgcacccccgggaggacgacgaggatgaggaggttacacggcggaagggttctctcaagtacgagctgctgagcctggggcaagccccgcccgcattaggcggggatggggaggagcccgcgcggcggcgctgcctgaggcgtagcggaggggctgagaggaggggttacttctctgaacccaagaggcggcagcggcagggcgtgcacaaggaagctgcctcctcggctgggaggagatggttggagttggaaattgaggctgcggatccactggcctttgtgggattaggatgcaaggcaaaagtaaagtatgatgatggcgaatcagaggaccttaacctagctgatgaaaggataaaattttctatttcatctgaagaaatgaagtgcaggaacttgaaatttggaatttccaatctgaacaagaggggctatgatgagttgcttgcccttgctgttagccttcatgattaccaaggtcttgatccaggtgatcttgtgtgggctaaacttacaggtcatgccatgtggccagctgttgtggtggatgaatcaaatgttcctgctaacagggctttgaagccaggccgactagatcagtcgatacttgttcaattctttggtactcatgattttgccaggtttctctgcacacagcttctcccagaaaatatgttgcaactacagaaatccatggaaaagggcagttctgatgctaattccaataaagatgtacattcttgtgacaatttatctgaagataaaacagctgaaagcggaggggattatgatgagatgactccaatagaactaggaaatcttcgtgtgagcaaattaggtaggatagtaactgactcagactatttccataacaaaaagcatatatggcctgaagggtatactgctttcaggaagttcagatcagtgaaagatccacatgtagtaatactttacaaaatggaggtactgaggaattcagatataaaagctcggccattgtttagggtcacatcagaagatggaacacagattgatggctctaccccaaatacatgttggaaggagatatattgtagattaaaggaaaaacagcgcaatgtggcctctggattggacagagatgtttgtcagggatctggttcctatatgtttggcttttcaaatccacaaatacggcaacttattcaggagttacccaatgcaaggtcatgcttaaagtattttgaaaatgctggagacacctttcgtgggtatagagctgttcatgtaaattggaaagatctagactattgtagtgtttgtgatatggatgaggaatacgaagacaatttgttcttgcaatgtgataagtgccgtatgatggtacatgctagatgctatggtgaactcgaaccattgaatggagtcctttggctttgcaacctgtgtcgacctgaggcgcctcgtgtttctccacgatgctgtctttgtccagtaacaggacatgcttttaattatattaatcctaactttggtacagaaacttgcttaaaagatgtgaagagaatggaaccgattgatggattgagcagaatcaacaaggaccgctggaaacttctatgcagcatttgcggagttgcttatggagcttgcatacagtgttctcatcctacctgtcgtgttgcatatcaccctctttgtgcacgtgctgctgatctttgtgttgagcttgaagatgatgacaaaatccacctcatgttacttgatgaggatgaggacccatgtattcgtctactttcatactgcaagaagcacagacaaccatcgactgaacgtccatctcttgaaagtaaccttgctaagcctgctgtggtagttcagacagatgcagttccaccatccggttgtgcaaggactggtaagagagcaaatgtttacttgaggctaagagcaagttttgtcaagttttctgcataa

SEQ ID NO: 12718 - DNA, 2997 bp, Oryza sativa
  Clone ID: TFbOSC900332j.C1.o8.fg
atggtgatcgcggtggaggggggcttcgtgcacgaggaggaggaggtggaccacccaattcgctacctcccacttggccgcgtctactcctcctctgctccgtgccctctccccaagaagccccgctccgccgaggacggcaagccccccgtgatcgtctactaccgccgccgccgtaagaagccgcgggtcgaggggccacctccctcgcctgccacagcaccaccgatgctgcacccccgggaggacgacgaggatgaggaggttacacggcggaagggttctctcaagtacgagctgctgagcctggggcaagccccgcccgcattaggcggggatggggaggagcccgcgcggcggcgctgcctgaggcgtagcggaggggctgagaggaggggttacttctctgaacccaagaggcggcagcggcagggcgtgcacaaggaagctgcctcctcggctgggaggagatggttggagttggaaattgaggctgcggatccactggcctttgtgggattaggatgcaaggcaaaagtaaagtatgatgatggcgaatcagaggaccttaacctagctgatgaaaggataaaattttctatttcatctgaagaaatgaagtgcaggaacttgaaatttggaatttccaatctgaacaagaggggctatgatgagttgcttgcccttgctgttagccttcatgattaccaaggtcttgatccaggtgatcttgtgtgggctaaacttacaggtcatgccatgtggccagctgttgtggtggatgaatcaaatgttcctgctaacagggctttgaagccaggccgactagatcagtcgatacttgttcaattctttggtactcatgattttgccaggtttctctgcacacagcttctcccagaaaatatgttgcaactacagaaatccatggaaaagggcagttctgatgctaattccaataaagatgtacattcttgtgacaatttatctgaagataaaacagctgaaagcggaggggattatgatgagatgactccaatagaactaggaaatcttcgtgtgagcaaattaggtaggatagtaactgactcagactatttccataacaaaaagcatatatggcctgaagggtatactgctttcaggaagttcagatcagtgaaagatccacatgtagtaatactttacaaaatggaggtactgaggaattcagatataaaagctcggccattgtttagggtcacatcagaagatggaacacagattgatggctctaccccaaatacatgttggaaggagatatattgtagattaaaggaaaaacagcgcaatgtggcctctggattggacagagatgtttgtcagggatctggttcctatatgtttggcttttcaaatccacaaatacggcaacttattcaggagttacccaatgcaaggtcatgcttaaagtattttgaaaatgctggagacacctttcgtgggtatagagctgttcatgtaaattggaaagatctagactattgtagtgtttgtgatatggatgaggaatacgaagacaatttgttcttgcaatgtgataagtgccgtatgatggtacatgctagatgctatggtgaactcgaaccattgaatggagtcctttggctttgcaacctgtgtcgacctgaggcgcctcgtgtttctccacgatgctgtctttgtccagtaacaggacatgcttttaattatattaatcctaactttggtacagaaacttgcttaaaagatgtgaagagaatggaaccgattgatggattgagcagaatcaacaaggaccgctggaaacttctatgcagcatttgcggagttgcttatggagcttgcatacagtgttctcatcctacctgtcgtgttgcatatcaccctctttgtgcacgtgctgctgatctttgtgttgagcttgaagatgatgacaaaatccacctcatgttacttgatgaggatgaggacccatgtattcgtctactttcatactgcaagaagcacagacaaccatcgactgaacgtccatctcttgaaagtaaccttgctaagcctgctgtggtagttcagacagatgcagttccaccatccggttgtgcaaggactgaaccttataatatccatgggagaaggggccaaaagcaacctcaagttatggctaccgcttctgtaaaacgtttatatgtagagaatatgccttatattgttagtggtttctgccaaaatagagtaggccatgatgctatcagtgaaccaattcaatcagttggctttttggatgttgcacatcaagaagctgttggcaacgtgtcttctatgattgaaaagtataaaagcatgaaggctacattcaggaggagactagcttttggaaagtcaagaattcatggatttggtgtctttgcaaaggtttcgcacaaggcaggcgacatgatgattgagtacatcggagagctcgtcaggccaccaatatcagacattagagagcggcgcatatacaactctttagtgcctgaaggttatatgtggaaaactctggtaaagttaattggtttgttcatggagttcaaccttaaagctttgatgggggtcatcatcacgacattccttggtgctgggacgtacatgttcaggatagatgatgagcgtgttatagatgctacgcgggcaggaagcattgcccatttaattaatcattcttgtgagccgaattgttattcacgcgtcataagtgttctcggggatgagcatatcatcatttttgcaaagcgggatataaatccatgggaagagttgacttatgattataggtttgtttcgagtgatcagcgacttccttgttattgtggattcccaaaatgccgtggagttgttaacgatgttgaagcagaggggcaatcagccaaaataaggggatcgtatttagaattgccccagggtactggattgcgaactgtgctccttcggggctag

SEQ ID NO: 12719 - DNA, 2400 bp, Oryza sativa
  Clone ID: TFbOSC400342j.C1.o6.fg
atggggaagggaggggaaggggcggttcccgtgggggagagcggcgggcggcggcggaggaggccgggcgaggacggaggcgacgacgacgacgaggagtatgtggtggaggaggatgaggaggaagagtgcgacgaggatctgtctgcctcgagcgccggcgagggaggagagggcacagacgaggaatacgaagagggtgatgaggacgaagaggaggatgagaccccgcggccgaggcagcctgtcaagagccgcgagaatgggcggaaggggaaggcagacccacccgttgcgcgatctcgtcgacgtaagtacgaggatgacgatgactactcggaagaagaagacgatcgggtcgacgagtacggcgaggatcttgaggaggaggaagaggatcttgaggaggaggaagaggaggacgatgaggcgccacgatccaagcgcatgaagaaacgtggtggccgcaacgtggaggggaagcttcctctggagcgatcaaatcgccggaggtatgaggaggacatggactttgaccctgacatggatgaggaggaagaggaggaggatgttgatttcgatcctgaagtggaggacgaggaggaagaagattttgaggatgaggaagatgatgaattggaagcgactaaggtgagggttaagaatatggggcggcgaaagtctactttgaatcagcgacgagggaagatgaagagcagctctaaggtggccagtcggaaggtgggttcagtcaaggcaaggaacgctgcgtctataagacggaggcagaaaaaacgttcaatgcttgatcgttatgaggatgacgacttcattgtggaggacgaggttatggctgattggcaaccaaggaaaaaggctagaattaggaagcagatggaggttgatcctccgacaccagtttttgaggctgagatatggcctactattgattcagacacgacagacttcgaatttgtaacatccgatgaggaagcagccattgctgagcctactagggttattaagaaggggaggaagaaaagggtatttgtgtcagattcatcctcagattctgaattcgttgtatcagataaggaattggggaatttgaaggagtctgagcctccagagtctctgaaagtgctgccttcatcacccaggaagatttctgttacaggtaatggggagcacaaggggaaggagaaaaaggaaccacaggaggctggaagggcaacgtgcgggatttgcctttctgaagaacagagagtgactgtgcagggtgtgctggattgctgttcacactatttttgctttgcatgcatcatgcaatggtctaaggttgagtcaaggtgtccgttgtgtaaacggcggttcacaacaatcacaaagtcgtcaaaggaggatactggtttggaactgacaaattctgtaattagggttgaagaacgtgatcaggtttatcagcctacggaagaggaaataagacgttggctagatccatacgagaatgttgtgtgcatagagtgcaatcaaggtggtgatgacagtctcatgttactatgcgatatttgtgactcctcagcacatacttactgtgttggtttgggaagagaagtacctgaaggaaattggtactgtggaggttgtagactcgatggcgaagcacattcataccataatcatgtgaatggcaattctgggatgtttggtgcaatttcaccaattggcacttttgaaaggcaagggattgatctaaatgtatctccaagagagattcctaggggaaatcattctgttgagtctcaagcttctactgcaggagcatcaactccatctggaaggcagacaaacgcaacgaattttagaagacgtcaaatgcatgactggatacgcagtttgctttctagaccaaggacaacacttgggccagttatgcatcataatggtgtgcatcagagtggttttgtaccaagcactgaaccagaccacatgaacttttgcgcaccattagaatctgacactttacacaacactgggtctgtaccacaaagtgaaccaagccagaacttccatgttatgtcagaagccaacacttcagagacttcctttggaaggcatgcagctctttctgaaagacgtcaaatttatgaacgttttttcatgttgctatctagaccaagcccgactattagaccggacttgtgccataatgcctcagagcatggtagttctgtaccaagagttgaaccaaaccacatgaactttcatgctccgccagtagccaacagtccacaaactctgcttgatggcattccaaaccgcagcaatggtttttcttttactcaggctcacagtaattttgtagatggaaacaacttccaaggaactgaaggtgtctag

SEQ ID NO: 12720 - DNA, 3312 bp, Oryza sativa
  Clone ID: TFbOSC400766j.C1.o6.fg
atggccggcggctcctccccctccccggccgccgcgcccatccaggtgcgctgcgccggatgccgcggcgtcctcgccgtcggcccaggcatgaccgagttcatctgccccaagtgcggcatggcgcagcgcctccccccgcagctgatgcccaagccgccgccctcctcctcctcctccgccgccgcgacccccgcgcctcccgccccggcggcaccgccgccgcctacgtcccggagaggaggcggaggcggcgcggcccttccgcccccgcaggcgcagggggtggaccccacgaagatccagctcccctgcgccaactgccaggccgtgctcaacgtgccccacggcctcgcccgcttccgctgcccgcagtgcggcgtggagctcgccgtcgacctcgccaagctgcacaacttcctggcctcctccaacaacaacgccgccgcggcgccgccggacaacgtcccgccggcctcgggacccgcgtcgcgggcgcctttggtgcctgcgcctccgcccgccccgttcccccccgtgccgacgccaggcatgacgcaggcgccgcagatggtgcctggcgcgttgatcccgatggtgcttcccatcactgatccgcctgaggagatcaacgaggttgcaattgatgttgagcgtgaagaagatgaaggtggtactgttggagaaacgttcactgactataggcctcccaaactctctcttggtctgcctcatccagatccaatagtagaaacttcttctttgtcagctgtacagcctcctgagccaacttacagcttgaacatcatggatgaattggatgagacaaaggccttgtcttgcttgcaaatcgaaacattagtttatgcttgtcagcggcacctttatcatctccctactggtgatagagcaggttttttcattggtgatggagctggtgttggtaagggccggacaattgctggattaatatgggaaaattggcaacagggaaagcataaggcagtgtgggtatctattggctctgatttgaagtatgatgctcgaagagatttggatgacgttggtgcaaaatgtgtacaggtgcaccctttaaataagctaccatattctaagctagactcaaaggccattgggatcaagaatgggtgccacaaggccaaaaatctcattcctgatgcagggagccagcccactcgcactggatctctcgagaaaggtggtgtgggcgctcttgaacttgttgccatggacatgaaagccaggggtatgtatgtttgccgcacactaagttataagggggttgattttgatattgtggaggctccccttgaggaaagaatgatgaatatgtacagaaaggcagccgaattttgggctgagttccgccttgagctcctatcagcaggtgaatcatttacagaaggcatttcaaatcaaatatggcggctatattgggctagccatcagcgtttcttcaggcatatgtgcatgtctgcaaaagtacctgctgttgtgaagttggctaaggaggccctggcagagaataagtgtgtggtggttggtcttcagagcactggagaggctcgaacagaagaagctatcacaaaatatggtgttgaaatggaagactttgtttctggtcctcgggagctgcttctaaagctggtagaagaaaattaccctctacctccgaagcctgattcttttcaacaaggtgaagaaaaagtcacagaaattcaccgtaagcggcattctgccccagatgtatcatttaaaggacgtgttagaaaagtagcaaaactggtagaagtgagtgatgatgacagtgatgattactctccatctgagtcagatcatggatcgacagagtctgatgaggagtttcacatgtgtcaaatctgtaacacagaggaggagaagactctgttgcttcattgttctggttgttctcgacatgttcaccctggttgtctgacaccaccttggactggggtattaactgatgactggtcatgctacacatgcaagaagttagaaggagaggaaaatgaacaagatgctcatgtagctgatttttcacagaggtatgatgctgcagtagagaaaaaaaagaagattttggatatgatacgttctttggatctccctaacaatcctcttgatgacatcattgatcagctaggaggccctgacaatgttgcagaaataactggacggcgtggtatgctaataagagcttctgacggaaaaggcgttgtttatcaggcgcggaatgcgaaagaagtgtcgatggagatgatcaatatgcatgaaaaacagcagttcatggatggcaaaaaactaatatctattatatctgaagcaggatcagctggcgtttcgctgcatgctgatagaagggcaaaaaaccagagaagaagagtacacataacacttgagctcccttggagtgcagatcgtgcaatacaacagtttgggagaactcatcgttctaatcaaacttctgcaccacaatataggcttctctttacaaatcttggtggtgaaaagcgatttgcatcaatcgtagcaaaaagactggagtctctaggagctttaacgcaaggagatcgcagggctggaccttctctgagtgcttttaactacgacagcaattatgggaaaaaagccctaaccatcatgtatagaggaataatggagcagagttactttcaagatgaccaggattcttttccagttgttcctccggggtgttctgacaatcaatctagcatccaagagttcattgctgaagcaaaagctgctctagtatcagttgggattatcagggatgctgtagtgtgcaatggaaaagttgctgggaagctttctggtcggattgttgactcagatatgcatgatgttgctcgttttcttaaccgccttttgggactggctccgaaaatccagaatagaccgttcacattgatagcttgtcaggcgcgtcaactgtactttttactttcaccattgaccgaggagttacttgggaggcaaaaggatggtgctggttcttctaatgatgggttttacgagtccaaaagggaatggatgggaggaaggcatttcatacttgcttttgaaggctcaatcgaagggatgtataaaataattcgacctgctattggtgaagcattaagagaaatgcctttaacagaactgaaaagcaagtacaggaaagtgtcatcaatagaaaaggttaacaaaggttggcaagatgaatatgatgcttcgtccaagcagatactgaagagaatcagaatcagttaa

SEQ ID NO: 12721 - DNA, 2235 bp, Oryza sativa
  Clone ID: TFbOSC401951j.C1.o1.fg
atggtcgagcatatggattggcagccggtgaccaccctcggccccaatttctcgccggagctgcatagcctgctcctctccgaccaccgcgcgtccttgctctccctcctccgccgccaggacgacgagctccggaccaagatcaagaaccacctcctcgcgctcggatggaccatcgcctccaagcccaagccccctggccttgcgcccaggctccgctacgtctcccccgccggaaccaagtcctactactccctccgccgcctcatccagaccatccacctccaccaccatcctacccaatcccaatcccaatctcaatctgattcttgcggttgcggagatacccctcttcttcttgaggaatctgatgacgaccaataccaagaacaacaagaagatgatgccatcgcggggtacgttgccttcatggaggagcagaatgccaggcgcgaccgcgggcagggaaatgatgaggagcagaggtccatggccaaggagcttcggatcaaggctaaggatcagctcaggtcgtcgggatggacattctccatgaaggtcaagtacaacggccgcgaggagctgcgctacacagagcctcgtggccgctcccacatctccctcatcaccgcctgcaaggcctaccttcttcaccacacgccgtcgacgacaatggcttcatgcagcaacaacaacaacaagagaccagcgccacccgctgcctgcaagactgccacttctagcaagaagaacaagaagaagaaggcgagcctgcagcaggcgcgcgttctgcgtccacagccaagaaacgaggaggggaatgcgctgacgacggcgcgcgcgaggacgctgctgtcattgctgatcgacaagaagatcctggcgccgagggaccagctcatctacaccacgaagcgagggctcatcaccggagacggcatggtgaaatgcatgtgcggcggctgcatcaacaacaacaacaagaggagggtagcagagtacacggtggccgagttcgcggtgcacggcgacggcgatgtcgcctcttcctcgtcacggcagccttgggcgcgcatgtttgtgggtgacggcaggtcactgtcgcagtgcctggtgcagctgatgatggcggacgacgaggcgggctccggcaggaagaagaagaagaagaagtatttgccgtatgtgtggcgtggtgcaagggtgaagcggaaatgggaggaggacgacgactacgtgtgctccgtgtgccacgactgcggcgagctgctcatgtgcgaccgctgtccgtccatgttccaccatgcctgcgtgggtttggagtccactccgcagggcgactggttctgcccggcctgcacctgcgccatctgcggctccagcgacttggacgatccaccagctaccaccaccacccaaggattcagcagcgacaggatggtcatctcctgcgagcagtgccgacgagagtatcatgttgggtgcatgcgagagagagacaatgggttgtggtatccagaggcggatggagaggggccatggttgtgcagtgaggcctgctcaaagatatacctgcgcctcgaggagctcgctgtcgtccaagccccttgtcgttcagttgcttcgggcttgtcattggtggtgttgagacgcggtgcagcgagagacggagaggaggaggagcacgccaagctgtgcatggccttggatgtgctccgcgagtgtttcgtcaccctcatcgagcctcgcacgcagaccgacctcactgccgacatcgtcttcaacacagaatcggagctgagacggctagatttccgggggttttacgtggtaggactggagaaagccggcgagcttatagccgtggctacactgagagtgtatggagaggaagttgcagaagtgccgctggtagggactagattcgcgcgtcgtcggcaagggatgtgccgccttctcatggatgagatacaaaagttgcttggtgagatgggggtggagaggcttgtgctgccggcggtgccggagatggtggcgacatggacgggaccatcatttgggttcagagagatggggcaggctgacaggcaggatgtagcacaccatgccatcctccgcttccagggaaccatcatgtgccacaagcagctacctcctcaacctcaacctcaacctcaacttgggcacacaacgacgaccccagcaggaagaattccaagtccaataccattgtaa

SEQ ID NO: 12722 - DNA, 5295 bp, Oryza sativa
  Clone ID: TFbOSC401375j.C1.o5.fg
atggcgtcgttctactgtgtccgtgtgcagattgacagcgccagtctgcgccacatcctccgccccttcgccgcacagggagcggcgccgccggagcagctggccgcaagccatccgagctcgcagtacggccagcccgcgagagcggcgccgagcacctcgttgcttgctcaggtggctgggaaccatccccatgccacccatgtttcggaccggaaggcgttgtttggcatgctcaatgcaggcaatgctgctaatgtcattgatcttactcgcgcttccccgctcggaggcgcggagcctctgcccaagcatccgaggcacggcttggaagccagcagcagcgttgagcagccctcctgcttggggccgttgtttcagaacacaagtgcaaatgtgcagggtagttttccaggggaatgttcagttaacaatgggatatcccaaggcgccatccagtttcaggactcgagcacatgcgcagtgcagaaattgccatcccaatcaacccctcgccatcatcctgcgcttctaggggatcagatatgcgtctcctgtctgaatgttggtggtgaattctttgtcggtgaagctgggatttttggagttcgttgcttttgtcaccggctgagaatgtctgtggctaagttctgtgagcattcaggaggacccgcagaaaaagctggtgaaattgtcattatggataatggcatgactattgtacaatggctcaagtactgcatgggggttggagcatccatttctgacactaagtgggactggccagaatgggcatatatgagatattcttcagaagaatactggactaaaagtctccttacaacgaacaataacatggaaaaaacagggctattcagtggacatggaaaaagcactggacatataaacaatccagtttattccagtgatatccacaatgaggttggacgattcacttctgttgagaagctagtgaataagccagatgaaacattttatagaaagagtgtcggtttacatgaagctttctcaaagaatccagctatacagcagagttcgaaaataaacttagcaaatcatatgatccatgacatgaacatgaactctattagcaggccaagtgaacgaacatattcaacagcaaacatgggaataacttacagtagaaatcatttggcacatgattatgcaaactttctggagaaaaacttaaataacttgtctcgtagtcctggtcctagttctacaagagttttgagcaatgacagtagggcatgcatgcctgatgtacctcacaaaataattcaagatggttcagaatcacttggtgcagatgcttatccgaagcaaactaccaaagccaacaaaactatagaaaacattgagccatcatttggtacaggtaataggaaacgatcacttgatgtttctaatggaaccagccattctgaactcaatgagattacagatgatgcagcaaagaattcatttatttcattatttctttcacatcttgagagaaatagtacatctgagtccattgatgatgttctcaacagtaatgagcattaccttcttaaggctccagatgttgcatatagttccgatcgtttaaaaactgcaagtacacaagttgagacaagggcaaatgataatcagttgaagttggcacctgccattattcacacgaaaaggatatcagatagcaggtctcttccagttccagtggcttccaagggatatgttcatcaagatgtacttcatgcaaatagtcaagagcctttaataaatggggactgcctgccacatttgctgcctagtcaacctaacgccggaatctccaaaatttgcgcagaagtttcttctccagtgaattgcaggtgttgtaatcatgttgctgacaaatcccatcttgcacattctgagactggggctccctgtttttatgatagaacggaaaatcaatgcatagatgctgttgcaaagctcaagaagattcttccaaacttggttttagagctggcaatttctgccgatctcatttctgtaatgatggcactccagttccagcccatagggctagatgaagtgcgcacccgctctactttcataccaagatcctcattatgttctagagagcttatgttgcagtcctgttgccatgcatgtcccattgatgggtactacagaagttctatgggacacacagccaacagcttgactaagaacactctgcttgatgcacctaataatacagaatgtagtccttaccgggatggaaaatgctgctgctctttagccccaaaatgtttggcaggttatggatttacaaagcactgtgttgctagaatcgatcaaactgatcatacagtacaaaagagcaaggatgatggcatgcaagctgctgccagatgttgcacgctaggggagagtgaaaaattaatatgccagtgctcaagcgagataattgctagaaaaagcgactctaaagcttctttccagaatgaggtctctactgaagtattgaaccgaccttgtgttcctacattacagcagctgaagaatgtaacagaagcatcggctgtaggtggccattggccctatgaaactgtaaaagagaaagcgagtgcttgtagagattctggaatatttaaagaactaaaatccggtttctcttctggattctccagcgatgttgtgaccaagttttctgcatcacctgaattgaacaagtatggtcttgaacacaaaaatcttgtgtttgatgaagggtcacgaattgagaaatgttcctcatccagctatttgcctattagtacaggatgtgaagaagcccaaaatagtttttctagatttcacctggagccatctttagtgaagcacaaaaataatcaaatttctgagggaagtacacggaaagaacatgagaatgagggacaatgttctgaaatgtcaaagaaaacacgaacattgaggtgctgtgcaaacaaatcagaatccgatgattgtactaggaaaattgatctgtcatcccgggaaggggattctcaaccgcagcataaggctggtccattttcacgcagagtatcaaaaaccaagaggaaacatcctcccacgcatctgaataaacatgtgaaacggcttcacagcaactgcaaagttctcaatgttgacaatgaacggtcagatgatgagggcatttatgttggagaatcaaattcctctgatagaaaaaagcaagaagataatatgaccactttggatagaacaaaatgccaacagcaagggagtcgattgcttgtccgcaaactgccaaaatatgtgtctctgaattgcattgtaaatgaaactaacagtgaagatgcctgtagtgggagtgccagtattgattctagtttgattgctacaggaataactaatgataatcggaaatctcccaaaattgttccactcaatctgattcttaaaaaggctaagagatgtcatgctatcaaacccctcagtaagacagaaaatatccatttttctgaggaaaagagttcagatggttctgcagataaatcttcctctggtgacagaagtttcagtccacaagatgaactgtggtctcccaaaaagaataggtattcatctaatgtctcgaggccacacgtcaagactgactgccaaagtccctgctgtgtacttgaagaagatgagcctcttagccttgcagatatggggacaagtcagctgtcagcatcaagaagtagaggaagtaagaatcaaagagcatgcatatctcttaataggatggagagatatatacaaaggcctagtttagatgcttcatgttgtgtttgtggtatctcaaacctggagccttccaatcagttgatagagtgcagcaagtgctttatcaaggtgcaccaagcttgctatggtgttctaaaagttccaagaggacaatggttctgtaagccctgcaagatcaatacccaggacacagtctgtgttctgtgtggttatggaggtggagctatgacaagggcattgaaagcccagaatattctcaaaagcttgctgaggggtattgcaactgcaaaaagatcagataaatatgtttattcatcaggaaatgtgaacagtgagtgtacaagcaagttacatggggaatatgtcaggcatgattcatttaatggacacagatcaagaagcttcaatgctatatcttcttttggtataaaagaagcttcaataggtagtgcacgtggggacattatcagcaagtcgtggacctctaatcgcaattccagtctacttggtccacgaacaaggcagtgggttcatgtggtctgtgggttgtggacacctggtacaaaatgcccaaatacaatcacaatgagtgcttttgatatatcaggggcttcacctgccaaaagaaataccgaatgctcaatgtgtaacagaactgggggctcatttatggggtgtcgtgatgttaattgctcagttctctttcatccttggtgtgctcatcagaggggtttgttgcaaagtgagccagaaggcgagcataatgaaaatgttggtttttatgggagatgcctggatcatgctatgcttgatcctaatcatgttaatcctaagaaggaatgcttgaggagcaatgactggacatgtgcacgtactgaggtttttagaggccgaaagggagactcatttggtgctaatcgtagcaggaaaccagaagagaagtttggtgagtgcagtgtttcccaagaacagatcaatgcttggatacgcataaatggatcgaaatcttgcatgagaggacagaaggaatatgtccactacaagcagttaaagggatggaagcatttggtagtgtacaaatctagcattcatgggcttggtctctacacatcggagtttattccacgtggctctatggttgtacagtatgttggtgaaattgttgggcaatgcgttgctgacaaaagagagattgaataccagtccgggaaacggcagcaatataagagtgcttgttacttcttcaagattggaaaggaacatatcatcgatgccacccgcaagggtgggatcgcaagattcatcaaccactcttgccaaccaaactgtgtcgcaaaaataatctcagtaaggaacgagaagaaggtagtgttcttcgcggaacgccacataaatccgggggaggaaattacctacgattatcacttcaaccgagaagatgaagggcaaagaatcccctgcttctgtagatcgagaggctgcaggagatatctgaactaa

SEQ ID NO: 12723 - DNA, 1824 bp, Oryza sativa
  Clone ID: TFbOSC400426j.C1.o15.fg
atggagttcgccgtcggcagcgggagcgtgcgtgatctgccgccttccaagcggttcaagtacgtcggcggctccagtctcgggatggcgccgtgcctgccggcgaggaagcggttgtgcccgccgatgctggaggcggcggcggcggcggcggcggccgtccccgtttgcctcccggcgaagaagcgggcttatgcggcggcggcggcggtggaggggggcggtttcgctctgtgcctcccggctaagaagcgcgcctatgcgccaccggtggatgatgccgtcgcgccggcgtgtcttccggccaagaagcgcatccacgcgccgccgccgccgccgccggatagtggtgcttctccctcagtcccgactacgaagcgcgtcgacactctgccaccggcggcggcggataaggctgctatttctccgagcatcccggtcccggtcaggaagcgtgttcacgcgccgcaaccgccgccggcgccggcgccggagaaggcggcggtttctccgagcatcccggtccctgctaagaagcgcgtcagcgcgacggcggcggcggcggctactgacgcttctccccgcgtcccgttcaaggatctcgtcaacaccctgccgccgccgagagacgccgccgtttctccgagcatcccggccaagaagagcgcccgcgcgccgccgtccccgaaggacaccgccgctccggtctcggtttgcctaccgagcaataagcgcgtgatgccgccgtttctcccgccatcgccgcctccatccaaggagtcggatggagctcgcgtcgccgctgttaaagaagccaagcctcaaggatccaataaacgtggcgccaccaccaattcgagcgtggcaaatggtgtggaagatgattatgcaagagctgaagcatccaagattcaagagaagcccaagattccggagaagcctatcaatcatgaagaaatcaaggagcaagtgtcgaagaaacaaagatcaaacacttgcagagaatcgaaagatcaggaatgcaatcaatcctgcagtgctattagtgcgaagcaatctgaagtcgaagcactcgagaaagcttgcaaagcgattgatctcaacgaagcagcacgggaagaagactcctgggatggagagagagtggcgcgagagccaacgcaagaggccatggcggcggcggcggaggaggaggtggaagaggaggacgacggcgtgcactgcgcggtgtgcgggagcaccgacggcgacccgtcggaccccatcgtgttctgcgacgggtgcgacctcatggtgcacgcctcctgctacggcaacccgctcgcctcgttcatccccgacggcgactggttctgctccgtctgcaccgccgccgccgccaagaagagcaagggcaacaagccgccgccgccgccgccacgctgctgcctctgcccggcgaggggcggcgcgatgaagcgcacgacggacgcgcggtgggcgcacatcgcgtgcgcgctgctggtgccggaggtgttcttccgcgaccccgacggccgcgacggcgtcgactgctcccgcgtccccgcgcaccgcttcgccacggcgtgctacgtctgcgagagcggcggcggctgcgcgctcgagtgctcgcagcccaggtgcggcctagggttccacgtctcctgcggcctcgacgccggcctctgcatcgagtaccaggaggccaaggccggcggcggcggcggcggcgtcgtcgccggcttctgcttggagcacaccaagctctgggaaaagcaacaattgacaggcaagtacaagattgtgtcaagagggcagaaatga

SEQ ID NO: 12724 - DNA, 5325 bp, Oryza sativa
  Clone ID: TFbOSC401733j.C1.o15.fg
atggagggagcagccgccgccgccggcggcggggagatgctatccccaggtgaggcggactggcctcccgagctgcggctcccaccgccgcccccgccctccgccgcatcggagggggagccgccgcccgcgcgggccgcggtggggatggatgactcgcagttcctcggatcgatcatcggcttgcccgcccagccgccgcaggccacggccgaggcgctcgcggtggtcggggtcaagaggaggagagggaggccgccgaagaagagggacggggcggcggcggcgacggcggttgttcccgcggcgaggcctgcgaggaggagggaggacgaggaggaggtcgtctgcttcatctgcttcgacgggggcaacctcgtcgtgtgcgatcggaggggatgccctaaggtctaccatccggcctgcatcaagcgcgatgaggcattcttccaatctcgcagcaagtggaattgcggttggcacatatgcagcagctgtgaaaaggcagtgcactacatgtgctatacgtgtacatactccctttgcaaagtatgcatcaagcaaggtaaatttttcagtgtcagggggaccaagggcttctgcgatacctgttattcaactatactgttgatagaatccaaagatgaaggtgatacaaagattgttgttgattttgatgatcaaaatagttgggaatacctgttcaagctatattgggtggatctgaaagggaagctttcattaacattggaagaactaactagcgccaaggctcgatggaatgcacctactacttacactaggaaagaaaaggatgagtcatctgatgacctttatgatgctaataatgacgatgatgctggttctgactgctcctcaggaaagcgaaagagaaattcttcgagaaaaaagggtcgaaaacgtcggaaaccaaattctgattgtagcattgccacaaaaaaggttgagactgttactagagatgatggaaccctgcccaacaaggtaccaactgaagaggcgtccttgccggtagacaccaaatgggcttcgccagagctactggagtttgtagggcacatgagagatggcgatcaatcttttatttcccagtttgatgttcaggctcttttgcttgactatataaaacagaacaacctccgtgaccctcaaagaaagagtcaaattatctgtgactcaaggcttcaccgtttattcaggaaaacacgcgtcgctcattttgagatgttgaagcttttggagatgcactttattgtaagtgagccttctgcagtaaatgatggtagccaagggattatcaatcctgattcagctcaaatagatcatgccagtggatataatgacatggcagcaaagttctctcctgataggagacgaaggatgcatagaaagatggaaagagaaccacaggctaatcctgaagattacgcagcaattgatatgcataatattaacctaatttacctgcgccgtagcttgatggaggatcttattgatgatcccacattgtcagacaaaatttctggtgcttttgtcaggataagaatttcgggacttggtcagaagcaagatatgtatcgtctggtgaaagttgtcgggacacataaggtttcagaaaaatacagcatcgggaagaagatgacaaattttgcacttgagataatgaacttaaacaaaaaggagattatcacgatggacacagtatcaaatcaggattttacagaggaggaatgcaagcgcctaaggcagagcatgaagtatgatctaattagccgactgaaagtgggtgatatccaagagaaagccaagatcttccaatttgtaagagtgaatgatcttctcaacactcctgaggaaagagcacgcagaattaatgaagttcttgacgtgcatgttgactcgcatatggatcctgattatgaatctgatgatgaatttggcaacaagaaagctgttgaacgtagtgtaaattgggcaagatcagatccgttcgtttcacccgttaaagttaaatattcgaacagttcacaaaagaatggtgatgctacccgccatctcaaaaacctgtctaaacaaaatacagagcgtaaatcaggagcagcaagaaactttgagaattcccattcaccagttggtatggatattccaaaatctggcactaatgtaaagagtaccaggtgtgaaactacgtcaccttcatctcatggggttgtatcaagtgacatggaaccagaaaaagtctggcactacaaggatccttctggaaatgttcagggcccatttactcttgtgcagctatccaaatggacaagttacttcccacgtgatatgagagtatggcttacatttgagagtgaagagagatcattgctgttgactgaagtgctctcaaagcaaccaaaagattttggtcaacctgcatctgttactacaagtagtaagtcgacagtagcagacactggacaaaacagaaacactgaaattgttgatctcaacaaagctccttctcctgttggttatagtatgcttaattcttttgaaaccactgttcagtctactaagcattctgctccagaaagggaaagcgtgaactctttagatgacaggttatcacactcgactgactcagttccaccaaaggacgctaacgcttcaaatagtcaagcaatgtgtcagatcaagcattcaggctctcttccatctcctggaagtccacatcaacgatcagacttgcaccatgatgaagtacagggaggacgctctggtgaatggaacaatcaacacaacagtgaactgtggagtccatccatgccgcagacaagttctagtgcacacagtaacgtggaatctcatcacgatcattatccttcgtggtcacaggttcaacatgatcctaaaaatagtttacaagcaggttctgggaaggatctgaattcgaggtatgatattgcgcagaaacttcctagtcaacggatcacgagagatgttcccagccctgtatttgcctggagtccatctgagtccaggactgcttccagtcaacatgaaggttcttgcttgagttcaacaaccaatctatgcactcatgatgaacttcattcttcaattgcttctgcaaaggctaaaagctttgctccagcaactcctgttgaagacagaggttcaagctcaccctctggtatgctgagtctctcggaaagagcaccaatctgcagtccacagtcagctccttctgcgtctgcttctgatacatgcaagatggaggagaacatgaatcaacaaaaaacacttgaagctgatatatcaaacacgtcagttaatcagtctccacagtctaagattctccctgaatcttctcctgataaccaagatgctgaacatgaatatcgtagtccacctccaatatctgagagtaaagagttatccccacagtcaaggactacccctggatcttctcctgataaccaagatactgaacgtgaatatcctagcccgcctccaatatctgggagtaaagagatatccccacagtcaaggactatccttgaatcttctcctgataaccaagataatggacatgaatatcctagtccacctccgataccggagagtatagagctatctccgcattctaaggctctccctgaatcttctcctgataaccaagatattgaacctgaatgccctagtccacctcaaatacccgagagtaaagagctatctcggcagtctaagattctccctgaatcatctcctggtaaccaagatattgaacctgaatgccctagtccaccgcaaatacctgagagtaaagagctatctcagcagtctaagattctccctgaatcctctcctgataaccacgatattaaatgtgaatattccagtccaactccgatacccgagagtaaagagctatctctgcagtctaagattctccctgaatcttcttctgataaccaagatattaagtgtgaagatcctagcccaactccgatatctaagagtaaagaggtgtctccgcaatctaagattctctctgaatcttatcttgataaccaagatgttgaacgtgagtgtcctagttccattctgataactgagagtaaagagcttgctgtggacctccctggatcaatatcattagcacctgaaaaaacagcttctactgatgtaggtgaaaactcttcacttgcttttatttttccaaaatctactctggctggggatgatgctttgaaatcagtatttgatatggcaaaggcgcatttagaatgtgaagattcaaaggttaaagaagaactgtatgttgaatcaactgttgttataagagatgacatggttgttaatcctgcctctggagttgagtccatagacatgtctgaaaatctcttggaatctttgatggagcaaagttgtggaactttttacatggatggtacaacagccttagaaggttttctgtctggttcaacgaaggaagaaccgcaatgttctagccccattgctttatccacatgctctagccccattgcattatccccttggggtgaacatggctactatcaaggagattctgttggttcttctttatggggtgtccaggacgatgatccaatcggtaatatttggccattatcctcacaagcaccggctctccagtattcatctggtagcactgctcattttattgatgaagcaactgtcacccatggaaataatggagttgttctaagtagcacgccaggggaggaggtgggtttaccaaactcaggtgtttgcacagattggggattggttgagcaggtgaatccagaaacaaatgatgcatcggtatcaatgatagacaagaactcaggattagtagattctcaaccatcagcaaatgatggctcagatgtgggtactgcacggaacactaaccataatactaacttgtccctcaaccatgaaacagcggtacccttgagtagaagttctggagaagcatcaagaaaacacggatttattactgacttgaatgttgctacttcagaggaggcgttagggaacaccaagaactggaatccatatgctggtaatgctaatcggggcagccagcggaatcatcaccgtgacaggtactctcaaataagcgaatcttggcttcttagctcaaactactctaggagtaggtctgatggatttggcactggtggatcgtcgagatcaaccccaaggggacaaactcagagggggatatgtaaatttcatgagaatggctactgcaggaagggtgcatcttgtaactacctgcacccctga

SEQ ID NO: 12725 - DNA, 1086 bp, Oryza sativa
  Clone ID: TFbOSC400429j.C1.o18.fg
atggggcccgcgacgccgctgcgccgccggacgagggcgcggccggccgccaccagggcggagggcggcagcggcggcgacggcgacgacgacgacgttcgctgcgaggcgtgcgggtccggggagtcggcggcggagctgctgctgtgcgatggctgcgaccgtggcctccacatcttctgcctccgccccatcctcccgcgcgtccccgccggcgactggttctgcccctcctgcgcctcgccgtcgccgcactccaagaaatcacacgcggccaagaagcccaagcagttcccgctggtccagacgaagatcgtggatttcttcaagatccagaggggcccggcggcggcgctggcggcggcggcggagtcgtcggaggggaagaagaggaagcggaaggtgggtggcatccgcttggtctccaagaagaagaggaagcttctccccttcaaccccagcgacgacccggcgaggcgcctccgccagatggcgtcgctcgccacggcgctcaccgccaccggcgccgtcttcagcaacgagctcacctacgtccccggcatggctccccgcgccgccaaccgcgccgccctcgaatccggcggaatgcaggtgctaccaaaggaggacgtcgagacgctgaatctgtgcaagaggatgatggcgagaggcgagtggccgcctctcctcgtcgtctacgaccccgtcgaggggttcaccgtggaggcggacaggttcatcaaggatctcaccatcatcaccgagtacgtcggcgacgtcgactacctgacccgccgcgagcacgacgacggcgacagcatgatgaccctgctgtcggcggccacgccgtcgaggagcctcgtcatctgccccgacaagcggagcaacatcgctcgcttcatcaatggcatcaacaaccacactccagatggccggaagaagcagaatctcaagtgcgtccgcttcgacgtcggcggcgagtgccgggtgctcttggtggcgaacagggacatctccaaaggggagaggctgtactacgattacaatggatcggagcatgagtacccaacccaccattttgtatga

SEQ ID NO: 12726 - DNA, 3690 bp, Oryza sativa
  Clone ID: TFbOSC101008j.C1.o5.fg
atggcatgcgctccctcttcacacctggtacatatggatgttctggctgtgatatttctagaagaaagaagtgaaaaatcctcactttgttttgagtttggagggagagagagtagaggaaggaaacctccctccggatccaggaaatcctcatccatcctcatgacttccgacgagctcgccggtgagggtgaggtcgacggcgcggagctgatcctgtcgctgccggaggacgtgctcgggctcatctccgcccacctccgcccgcgcgacctcctcgccctctccgccgcctcccgcagcctccgcaacgccgtctccaccgccgacaaggcgtggctcgcccagtgccgccgcctcctccccaccgcctcccacctcctcgcctggcgcaccgccctcgcccactcctccctcgccgtctgccgcttcctccactccgccgccccgctcctcggcctctgggcccaccagaaccccgagctcggcaacctcgtcctcgccctccctggcttcctctccctcgtcgccgtccgctccatcccccaggagctctccccgcgcctcctctgggcccccgtcttcgagctcctcgccgaccaccgcggccaccccgccttcctcttcctccacggcgccgcccacgactccctcttccccggcctcctctcctcctccctccaccccctcgccaacaccctcttcctcgaggcccacacctccacctccacctcccacttctcccgcctcgccttcgccgaccgccgccgcctcctcaacgccctcgtcgccgcctcccgcctcaccctcccccccgatgtcgccactgccccgctcttcgcgcgctccgacgccgacctcccgctgctcgccgcgcgccgggaggccatgctgcgcctgcacagccagtctggcgggggcatggtgcgcagggccgagatcgaggcgctgctgatcggggccaggaagacggcggcgctgccggccgacaccgccggcgacaagatgcggctgcggaggaccttctcggtggtcgccggttttgtcaggaacagcctgcggcagatggtgacacggtcggcgtccgccaattccagggctgagtacgcccaccccaagcatctgccattggacgagttcctgcgagccggagagagcgtcggcctgagcctccgtggcgcgcggatgaggctgtctatctaccggaattggccaagcatgcatgacaaccggtttgtgctctacaagctgacgacgcaggcgcccatgcctggccgggagtatgccggtttgtggggaggcacattcgggtggccgccagggcggccggaggatgagcgcaaacctggcaaggctctcttcttcctactcctctcctatgaggaggacagcgaagggaagcttcagctgattgcaaccaaggtgttggagggtacacactatgtcgtgcatccgaatgggtcctctatgtttatcgtgcgggtcggtgagccatccactgagacttttccgtggcaaaccgatgaggagtcgcgtgctgtggagatcaatagaagctttgctggtgagggcattgccaccgggtatgggttcaggtatcctggctcaaagcccggatcgctctttgtcctcctggatggccggcttgcatttgtttggagagagaacaaagctgttctcaccttgcaaaggctggacctggaggatatgataaggagaggggagcgtgtgccttcattgccgccgatacccaacttcgcctacctcacaaagtcttactccaatgtctttgctgtggcacctggcagcacgagcttcccagcttctccaaggtttatctattttggtaattcagttgtgagcaaaatcagacgctttatgctaaactttagatataaactaaaatgtcaaaatttagcaaatgagctacagtcgcagatccagcctcctgatgataacatcatgagtattgattacctgcgtgctattgctacgtctacagctgttatggtagaatataaatggaggagtaaaagaaacgctactagttgtatttgggcctttgggggcgtatggagcgttgattttggtccagcccggcctttgccactcatggccaacggcgccaattctaagaaagacgccaaggcccaacattggattagctggagggacactctccacggcttcctccaatcccctgctattagccagggtggaggaattcagacctgcatccgtcatgctctccaacacaatccttgcttgctcaccaatggtgttgttgttcacactgaattcaaaggtaacccagctcattcccaaggagaggaagcaaaagtgcagcaccctaatggtgctgctggaggcaaggtggtttctgcagatgctgctatacaagatgcggctgccgcagcttcttccgaagctaacaaggcaatgtgtaataatgccctcttcgacattttggtctcccagaaatttgccttgttgtgccatttgctacttgggaccttccatgtcaataaacctggtgatgtcatcgacttggaaaaaatcgacgccaagatgagaaatggagactatgcccacaaccctgcactatttgacgatgatatccagcagatgtgggagaagtttgagcaagttggccaagagatgacaggtctagcgagcaacctttcaaccatttcacgagtttcataccaaaagcaggcttctggattttctgaagctgaggtggctgagcacagaatagaggaaataagtttgccgggtgctgtccacgttgtcacaaaggagtcgactaccaccgtgcagttggccccatgtgattctagtcattctacaataccgaaacgaactgtgccacctggacgtgatctgtgcccttgcgatggttgtggcaccaaggtagatgttgaagaaggcctaatctgtgatgaatgtgacaccatgtaccactttgcatgtgtcaagctactcaatcctgatattaagcaagtcccagcaatctggcattgttcaacctgcagcttcaagaaaaaagaattggctgcagataccacgaataatgttgcccatgactgcttgcatggtggtaactgtgttttgtgtgaccagctcgagctggtgaagacagaagaagaagatcccaagcttcccataaaaattgaattagctgaagaaagagaggggagctccgtctcaagcatgggggaagacaatgaaccagacctgtcaacaactgccctgtcaaacttgtgcaaacactgtggcacatgcgaagacgatgacaagagattcatggtatgcggacatccttactgcgtttacaagttctatcatatccgatgcctgaaaacaagccagcttgcaattgagcaacaaaagaagcttggttgctggtactgcccctcttgcctctgcagagggtgcttccaagacaaggatgatgaccagatagtcatgtgtgatggctgtgatgaaggttatcacatatattgcatgagaccagcacgcaacactatccccaaaggtaagtggtactgtacattttgcaagatccgcagggcagcggaaggaatgcataagtatgaggattctgtgctgaaaatacatgggaatagtaagcatgcttgtaatgtgaatcagtcgaaggattctgaaggtgatggtactgaaaagtga

SEQ ID NO: 12727 - DNA, 1845 bp, Oryza sativa
  Clone ID: TFbOSC421502j.C1.o2.fg
atggatcaagcgaggatctcgttcttcccggatggtctccgtgtgatgatcatcgacgacgacgcaaaggccgtcagaagggcaacggcgacgttgtcccaactgcagtacgcagtggtggcgacgcactccaccgcaagcgctggtctgcgtgccctctccggcgacaacgtggtagaaatccaagccatcctctgcgatgtccacaaggtggtctcctccggcttcgacttccgccgcgtcgtcgagtccgagcttcgcatccccgtcatctaccttctgtcgaagatggaggaggaggacatggtcgccggcgaggacgcggagttcctgaaccacctcctgctgacggcgacctacatcgtcaggaagccgctcaaccccaccgtgatggcccggctgtggagggtggtggcatggcgcatgtactgcctggaagaaaggattcaggccaatgtcgctgccaatgctggcgctggtggcgaagacgacgacgacgacgacgacgtagttatcgtcgaggagccccaagtgcacttcaaggtggtgagaagaacgtccggtggcagcaggaagaggcagctgacaatcaacgtcgtcgacgacggcaaccgcggcagcggcagcggcggcggcggcggcggcggcgcagatgccaacccaaccaggatactgcagcacatcactagcaacttacaggaattccgcacgaagcaccagaagaaggacatggccatcgagcgtcccctcatctcgtcggactccatgttcctcaaagccatcctcccgacgctcaaaatctcaccatgcaaccccctgaccctcactggcggcatcggttcaagcagtgtcgccgcggaggccttcgctggcggcagctcttcagctgcaccacttcaaattccagttttccagcagcaatccaccggcaatggcaacacggtgattagcttcagcaacaatgcttcaccgatggccatgcgtgcgccaaccgacaatactatgatatcgttcaacaatgtctctgctgcgccggtcgccaatgcggtgatctccttcagcaacatttctaggtctgctgccatgcaggcaccagcggcaagggggcaacatctgtccggtgatgtccagcagctggattttccccagcagaagctgtactttgggcccttctcctaccaagggcctccgccaccttccatgcacaaccacatcaacctactcccgccgacgtcctcccctgtgacctgctccatggacaaaggcaaggttcctattatcgagctcccatatgggatgcctgtggatgacttcctcgtcagtcaaaccacatatggcggtgccggaccatccatcggagccactgacgctgctgccgctgcgtacccttacacagatgcaccgagcaataacgttgcaactggctgtctcatggtgccaccaatggggccagcattcagtatcactgagccaactgtggtggcccaaggtgagggcaccggcaccggtgtcgacgccggcacatcagagaagaacgcgatagtagaagcaccaaacaaccccgcgccattaatggtactggatcaggttgctgctgatgctgcaatggatgttcaagaagacatcatgttctctttggaatctcttctggggccggactatgacctgctacctatggaagacgttagtgctccggacaccgctgcagccggtgatgcagctggtggctcactggacggagaggaaggcggcatggacattggttgggatctcgacctggatgacatcctggtggagaacgttaatgacttcgcgttcctggacaaccttgccgggagcgagtag

SEQ ID NO: 12728 - DNA, 567 bp, Oryza sativa
  Clone ID: TFbOSC407404j.C1.o6.fg
atgtcgtcgatcggcgccggcgcaggaggagccgtggtgggggcggccgtggcggcggtggcggtgggcggcggggcgccgccgcacgtcctcgccgtggacgacagctcggtcgaccgcgccgtcatcgccggcatcctccggagctcccggtttcgtgtgacggctgtggatagcgggaagagggccctggaactgctaggctcggttgcggtgatatgcagccgcaattttctcatgttcctttggctcgctcatcatcttgcaggaaccaaatgtgagcatgataatcacggactactggatgccggagatgacgggatacgagctcctgaagaaagtcaaggagtcatccaagctgaagaagatccccgtggtgatcatgtcctcggagaatgtgccaacaagaatcagcagattaccgagcacttaaccattgttcttccatctttgctctgttcgattggtttattaaccagatgccttgaggaaggcgcggaggatttcttggtgaagcccgtccggccatccgacgtgtcgcggctcttcagccgcgtgctaccatga

SEQ ID NO: 12729 - DNA, 867 bp, Oryza sativa
  Clone ID: TFbOSC405568j.C1.o1.fg
atgctcaatgtcatggtaatcgatgaagatagacgtcatgcctactctacaagttccatgctcactcaattcaacttttgtgtcacagtgtacacaagccccatcaaagcgctggattttcttgagaatcatgcacaagattttgatttggtactggcagaggtgcacatggaagagctgaatggttttgcatttcttacggcttctaggaagattcataaatccattcaagtgattaatctaaaagttgtacgaatggagaagataaagggtttgcttcaagatgactcatctaaaaatacgaaggtgatcaagaacaagggcaccactgattgcaatcaaattgctactcatgttcatcagatgcaagtcctcaatggagatgatgtttacaccgctatgagaagatccttgcatcttgggactatctttgatgagtccaactattccaatgatccttgcagcaatgaatataaagttggagaagatgagattggaggttatggctgtgccaatgaggcaaatgccacacactcatctgatgatcacaatgttgttgttcctgatctatcctgcaatatagcagatgatgtttcacaggagattatgagcaaggctactacttgtgttgatcatcggaagcaagacaccacacgaactgatgggccagcagctatgagtgctgatgaagctaatgctacattctcaactggtaacctgcagcaggttaatgtcattgtgacctgcaatggagatggttcacaagagagcatacagaagaatacttgtgatgaccagcatgcccccacaggaagtaagccagaaactttcagacttgtgaactattcagactccgagagcgattaa

SEQ ID NO: 12730 - DNA, 759 bp, Oryza sativa
  Clone ID: TFbOSC405568j.C1.o4.fg
atggctcaaagggtaggacactctgctgatggggtttttgtcatgatcgttgatgaagataagtcacatgccaacttcgcaagaggcatgctctccagcctcaattttcatgtgatagtgtactcaagtcctgtgaatgcactcgtttttctggagaataacgcacaagacgtcgctgtagtcttggcagcagtggacatgaaacaattgagtggttttcagttcctcgaagctgcaagagtgaaacgccaggaccttcaagttatcatgatgtcagctgagacaacaatgtccacaatgatgaggtgtgttaaactcggtgcacgttttctagtgaagaagcctcttaacgaagaaactgtaggtaatctgtggcagcatgttgacctgaaagttttgaagatggagaagatcagggaattactgcaagatgaaaataatgaagaggaggaagtgaattcctttgaagctaagaaggctgattcagttaaagttcaatcagatgagaagggacatgacaatgctaaaatctctaacactgctgctgctgaagggtctgatgaaaaagtctctagtggtgatggtcatgtagtgcctaaagcgtataataatgtgaatgttgaagagagcataggtagtaacaatacttcaggtgaacaagtctccgacaagatcaagagtgatgcaagagttggggtgatccttgtggactacccagattttgaggatgatgagaccaagaaacccacaagcacttag

SEQ ID NO: 12731 - DNA, 882 bp, Oryza sativa
  Clone ID: TFbOSC421794j.C1.o4.fg
atggcgactaggcttggcagggaagccaggggggagcggtgggttcaggggatagcggcctacgtgcatgggggtggcaggctaggaacacctgacagggagaggtggcggtggggagaggtgacacggttgaggaagggggctgaggtagggagagagtacgggcggagcaggtgggagtacgacgggcaggagacgttgcctggggacgggaccccgaccccctggtacagtacgggcatacgtactatgagggtgccggcggcggtgacgggagggtgcggatgcggtgtcgacggcggcggaggttgctgccgcggtggtggcaagctcgccgactgggaggaggggaaggatgatgagatgaagagtgtcgtcgtcaagggctggacgaggatggcgcaagtggtgccgctgcacgacaacgcatcggcagaggacgacgacgacgacgaagaagacgatgacgaagatgatgatgatgatgacgacgaggacgatgaggaggaggcggcgccgccgtacgtgatggccgtcgatgacagctccgtcgaccgcgccgtcatcacggcgctgctccggcgatccaagtaccgcgtcactgccgtagacagtgggaaaagggcgctggagatattgggctcggaacctaatgtgagcatgatcatcacggactactggatgccggagatgaccgggtacgacctgctcaagaagatcaaggaatcgtctgagctgaagcagatcccggtggtgataatgtcgtcagagaacgtgcccacaaggatcagcagatgcttggaagaaggcgcggaggacttcctgctcaagcccgtccgaccggcggacatctcccgcataaccagccggatgctgcagtga

SEQ ID NO: 12732 - DNA, 1833 bp, Oryza sativa
  Clone ID: TFbOSC404834j.C1.o7.fg
atgcaaaacagcattgatcttgttttgacagaggttgttatgcctggtgtatctggaatttctctattgagtaggatcatgaaccacaatatttgcaagaatattccagtgattatgatgtcttcaaatgatgctatgggtacagtttttaagtgtttgtcaaagggcgctgttgacttcttagtcaagcccatacgtaagaatgaacttaagaacctatggcagcatgtgtggagacggtgccacagctccagtggcagtggaagtgaaagtggcattcagacacaaaagtgtgccaaatcaaaaagtggggatgaatccaataataacaatggcagcaatgacgatgatgacgacgatggtgtaatcatgggacttaatgcaagagatggcagtgataacggcagtggcactcaagcgcagagctcatggacaaagcgcgctgttgagattgacagtccacaggctatgtctccagatcaattagctgatccacctgatagcacttgtgcacaagtgatccacctgaagtcagatatatgcagcaatagatggttaccatgtacaagcaacaaaaattccaagaaacaaaaagaaactaatgatgacttcaaggggaaggacttggaaataggttctcctagaaatttaaacacagcttatcaatcctctccgaatgagagatccatcaaaccaacagatagacggaatgaatatccactgcaaaacaattcaaaggaggcagcgatggaaaatctggaggagtcaagtgttcgagctgctgacttaattggttcgatggccaaaaacatggatgcacaacaggcagcaagagccgcaaatgcccctaattgctcctccaaagtgccagaagggaaagataagaaccgtgataatattatgccatcacttgaattaagtttgaaaaggtaccatacacctgtggcttccaatcaaggtgggacaggattcatgggaagctgttcgctgcatgataatagctcagaggctatgaaaacggattctgcttacaacatgaagtcaaactcagatgctgcaccaataaaacaaggttctaatggtagtagcaataacaatgacatgggttccactacaaagaacgttgtgacaaagcctagtacaaataaggagagagtaatgtcaccctcagctgttaaggctaatggacacacatcagcatttcatcctgcacagcactggacgtctccagctaatacaacaggaaaagaaaagactgatgaagtggctaacaatgcagcaaagagggctcagcctggtgaagtacagagcaacctcgtacaacaccctcgcccaatacttcattatgttcatttcgatgtgtcacgtgagaatggtggatccggggcccctcaatgtggttcatccaatgtatttgatcctcctgtcgaaggtcatgctgccaactatggtgtcaatggaagcaactcaggcagtaacaatggaagcaatgggcagaatgggagtacgactgctgtaaatgctgaacggccaaatatggagatcgctaatggcaccatcaacaaaagtggacctggaggtggcaatggaagtggaagcggcagtggcaatgacatgtatctgaaacgcttcactcaacgagagcatagagtggctgcagtgatcaagtttagacagaaaaggaaagagcgcaacttcggaaaaaaggtgcggtaccagagcagaaagaggctggccgagcagcggccaagggtccgcggacagttcgtgcggcaagctgtgcaagaccaacaacagcagggtggtgggcgcgaagcggcagcggacagatga

SEQ ID NO: 12733 - DNA, 602 bp, Oryza sativa
  Clone ID: TFbOSC8667j.C1.o1.hg
atgtcaaaaccatcgccgccctggaaagcgacgcggcgatcgaacgcgatatcatatcgaatcatctccacttctcgatcttcttcagttggccgtgccaggcgtcaccggatccgcgccttcagatttgggaaagttgctggctgcatcgccaagatttggctggggaaagttggtagcaaccgagaaatcgtccgatcaggaggatttcttggctgagaagagaaaaacatatctgtgctagctttgccttcttccatggcagtggctatagaggctccgttccatgtcctggctgtggatgatagccttcctgacaggaagctcatcgagaggctactcaagacctcttctttccaagttaccactgttgattccgggagcaaggctctggagttcttggggctccatgatcatgaggacagcccaatttctactcaatcagatcagcaggaggttgcagtgaacctgatcatcacagactactgcatgcctggcatgacaggatatgatcttctcaagaagatcaaggaatcgtcttatttaagggacatcccagttgtgatcatgtcatcggataacattccttcaaggatcaatag

SEQ ID NO: 12734 - DNA, 675 bp, Oryza sativa
  Clone ID: TFbOSC400220j.C1.o88.gm
atgacgccctccaggacaggtaggggaccggcggcggcgggagccgcctcgcctcgcctccgccgcgctcgcctcctccgcggcacctcgccgccgctcgcctcctctgccgccgccgcctcctccgccgcatcctcggccgccgccgctcgcctcctctgccgccgctcgctgcctcatccctcgccgccgctgccgctcgccgcctcatcccccaccgccgctcgccgtcccctgcctgccgctgactgtaggagagatatcgatctgatggccacctgcaggagccgtggcgtcgagaggggcggcgcgccgcacgtcctcgcggtggacgacagctccgtggaccgcgccgtcatctccggcatcctccggagctctcagttccgcgtgacggctgtggacagcgggaagagggcattggagctgctaggctcggaaccgaatgtgagcatgattatcactgactactggatgccggagatgaccgggtatgaactcctgaagaaggtcaaggagtcgtccaggctgaaggagatccctgtggtgatcatgtcctcggagaacgtctctacaaggatcaacaggtgcttggaggaaggagcggaggatttcttgctgaagcccgtgcagccgtcggacgtgtcgcggctgtgcagccgcgtcctccggtga

SEQ ID NO: 12735 - DNA, 384 bp, Oryza sativa
  Clone ID: TFbOSC400542j.C1.o8.fg
atggctcgcaagatgatcagggtgctcctcgtcgaggacgaggagatcaatagggtcgtggcgagagcggcgctgaaggcggcaggcggcggcgacgtcgtggacgaggcggagaacggggaggtggcggtgcagcgggtgcgggacgcggcggcgccgtacgacctcgtgctcatggacaagcagatgccggtcatggacggccacgaggcgacgaggcggatccggggcatgggggtgaccacgccgatcgtcgccgtgtcgagcgacggcctccccgccgacgtcgacgcgttcatcaccgccggcgccgacgacttcacgtccaagcctctgtccaaggagaagctgggagtcatccttgccaaatttagacttgcttaa

SEQ ID NO: 12736 - DNA, 3147 bp, Oryza sativa
  Clone ID: TFbOSC412867j.C1.o3.fg
atgagggaggtagaagaagttagcaaatggagacgccgttgctgctacttctggatcctattcccgttggctgtgattgcaacatgcatgacaatcacagtagtcaccttctgctcctctacgatgtacatgacagaggtgatgggtgaggccaccaagggcgccatggattcggctttgatgcacatcgccggcaacatgcgacctcttcttgaagcaaatcgctcagttttcaccattgccaacaccttgcatgttcagggcaacatggcttccttttctcatgtgggacccaagctgttcttggccttctccatgcagccgctgcaagctcaaatctcctacgccgccgtcgatggcgccgccttcgcctactaccgcgccggcggcggcgacggcgaggcgagagcgatgttcgcgaggccgaacggcacgtggttcacccaggcggttgatccggcgaccggccggcccgtcgggaacgccacggcggcggcgccgcaccagcagctgccgcccaacgtgacgcggctcctgctcgacggcggcggcggcggcgcgtctctcgccgacgggtgggcgcgccccggcgtgcggatgctgttcctctcggccccggttggcggcggcggcggcgcggtctccgccgccgtggccgtcgacgacgtcgtcctccgtggcgccgccggccttaggcagctccgtgacctgggcatgtactacgcggtcgccggcaacggcggcgccaccgccgcaccaccagcaccggagccggcggcatatagatctttgctcggcgacggcgccgcggcggaggagatggcgttgttctcgagcgtgaagtgcaccgcgtccgccattgacgcgccgcccaagctcgacgtgcacggtgtcaagtctgacaagtacagattcgcgtgcaccaactttgacatatccggagtacaaatgggtttcagggtggtgctccggaagagcgcgatggtgggcgtgttccggcggggcggcgtgacgatggtggcggtggcgtgcgcggcggcggcggcggcgacggtggcgtgcgtgctgatggcgcgggcgctgcggcgggcggtggcgagggaggcggcgctgggcgccgacctcgcgaggcacagggacgcgctccggcaggcggagcgcaagagcatgaacaagagcaacgccttcgccagcgccagccacgacatccgctccgcgctcgccgccgtcgccgggctcgtcgaggtgtcgcgccccgaggccaaccccaacatcgtcgacaacctcaaccagatggagctctgcaccaacaagctgcttgatatactgaactcaatactagacacaactaaggtggaatcagggaaggtgcagctggaggaagtggagttcaacatggcagacgttttggaagaatccgtggacatggcgaatgttgtcggcatcaccaaagggatcgaagtgatctgggatccctgcgatttctctgtcatgaaatgcgacaacatcatcggtgatagtaagagattcaagcagatccttgacaaccttcttggcaatgccatgaaattcacacaagaaggtcatgtaattctccgggcttgggccaataggccgattgcgaggggttcaatcggtgctccttcgagatttgcttatcgaagcctcgagaacaatttcttcagcttcttctttggagcaaaggaagacagagtctcgcagaattctttcaatcctttgcagaatgatcccaactcggttgagttttactttgaggtagttgatactggcattgggatccccaaggagaagagagagtctgtgtttgagaactatgttcaggtgaaagaagggcatggaggcactggtcttggacttggaatcgtgcaatcctttgttcgtctgatgggaggagagataagtatcaaagaaaaggaaccaggggagagaggaacatgctttgggttcaatgttcttctgaagactagtggaaaccaagcagctgaagaagatatagaggaagggccatcaacagtgagtgaattagacatccgagcctcagtgttcagggagactaactgcttcaagggttggcattgcatcctctttgttcatggtgatgagaccagaagagtcttgcaagcttggatggagagcattgggatgaaagtttggatggtcccaggagttgagtccatctcttctacattggagaaggcgcgatcctcccgcgatgattgtgatgtcgatcgatgcttcagctccaaggagatggtcagccaggttcttccaactacattgaggaacaataatatcatggcacgcaatcttggagagcatcatccacttggcatgcttctcattgttgatgtgtcaaatgggcagcttgagaatattcagagacaggcaagagattttacccaaatgaggagtcaagttccatgcaaatttgtctgcttgactgatctgaggacctcttataaagattttagaaggtttgaggagatgagctgcgatctcatcttgcgaaaaccggtgcacgggtctcggttgtactctcttcttatgactctaagagatgtccagtcctcgcctatgcacagatcatctcttgttggccatgagaattatgtcactaggcatcaagattctgcaaatattgttgcattagctgaagttggacgcttggatcaggggctaaaaactgaagaagataggccattggatggcatgcatgtgttgctggttgaagacactttggtgctacaaactattcagagaaagatgttgaaccaactaggagcaatagttgaattggcaggggatggagctaaggctgtggatatgttcagagatgctattgagagagcaagtgtttcagaagagcatagtgtacccttgccctatgatgtcatcttcatggattgccagatgccgcgaatggatggctatgaagcaactaggcgcatccgcgaggaagaaagccgctacggaattcgcactccgatcattgcattgactgctcattctatggaggatgatcttcagaaggctattgatgttgggatggatctacacatgacaaagccgatagagaggagaagaatagtagaagctgttcatggtgtctgcaaaggcaaaaactga

SEQ ID NO: 12737 - DNA, 1998 bp, Oryza sativa
  Clone ID: TFbOSC406972j.C1.o7.fg
atggggggtggagtggaggagaggaaggtggtggacttggaggacggggacggggaggaaggggaggatgcggcggcggtggcggcggggtcgagcagggagacgcggatgctgccgaggatgccggtgcgggtgctgctcgctgagggcgacgactccacgcgccacatcatctgcgcgctgctccgcaagtgcgggtatcgagttgccgcagcctctgatggtgtgaaagcgtgggacatactaaaggaaaaatctttcaatatagaccttgttttaactgaagttgaacttcccttgatgtctgggttcctgctgctctccacgatcatggaacatgacgcatgcaagaatatccccgtcataatgatgtcttcaaatgattccgttagcatggttttcaaatgcatgctaaagggtgctgcagatttccttgttaagccaatacggaagaatgaattaaggaacttatggcagcatgtttggagaaaacaactgtccagcggtgttcttgatgtgcagcatactcaacaagaagataatcttacagaaaggcatgagcagaagaccggagtgacgaaagctgaacatgtgactgaaaatgttgtccacaagaacatggaatgcagtgaacaagaaagtgatgctcaaatgtatttagcccttcagatctgcatcaatgttggtgaactaatttatcaatttttcaagtcagcgaaatgtcacagttcggtcctcttgggtattgcaaaatggagtacatatgacaacagtaagagttcatgtacaaggtcagaactggaggctgacagtaggcaaaccaacaatttactggaatataagcagccaatgggaaggcatttctccaagcctgaccacaagaacaccgagaaaaatggagggactaaaattcatgcatctaatgatggcaacttgattccacggagggaagaggatgcatcactgaggaggatgacatgttcaaatgatattaattgtgagaaagcttccagggatatggagctggttcatattattgacaatcagcagaagaataacacacatatggagatggatgttgcgagagcaaattcccgtggaaatgatgacaagtgcttttccattccagcacaccagttagaactttctctcagaagatctgactacagtagattagagagccaggagaaaaatgaacgaagaacactgaaccactcaacttcatctccattttccttgtacaactgcaggacagcatcatctaccattaatgctggtgatgctcaggcatgcagcacctcggcaacacatatagatcttgaaaacaaaaatggagattccaaaactccctctcaagacaagagggaaacaaaccaacctcccattagagttgtaccatttcctgttcctgttggaggactaacatttgatgggcagccattctggaacggtgcacctgtggcatcccttttctatccacaatcagctcctcccatttggaatagcaaaacatctacctggcaagacgcaaccacacaagcaatttctctgcagcagaatggtccaaaagatacggatactaagcaggttgaaaatgtagaggaacaaactgctcggagtcatctaagtgctaatcggaaacatctccgcattgaaattcctacagatgagccgcggcatgtttctccaaccaccggtgaaagtgggagcagcactgtgctggacagcgccagaaaaacgctcagtggcagtgtctgtgacagctcttccaaccacatgattgcccctactgaatcatcaaatgttgttcctgaaaatcctgatggtttacgccacctgagccaacgagaggctgcactgaacaagttccggcttaagaggaaagacaggtgctttgagaagaaggtgcgataccagagcaggaagctactagccgagcagcgaccgcgggttaagggtcagtttgttcggcaagatcatggtgtccaagggagctag

SEQ ID NO: 12738 - DNA, 3075 bp, Oryza sativa
  Clone ID: TFbOSC415694j.C1.o3.fg
atggggaagccggaggcgaggagtgggtggaggaacgcggcggcggcggcgtgggtgctggtggccgtggcgtgcgcggcgtacatgcactggcacctgcggcgggagaccatggaccgcgccgaggagcggctcgtcagcatgtgcgaggagcgggcgaggatgctgcaggagcagttcggcgtcaccgtcaaccacgtccacgccctcgccatcctcatctccaccttccatttcgagaagttcccgtccgccatcgaccaggatacatttgcaaagtacacggcaaggacatcgtttgagcgcccactgctgaatggagtggcatatgcgcagcgtatcttccatcacgagagggaaatgtttgagaaccagcagggatggattatgaagacgatgaagcgacaggctgcgcctccacaggatgagtatgccccagtgattttttcacaggatacggtttcctaccttgcacgtatcgacatgatgtctggggaggaggaccgggaaaacatcttacgtgcaagggctaccggcaaagctgtgttgacaaacccattcaggttgcttgggtcaaaccacttgggggtagttctcacttttgctgtgtatcgccctggtctagctgctgatgcatcagttgaggagcgtgtggaagcaactgctggttgtttggttgttgtggtctcatcaaatcaaatccctactaacagatatcttggtggagcttttgatgtggagtcactcgtggaaaatttgctgagtaaacttgctggcaatcaggatattgtagtgaatgtgtatgatgtcacaaatgcttctgaacctatggccatgtatggtcctcaaagtccagatggtaaagtgtccctcttccatgtgagcacgcttgactttggtgatcctttcagggcgcatgaaatgaggtgcaggttggtagcttctttctcatggcataaatttgttggttgcttcttacttggctcttgcactaattctggcaacctgagcaggtataggcaaaagcctcctctgccatggtctgctatcactaatcctttgggaacttttgttatatggatgcttgtggggtatataatttgtgccgcatggtctcgctatgataaagtttcagaggattgtagaaagatggaagagctcaaaactcaagcggaagctgctgatgttgctaagtcccagtttctggcaactgtatcccatgagatcagaacacctatgaatggcgtccttgtcgtccagcgatctaaaattctaccttttgatgtaggaatgctcgacatgctcttggggacagatctgagtatgactcagaaggattatgctcagacagcccagatgtgtggcagagcattgataacactgataaatgatgtacttgatcgggctaagattgaagcagggaaattggagcttgaggcagtgccatttgacctgcggtctctcatggatgatgtgatctccttattttcttcaaaatcaagagagaagtgcattgagcttgcagtgtttgtatgtgatgatgttccaaaagttgttattggagatccatggagatatcgacaaatactgacaaatttggtgggaaatgcagtcaaattcacagaacggggccatgtatttgtgcgagtctgcctggctgagaactcaaaagtggaagctaatcaagtccttaatggaaccatgaatgggaaagacggcaaagttgagactacagctaatggcgccttcaatactttgagtggttttcaagccgcagatgagcgcaataactgggattattttaagctgctgctatctgataaagagccccatatggatgagcttgagtgcgacagatcttatcaaaatgattgtgactgtgtgaccttgatgataagtattgaggatacaggtgttgggatcccattacatgcacaagatcgtgtttttacgcctttcatgcaggctgatagttcaacttcaaggaactatggtggaactggcattggtttaagcatcagcaaatgtttagctgaacttatgggcggtcaaataagtttcactagccgtccatttgttgggagtacatttacattctcagctgtcctcaagcgctcatgcaaagatacttcaagtgattcaaagaggagcttatctgaggcactaccaactgcctttaagggaatgaaggctattttagtagatgggagacctgtacgtggagctgtcacacgatatcaccttaacaggttgggaatagttgttaaagttgtgaataatttgagtatggggcttcagactttagctggacaaaatggtgtgaaagagtccagggagaaactgtctatgctttttatagagagtgacatctggaggcctgagacagatatcctattattgaatcgtctgcatgagctaaagaataatggtcaggtgcatgagttgccgaagctagttcttttggtaacatcagaagctgacaaggacagatatggatccgcatttgatattgtgatgtataaacctataagggcaagcacaattgcttcttgccttcaacagttgctaaaagtagtgatgcctgaaaggaaagacaatcaaaataggccctcatttctccgcagcttgctgattgggaagaatatattgattgtagatgataataaagtcaatctcagggttgctgcagctgcgctcaagaaatatggtgccaaagttcattgtgttgaaagcggcaaagatgcagtctccttacttcaacaaccacactgctttgatgcatgctttatggatgttcagatgccagagatggatgggtttgaggcaactagacaaataaggcaaatggaggtaaaagcaaacgaggaaaggaaggcgttggatttaatggagggttcaacattcgtcgagtcccatttgcctgttctggcaatgaccgcggatgtcattcaggcgacatatgaagaatgtataaaatcgggaatggatggttatgtgtccaaacctttcgacgaggagcagttataccaagctgtctccagattagtggtgggaacgaaggaatcagcggtatga

SEQ ID NO: 12739 - DNA, 2409 bp, Oryza sativa
  Clone ID: TFbOSC403629j.C1.o1.fg
atgggtagcgcctgcgaagctggtacggacgagccttcccgagacgatgttaaggggacagggaatggcatcctggagaatggtcatagtcacaagccagaggaggaggaatggaggaatggcatgggagaggacttacccaatgggcacagtacaccaccagagccccagcaaacagatgaacagaaggagcaccaagtgcagattgtccggtgggagaggttcctccctgtgaagacactgagggtcttgctggtggagaatgatgactctacccgtcaggtggtcagcgcactgcttcgtaagtgttgttatgaagattcaagagggttctgcgcttccagatttccaagtgcagttatccctgctgaaaatgggctacatgcatggcaatgtcttgaagatctgcaaaaccacattgaccttgtattgaccgaggtcgtaatgccacgtctgtctggcattggtctgcttagtaagatcacaagccacaaaatttgcaaggatattcccgtgattatgatgtcttcgaatgactcaatgggtacagtctttaagtgtttgtcaaaaggagcagttgactttctagtgaagcctatacgtaagaatgaacttaagaacctttggcagcatgtttggagacgatgccacagttccagtggcagtggaagcgaaagtggcatccgaacacaaaagtgtaccaaaccaaaggttgatgatgaatatgagaataacagcggtagcaataatgacaacgaggatgatgatgacaatgatgaagatgatgacgacttaagtgttggacacaacgctagggatggcagtgataatggcagtggcactcaattttctctaaatgtaggacaattgtgccaatgtattctcatgccatcagcctgttttaaaacacagagttcatggacaaagcgtgcagtggagattgacagcccacaacaaatgtctcctgatcaaccatccgatctaccagatagtacttgtgcgcaagtaattcaccccacatcagagatatgcagcaacaggtggttaccgactgcaaataaaaggagcggaaagaaacataaagaaaataacgatgactccatggggaagtacttagaaataggagctcctagaaattctagtatggagtaccaatcttctccaagagagatgtccgttaatccaacagaaaaacagcatgaaactctcatgccccaaagtaaaacaacaagagaaacagatagtaggaacacacagaatgaaccaactactcaaactgttgatttaattagttcaatagccagaagcacagatgacaaacaagtagttagaatcaataatgctcctgattgctcctccaaggttccagatggaaatgataaaaatcgtgattctctcattgatatgacatctgaagagttgggtttgaagagattgaaaacaactggatctgcaactgaaatccatgatgaacgaaatattctgaaaagatcagatctctcagctttcaccaggtaccatacaactgtggcttctaatcaaggtggagctggatttgggggaagctgttcacctcaagataacagttcagaggctctgaaaacagactccaactgcaaggtgaagtcaaattcagatgctgctgaaataaagcaaggctccaatggtagtagcaacaacaatgacatgggctccagtactaagaatgccatcacaaaaccttcttcaaacaggggaaaagtgatatcaccatcagctgtcaaagctacccaacatacatcagcattccatcctgtgcagcgtcaaacgtcacctgctaatgttgtagggaaagacaaagttgatgaaggaattgctaatggagttaatgtgggccaccctgtagatgtacaaaatagctttatgcagcaccatcatcatgttcattactacgtccatgttatgacacagcagcagcagcagccatccattgagcgaggatcatcagatgctcagtgtggttcatccaatgtatttgatcctcccattgaaggtcatgcggcaaactatagtgtgaacgggagcttttcaggtggccataatggaaacaatgggcaaagaggacctagtactgctcccaatgttgggaggccaaacatggagactgttaatggtatcgtggatgaaaatggggctggaggtggcaatggaagtgggagcggtagtggtaatgacttgtatcagaatggggtctgttaccgagaagctgcattgaacaaattcagacagaaacggaaagtgaggaactttggaaaaaaggtgcgctatcagagcagaaagaggttggctgagcagcgccctcggatccgcgggcaattcgtgcgacaatctggacaggaagatcaggcaggccaagacgaagacagataa

SEQ ID NO: 12740 - DNA, 2691 bp, Oryza sativa
  Clone ID: TFbOSC900171j.C1.o16.fg
atgtctcccgacgccgacgcggcggcggcggcggcggccggcggcgagggcgcggcggcggcgggggtggggacggcgggtgaagggcggggggtgatccggtgggaccagatcctgccgcggcggtccctccgcgtgctgctcgtcgagcacgacgactccacccgccaggtcgtcaccgcgctcctccgcaagtgcggctaccgcgtggcggcggtggcggacgggatgaaggcgtggggggtgatgcgggagcgggcgtacgccttcgacctcgtgctcacggaggtcactatgcccacgctctccggcatcgagctgctctccaggatcgtcgcctccgacgagtgcaagaacatccccgtcataatgatgtcgtcccaagattctattggcacagtgctcaggtgcatgcagaagggtgcggtggatttccttgtgaaaccagtgagaaagaatgaattgcgtaacttatggcaacatgtatggaggcgacatgcaatgaatagccaaacaaatgcatcggaaaacaatgcggctagcaatcatttaagtgccaatggtggtaatgggtcaaagacaggagaacacagcgatgaggaaagtgatgctcagagttctggtagcaaaagggaggttgaaattcaaagtgctgaaaagttaccagaggttgttgcagatggtggggcaggctcatccagagaacataaaatacagaatggtttcattgatggaatgaacacaaaatcacatgcattaaagggtaatgatgatgctccaagtggaaacgcgtgtggtgatagtgaactacaagtgctttcaactgagaagaatgtgcgttccaaattccttaatggtattacttctgcgaaggttgctggacagataatggataatgccttgaggtttgctgattcaagttcacttcgttcaagtgatcctggaaaagatcttttggttgttgcccagaccacagctgacagaaaatgcaaatcttcagcactggaaaataatgctgtcatggaaaataaccttagtgaaaattcaaaggggactgcaacaggccatgctgaatcttgtccgtctcactttgtggagataaatttagaaaagcaacatcatctcaatggttatacaaaccacaagttgaatgagaaagatatctttaatcactcaaattcctctgccttttcgaggtatggtaataagaggatagaatcatcagctcaacggccatttcccccttccttccgcgtggttcaccaacaacctgtttacgacaagaatccccaatccagccgggtcttgctttcctgtgaacataatacacgcgagagtacagtgcaagctcaggtccctttggacagaagcacagagggtgctgcaatcctgtgttccagtagtgtaagagaagatgctggtacaagcagttcctctcctagaaaggacagtttaactcatccttcttatgggtttatacctgttccaattcctgttggtgctgctataccctaccactacggtgcaattatgcagccaatgtattatccacagggtgcttttatgcattgtgattcagctgccatcaacaagacagcaattcagcatgtctcttgtcaatctaactaccatgaaaatcttggtaaaccgccacagattgatgagcacaagcagccagaagaaaaccatcagttgcatcattcaagacaaattctccgagaatcaggagaaccagttgacttggcgaaggctcatatggagcgtattaaccagagtgctagctgtagccaggatattcgcaaaggaagtggatgcactgggagcggtgaaactgatgcaaatacaaatacggtaattgcactagaaagtggcaatgagagcggtgtccagaactgcagtaataatgtattggatggtgaccggtctcgccgtgaagctgccttgttgaaattccggatgaaaagaaaagatagatgtttcgagaaaaaggtcaggtatcatagcaggaagaagcttgcagaacaaagacccagggttaagggccagtttctaagcagcatcagcaatggtgggaggaggagcagtggtggggccggccgtgatgctggccgtgtccgtgatcgtcttgctgtcggcggcgtgctccggcgccggcgaggggccggacgcgagcctgctgtgcgtcagcgagtgcgggacgtgcccgacgatatgcacgtcgccgccgccgccgcctccgcccgcgccgccgtcgtcgttgtcgccgtcgacgccgtccgtgctgccgctgtactcggcgcctccgccgccgtacctgacgctgctgctcccgccgccatctccggcggacgagagcgacatgttcccgcctccggaggcgccgacgacgacgaacccgccgccatcaccgccgcctccaccgtcgtcaccaccgccgccgacgacgaagagcagcagcgggtcgacggcgtcgccgccgtcgtcctcgtcccacttctcatcgccgccgtctccgccgtcgtcgtccaacccgtactactacttctacctctccggcagcggcaggcgctgcggcggcggcggcgcggcgagcgtttacacggcgctgatcctagcggcgttgctgcccatcgccacattcctgacgtgacaacgcgcacgaattttagcgcacgatatgatcggaattaa

SEQ ID NO: 12741 - DNA, 2907 bp, Oryza sativa
  Clone ID: TFbOSC415438j.C1.o1.fg
atgggggacgaatacctggctgagcctgaggatgaggtggccatatcaatgtggcctgagaatataggggataaacaccagaagcagttcaaaatggaaaagcttgggaaggaccaagatgcacttgaggatgctaattttcaacagaagccttcttctgtggatttgaaccgccttatggaattggcgaattctgagaaaggcgtttctcaaatgcaatactttgtgaagcactgggaatataagagggcgaatactgctcggcttctaaaggaacaaattggtcttctttgccaacagaggaaagagattgaacaaaggaagcaacaaatactggaggaacaacaattccaggatgaaagttattatgctgttaagtggcaagtaccaatactagatgaagtttacaaagatgaatggaagcgtccgagcaaaaagaatgatgacctttctcataatcaagaacttaaaatagatgcagaatatgacagtatttcgtactggaaagagagagcgatgcaattagaaaagacacttgaggccagtcttcaaagggagcgttcattggaggaaaagttggaggaaaacataaagaatcttcagtcacataccccagttgaggaattctctggaatgttaaaacgggctgattacttcttgcacttggttcttcaaagtgctcctattgttattgctcatcaggatgctgacttgcggtaccggttcatatttaatcacttcccgacattggctgatgaggacgttattggtaagacagattatgagatattgtcaggtgagggtatagaagagatgaataatgtcaagaaggaggtcatggccagtggtaaggctactaagagagagtttgtatttaatacaccgttgtttggagcaaaaacctttgtgacatacattgagccagtattcagcaaatctggggaaacaattggtgtgaattatgttgcgatggacataacagatcaggttacacgaagagagaaaatggcggacataagggtgagagaggctgtccaaaaggccaaagagacagaacttagcaaatctcttcatataacagaggaaacaatgcgagcaaaacaaatgctggccaccatgtcacatgagatcaggtcccctctttcaggggttcttagcatggctgaaattcttgcaactaccaaattggataaagagcaatatcagttgctagaagttatgctgtcatctggagaccttgtattacaattaatcaacgacatccttgatctttccaaagtagagtcaggggctatgaaattagaagctacgacatttagaccaagggaagtagttaaacatgtactccaaactgcggcagcatctctgaagaaggaattgatccttgaagggtgcataggtgataatgttccattggaggtcactggtgatgtgctaaggattcggcaaattctgactaacctaatcagcaatgcagtgaagtttacacatgaagggaaggttgggataaatctacatgttctagacaagcagttaccaggatgtagaatagaaggtgggcaacttcattcaaaagctcattctgcaccagctgccgcagcagaacatttttctgcttctccaagaaaatgcgataatgatactttgggctgctccaatcatgaagatgcttgtcagactggcattccatcaaatgataactttggggagcatcatgagggagatgaagttgtttggcttcgctgtgatgtatatgatactggaataggaataccagagaaatccctgccgttgctattcaagaggtatatgcaagcaagtgatgatcatgcaagaaaatatggcggaacagggcttggccttgcgatatgcaagcagctggtggagttgatgggtggcactctaactgtggtcagcaaagagaatgaaggatcaacattttcatttgttctgccttgcaaaattcctgttaaggaggatcacagtgatgatccagatgatatgcccagttctggtggtgatttcactactagtgatatagaaggttctttcattttcaagccacaagcacggccttatcttttgacatccggagtttcagtaatgaacaacaccaagttgatcggtggcaaccaattctatgatcctccgaacatactagaagaccgtaagccgttctcaaatggtttcgtgttagcagaagatcattctacaaattctgcctctactgctcatcagtcaaatggtcctagtgttagcagaacaaacaaagaacaacatgataatgcaatggtcattgaactgaataggcaagctgaacgggtttccagttcacgaggtgacacgacatcagtttcagggctaattcatgatgaaaggggaccatgcagagttcatgaagaaaagtcacttcacaagaaatccaagtgttctccaagtagcaataaggcaaagatcctcctcgttgaagataacaaagtcaatataatggtggcaaaatcaatgctggagcagctcggccatggaatagatatcgtaaataacggactggaagcaattcgtgcaatacagaagcgccaatacgatattatcctgatggatgttcacatgccagaaatggatggtctacaagccacaaaatttatccgttcttttgagaatactggatgttgggacacttctgtaaagcccgaacacgatcagatcatagctggttcagataatttgtctgattgtgcacacatgaaaaagcaaggaaagcgggttcctataattgcgatgacggcaaattcattttcagagagcgccgaagagtgccttgctgcaggcatggactcctacatatctaaaccagtgaacttccaaaatattaaagaatgcctgcagcagtatttgcctccccagtga

SEQ ID NO: 12742 - DNA, 513 bp, Oryza sativa
  Clone ID: TFbOSC401250j.C1.o22.fg
atggcggcagcggcgcaggctccggcggcggcgaaggtggtggtggcgacgtcgccgagggcaggcggaggcggaggcggcggcggggacaggaaggtggtgccggttgtggtggcggcggcggccggcgacgaggcgcagagcgagatgcacgtgctggcggtggacgacagctccgtggaccgcgccgtcatcgccaagatcctccggagctccaagtacagggtgaccacggtggagtcggcgacgagggcgctcgagctcctctgcctcggcctcgtccccaacgtcaacatgatcatcaccgactactggatgcccggcatgaccggctacgagctcctcaagcgcgtcaaggaatcgtctcagctcaaggagatcccggtggtgatcatgtcgtcggagaacgtgccgaaccggatcagccggtgcctggaggagggcgccgaggacttcctgctcaagcccgtacgcccctccgacgtgtcgcggctctgcagccgtatcagatga

SEQ ID NO: 12743 - DNA, 513 bp, Oryza sativa
  Clone ID: TFbOSC900261j.C1.o15.fg
atggcggcagcggcgcaggctccggcggcggcgaaggtggtggtgtcgacgtcgccgagggcaggcggaggcggaggcggcggcggggacaggaaggtggtgccggttgtggtggcggcggcggccggcgacgaggcgcagagcgagatgcacgtgctggcggtggacgacagctccgtggaccgcgccgtcatcgccaagatcctccggagctccaagtacagggtgaccacggtggagtcggcgacgagggcgctcgagctcctctgcctcggcctcgtccccaacgtcaacatgatcatcaccgactactggatgcccggcatgaccggctacgagctcctcaagcgcgtcaaggaatcgtctcagctcaaggagatcccggtggtgatcatgtcgtcggagaacgtgccgaaccggatcagccggtgcctggaggagggcgccgaggacttcctgctcaagcccgtacgcccctctgacgtgtcgcggctctgcagccgtatcagatga

SEQ ID NO: 12744 - DNA, 1485 bp, Oryza sativa
  Clone ID: TFbOSC415117j.C1.o1.fg
atggtgggcgccggcgagggggatcgcgttggcggcggggcggcggtagggggagggcagcagttcgtggaccggagcaaggtgaggattctgctctgcgacagcgacccaagtagctcacgggaggtgctccgcctcctctgcaactgctcataccaagtgacttgcgccaagtctccgaggcaggtgatcaacgtactcaactgcgaggcgggggagatcgacatcatcttggccgaggtcgatctgcccgtctccaagtgcttcaagatgctcaaatacatcgccaggaacaaggaattgcgccacatccccatcataatgatgtccaacagagacgaggtctctgttgttgtcaagtgcttgcgtctcggggcagccgagtacctggtcaagccactgcgcatgaacgagctgctgaacctctggacccatgtgtggcggcgaaggcggatgcttggtttgtcggagaaaaacttcttcaatgacaatttcgagttggcgttatcggaacctagtgacgccaataccaacagcaccactcttctctcggatgacacagatgataagccaaaagaaaacattaatcaagaaacaagcacctcgaatcaacatgaatatgagtctaatccttctgatgctgagcctaaacaaaaaggcacaccagagggtttactagtctctactgaaggcggcgaccaagcttcttatgttaagtcaagcaccccaactaccagctcatttgacagcgaactacaaaaaggtggaaatcggttagactcttcggatcacaggggtaatttctctagtacaactgacagaagtgacactggcactgatgtaaatattcgggataaagaagcctttgagatgccagtgcaataccctgtggtatgcttttcttcctctaacttgcatctggagcgaagcaatgaaggccaaaatgatgcttcaggaactcctcctgtatatcattttcccttttattacccagggatgatggaccacggtatgacacatcctccggtgcaaaatttccaagggaacataaacaacgctcaagtgcatacaccacaaacgttgctccctcagtataatgtttatccccaatgtcatggtgtatctatgatgccaccatttcagtataatcctgctggtatgagcattcaatcaaatcaactgccaacacaaaatatgtggccacaggcatcaagcacaccaatgcccgaggaaacatgtagtcggtctgaacggagagctgcagcacttgccaaattcaggctgaaaaggaaggaacgttgttttgacaagaaggtgaggtacgtgaataggaagaaacttgctgaaacaaggccgagggtgcgagggcaatttgttagacaggcaaactatacagatataaccagcactggagatgatatctcagaagatgaagatgatgatccatcctccagggaggtagagatggtttcttctccagagtag

SEQ ID NO: 12745 - DNA, 2328 bp, Oryza sativa
  Clone ID: TFbOSC101556j.C1.o19.fg
atggcatcaattggatggcatctttccctggaacccaatatcgatagcttcactgttgcagacaacaaactggttctgctcaactttgagcagcagcagctagtccactggatgatgcctccaagattcagatgccaagattacctcctgccgctgctgctcgccctttcgccggccgccgccgccgcccgcgaggtggagtaccaccattgccactgcgacggcggcggcggcggcggcggcggggggttgtggagcatggacagcatcttcaggtggcagaaggtgagcgacctgctgatcgcggcggcctacttctccatcccgctggagatcctctacttcgtcgccgggctccggcatctcctcccgttccggtgggtgctcgtccagttcggcgccttcatcgtgctgtgcggcctcacccacctcctcaccgccttcacctacgagccgcacccgttcatggtggtgctcctcctcaccacggccaagttcttgacggcgctcgtctccttcctcaccgccatcacgctgctcaccctcatcccgcagctgctccgggtcaaggtgagggagagcttgctgtggctcaaggccagggagctcgaccgcgaggtcgtcctcatgaagcggcaggaggaggcgagctggcatgtccggatgctcacccacgagatccgcaagtcgctcgaccgccacaccgtgctctacaccaccctcatcgagctctccagggtgctcggcctcaccaactgcgccgtctggatgcccgccgccggcgagatgtgcttgacgcacgagctccggcgagacggcggcggcgaggatggcgtcgtcggcgtcgacgacgcggacgtcgtcgaggtgcgggggagcgacggcgtcaagctgctcgggccggactcggtgctcgccgcggcgagcggcggcaaggaggagggcaccggcgcggtggcggcgatccggatgccgatgctgaaggtgtccgacttcaagggcggcacgccggaggtgatccagacgagctacgccgtgctggtgctggtgccccccgccggcaagagctgggggcggcacgagatggagatcgtcgaggtggtcgccggccagaaccgcgagctgctgcaggcgcggcgcgacgcgctcatggcgaacgaggcgaggcaggcgttccagggcgtgatgagccaggggatgcgccgcccgatccactccatcctcggcctcgtgtccatggtgcaggaggaggccctggcgccggagcagaggctcgtcgtcgacaccatggcgcgcaccgccaccgtcgtctccacgctcgtcaacgacgtcatggagatgtcggccgacagccgcgagcgcttcccgctcgagacgcggccgttccacctgcacgccatgatcagggacgccgcctgcgtcgcccggtgcctctgcgacttcagggggttcggcttcgccgtgcacgtcgagaacgcgctgccggacctcgtcgtcggcgacgagcggaggattttccatgtcctgctccacatggtcggcaacctgattggccgcaccgagcccgggcatgtcacgctccgggtgcgcgccgccgacgacgacgtgctggacgacaggctcggccagaggtgggatccatggtggccgtcctactccactggctactcctcggtgaagtttgtcattggtgtcaagcggcagcagaacggcgatgccggctcgccgctgtcgcggaggccgagtgggaagggcattgatctcagacttagcttcagcatgtgcagaaagcttgtgcagatgatgcaagggaacatctgggcgattcttgatccccaagggctaccggagagcatgactctggtgctcaggtttcagctgcaatcgccactgacatcatcaagccttggaggatcattcgagcagaagcactcgtcgccgtcgtgccagattgcaggcctgaaggttctgcttatcgacgacgatgacgacatcaaccttgtggttgctcggaagctattggagaagctcggctgcgtggtctcctcgccgccttcaggatcaggatttctcagctctgttggctcctcagcagcagccttccagcttgtcatggtgaacctcgaaatgaagagagtaaaagcccttgatgtcgcgacgaggatcagccagtacaggagcggccgatggccaatcgtcatggccatggcttccgaccagaaggcctgggagaagtgcgctcaatccgggatcaatggcatcctcaagaagccggtgattctgcaggagttgaaagacgagctggcgcgaattcttcagagcacatga

SEQ ID NO: 12746 - DNA, 2400 bp, Oryza sativa
  Clone ID: TFbOSC101556j.C1.o3.fg
atggcatcaattggatggcatctttccctggaacccaatatcgatagcttcactgttgcagacaacaaactggttctgctcaactttgagcagcagcagctagtccactggatgatgcctccaagattcagatgccaagattacctcctgccgctgctgctcgccctttcgccggccgccgccgccgcccgcgaggtggagtaccaccattgccactgcgacggcggcggcggcggcggcggcggggggttgtggagcatggacagcatcttcaggtggcagaaggtgagcgacctgctgatcgcggcggcctacttctccatcccgctggagatcctctacttcgtcgccgggctccggcatctcctcccgttccggtgggtgctcgtccagttcggcgccttcatcgtgctgtgcggcctcacccacctcctcaccgccttcacctacgagccgcacccgttcatggtggtgctcctcctcaccacggccaagttcttgacggcgctcgtctccttcctcaccgccatcacgctgctcaccctcatcccgcagctgctccgggtcaaggtgagggagagcttgctgtggctcaaggccagggagctcgaccgcgaggtcgtcctcatgaagcggcaggaggaggcgagctggcatgtccggatgctcacccacgagatccgcaagtcgctcgaccgccacaccgtgctctacaccaccctcatcgagctctccagggtgctcggcctcaccaactgcgccgtctggatgcccgccgccggcgagatgtgcttgacgcacgagctccggcgagacggcggcggcgaggatggcgtcgtcggcgtcgacgacgcggacgtcgtcgaggtgcgggggagcgacggcgtcaagctgctcgggccggactcggtgctcgccgcggcgagcggcggcaaggaggagggcaccggcgcggtggcggcgatccggatgccgatgctgaaggtgtccgacttcaagggcggcacgccggaggtgatccagacgagctacgccgtgctggtgctggtgccccccgccggcaagagctgggggcggcacgagatggagatcgtcgaggtggtcgccggccaggtcgccgtcgcgctgtcgcacgcgacgctgctggaggagtcccgggcgatgcgggaccggctggcggagcagaaccgcgagctgctgcaggcgcggcgcgacgcgctcatggcgaacgaggcgaggcaggcgttccagggcgtgatgagccaggggatgcgccgcccgatccactccatcctcggcctcgtgtccatggtgcaggaggaggccctggcgccggagcagaggctcgtcgtcgacaccatggcgcgcaccgccaccgtcgtctccacgctcgtcaacgacgtcatggagatgtcggccgacagccgcgagcgcttcccgctcgagacgcggccgttccacctgcacgccatgatcagggacgccgcctgcgtcgcccggtgcctctgcgacttcagggggttcggcttcgccgtgcacgtcgagaacgcgctgccggacctcgtcgtcggcgacgagcggaggattttccatgtcctgctccacatggtcggcaacctgattggccgcaccgagcccgggcatgtcacgctccgggtgcgcgccgccgacgacgacgtgctggacgacaggctcggccagaggtgggatccatggtggccgtcctactccactggctactcctcggtgaagtttgtcattggtgtcaagcggcagcagaacggcgatgccggctcgccgctgtcgcggaggccgagtgggaagggcattgatctcagacttagcttcagcatgtgcagaaagcttgtgcagatgatgcaagggaacatctgggcgattcttgatccccaagggctaccggagagcatgactctggtgctcaggtttcagctgcaatcgccactgacatcatcaagccttggaggatcattcgagcagaagcactcgtcgccgtcgtgccagattgcaggcctgaaggttctgcttatcgacgacgatgacgacatcaaccttgtggttgctcggaagctattggagaagctcggctgcgtggtctcctcgccgccttcaggatcaggatttctcagctctgttggctcctcagcagcagccttccagcttgtcatggtgaacctcgaaatgaagagagtaaaagcccttgatgtcgcgacgaggatcagccagtacaggagcggccgatggccaatcgtcatggccatggcttccgaccagaaggcctgggagaagtgcgctcaatccgggatcaatggcatcctcaagaagccggtgattctgcaggagttgaaagacgagctggcgcgaattcttcagagcacatga

SEQ ID NO: 12747 - DNA, 699 bp, Oryza sativa
  Clone ID: TFbOSC400376j.C1.o28.fg
atgacggtggttgatgcggagtcgcggttccatgtcctcgcggtggatgatagcctgatcgacaggaagctcatcgagatgctgctcaagaactcgtcctaccaagtgaccactgtggattctgggagcaaggccttggagctgcttggattgagggatgagggtgatgactcctcctcttcaccttcttcctcctcacctgaccatcaggagattgatgtcaacctgataatcactgactactgcatgcctggcatgacagggtatgatctgctcaagagggtgaagggatcatcttcattgaaggacataccagttgtgatcatgtcttctgagaatgtgcctgcaaggatcaacaggtgcttggaagatggtgcagaggagttcttcctgaaacctgtcaagctcgctgacatgaagaagctcaagtctcacctgctcaaaaggaaacagcagctgcccatggctgctgctgcaccagataagccgccacacaaaccagatgaagctgcagcctcagcagctgcaattgctgaagctgcaacagctcaaaccgatggaatcatcagtgattgcagctgcagcggcagcagcaagaggaaggcggctgcaatggagcaggaggtcatctcctcacctgatcagaggacgaagccaagattgtcctccactagcagcggccttgcagtggagacctga

SEQ ID NO: 12748 - DNA, 2292 bp, Oryza sativa
  Clone ID: TFbOSC404904j.C1.o5.fg
atgccaccgatcccatctctgtggatccgcgtcttcttctcctggctgctgctgtcgctgcccgccgcggctgccgccgatttcagccactgcggcggctgcgacgacggcgacggcggcggcggcatatggagcacggacaacatcctgcaatgccagagggtgagcgacttcctcatcgccatggcctacttctccatcccgctcgagctgctctacttcgccacctgctccgacctcttcccgctcaagtggatcgtcctgcagttcggcgccttcatcgtgctctgcggcctcacccacctcatcaccatgttcacctacgagccgcactcgttccacgtcgtgctcgcgctcaccgtcgccaagttcctgaccgccctggtgtcgttcgccaccgcgatcacgctgctcacgctcataccgcagctgctcagggtcaaggtcagggagaacttcctcaggatcaaggcgcgggagctggaccgggaggtggggatgatgaagaggcaagaggaagcgagttggcacgtgcggatgctcacgcacgagatccgcaagtcgctcgatcgccacacgatcctgtacaccaccatggttgagctctccaagacgctcgagctgcagaactgcgccgtctggatgcctagcgagagcgggagcgagatgatcctgacacatcagctgaggcagatggagacggaggactcgaatagcctgtccattgcgatggacaacccggatgtacttgaaataaaggcaacaaaggatgcaaaagttctcgcggcagactcagcgcttgggattgcaagcagaggcaagcttgaagcaggtcctgttgctgcaatacggatgccgatgttgaaggcgtcgaatttcaaaggagggactccagaagtgatggaaacaagctatgctattttggtcttggtactacccgaggatggttcactaggatggggtgaagaggagttggagattgttgaagtggttgctgatcaagtcgcagtcgccctatcacatgctgcagttctggaggaatctcaattgatgcgagagaagctcgccgcgcaacacagggacttgctgagagcaaagcatgaaaccacgatggccactgaagctaggaactcctttcagactgccatgtatgatggaatgcgacggccaatgcactcgatccttggtctagtctcaatgatgcagcaagaaaatatgaaccctgagcaaaggcttgtaatggatgccattgtcaagacaagtagcgttgcgtcaacattgatgaatgatgtcatgcaaacatcaaccgtaaatcgtgagtatttgtctttggtgaggagggcattcaaccttcattcgttggttaaggaggcaatcagtgttgtaagatgcctaactggctgcaaggggattgattttgagtttgaagtggataattctttgcccgaaagggtcgtcggtgatgagaagagggttttccacatcgtcctgcacatggtaggtactctaatacagaggtgtaatgcaggctgtctatccttgtatgtgaatacttacaatgagaaggaagagaggcacaatcaggattggatgctgcgaagagcaaacttctctggcagctatgtgtgtgttaagtttgagattaggattagagagtccagaggtaatcttttgagttcgtcatccagtcggagacttcaagggcccaactctaccagttctgagatggggcttagcttcaacatgtgcaagaaaattgtgcagatgatgaatggtaatatttggtcagtctctgattcaaaaggccttggagaaactatcatgcttgcccttcagttccagctgcagcatgtgactccggtctctggagcatcctcggacttgttccgatcagcgccaattcccaattttaatggactccaagtcattcttgtggacagtgatgacaccaatcgggccgtaactcacaagctcctggagaagcttggttgcctagtcctctcggttacttccggcatccaatgcatcaactcctttgccagtgctgagtcatctttccagctggtggttcttgacctcaccatgcgtacaatggatggatttgatgtagctcttgcaatcaggaagttcagggggaattgttggccaccgttgatagttgctcttgcggcaagcaccgatgacaccgttcgggatcggtgccagcaggcaggaataaacggtctgatccaaaaaccagtcactttagcagcactgggagatgaactgtatagagtccttcaaaacaattga

SEQ ID NO: 12749 - DNA, 558 bp, Oryza sativa
  Clone ID: TFbOSC400678j.C1.o9.fg
atggcggtgaagtattttggtcatagaactccagtaatagttgtcacgaagtcccacatgtacgaaagaggacaaatccatcaatcattatacattgtatggtatatcaaaattatcaaatacacggtcactagtgatactgtccattttcctcaacaacaattcaaagtaactctacaccaaaagtttgcaatgtcgtccccccatgtgcttgttgtggatgatacccatgttgatcgccatgttgtttccatggccttaatgcgccataatgtccgagtgactgcagtagaaagtgtcatgcaagcattgatgtttttggactcggaacatgatgtggacatgattgttagtgactactgtatgccagacatgaccggctataacctactcatggaagtgaagaaatcacctaaactggcacatctcccggttgtaattgcttcctctgataacatcccagaaaggatcagaaagtgcttggatggaggagcaaaggattatattctgaagccagtcaagattgttgatgtgcctcgtattatgaaatacatatga

SEQ ID NO: 12750 - DNA, 708 bp, Oryza sativa
  Clone ID: TFbOSC402928j.C1.o7.gm
atgttcacgacaaaagagcgcggcagttgcaaggaaagcgaaaggcgcaagcgcaagtgggggaggaatcgggagcgtatccgcggcacaggaaaacgccactttcgtgtggctatagaggctccgttccatgtcctggctgtggatgatagccttcctgacaggaagctcatcgagaggctactcaagacctcttctttccaagttaccactgttgattccgggagcaaggctctggagttcttggggctccatgatcatgaggacagcccaatttctactcaatcagatcagcaggaggttgcagtgaacctgatcatcacagactactgcatgcctggcatgacaggatatgatcttctcaagaagatcaaggaatcgtcttatttaagggacatcccagttgtgatcatgtcatcggataacattccttcaaggatcaatagatgcctggaggaaggagctgatgaatttttcctcaaaccagttcggctctccgacatgagcaagctgaagccccacatactgaaaagcagatgcaaggagcactaccagcaggaacaaaacctgcaaagcaacagcgaaagcaacaacagcagtaaccccacaagcgagaacagcagcagcagcactagcagcaacagccacaagagaaaggcagtcgatgaagaaattttgccccacacaataagaccaaggcatagttga

SEQ ID NO: 12751 - DNA, 1323 bp, Oryza sativa
  Clone ID: TFbOSC400888j.C1.o1.fg
atggaagctctggatgacacttctcctgaaaacatagaagttacagcgaattccaaaaatacgatgccatataatactctaagtgggcttgaagtagcaaataatcggaaaaccttggagagtttcaggatgttcaaagattcgtcagatgcaatagattcagtgaacttactagtaactgtcgaagacactggcataggaataactaaggatgctcaaactcgcatttttacacctttcatgcaagcggatggttccacctcaaggacatatggtggaactggaattggtttgagtattacgaaacgcctggttgaattgatgggtggagaaatagggtttgtgagtaaaccaggagttagtagtacattttcttttactgctattttcaaggaaaataggaaagatccaggggatatcaaaaggtattgtcctgaacctactccaccagattttcaaggaatgagagcgcttgttgttgacggaagatgtgctcgtgctgaggttaccatgtaccatctgcggagacttggaatacaatgtgatcttgcagccacatctgaatcagcactttctgctctattggaatcctgcaattcaagtgtaaaaagcagtctaaatatggtgcttgttgacaaagaagcttggggcgaggactcaggcttggcatttttccggtgtcttatagatcttcggctgaagggcacactcaagtcttggcaaaccatgccaaagttctttcttttggcaggttcaataactcctgctgactctgattgtttgaggttggcggggtattctaatagcataagaaaaccccttcgtcttagtactgttgctgcttgtcttagtaaagcactaggggttggacttacaggccgacgaagtagagataattctttggttcttcgaagtgtactaacaggaaaaaacattttagttgtggacgacaatgctgttaatcgcatagttgcagctggtgctttgaagaaatatggagctatagttacctgtgtggacagtggaaaggaggcaatttctaggctccagccacctcataaatttgatgcttgttttatggatgttcagatgcctgagatggatgggtttgaagctactagattagttcgttctgtagaaagtaaaatcaatgatacgatccaggcagcatctgctaaaaacccatttggagataacaatattgcaaagcagaagagctatgcagtaaatcgagaacagaagtttgattggactgctatttatgtttcatttgacaattggatgaaatctatttcaacatcacgccttcagccatgtgcttaa

SEQ ID NO: 12752 - DNA, 3072 bp, Oryza sativa
  Clone ID: TFbOSC401583j.C1.o6.fg
atggatgagatgagctgcggcggcggaggtggtggagcgaggtggaagagggcgcgggtggcggggatgggcgaggggaaggcgggaggaggtggtggcgcggcgttcttggggctggagagggtggggatggtggtgcggatgctgccggtgccggagaaggtgtcggcgagggcgcgggtggtgagggggagcctggtggcgcacttccgggggtggagggtggtgcgggagacgtggtggtgggtgctgctgctgtggatcctcgccggctccctcggctccttctacctcttcctcttcatgaacgcccagtccctcgacaagcgccgcgactccctcgccagcatgtgcgacgagcgcgcccgcatgctccaggaccagttcaacgtcagcatgaaccacctccaggccctcgccatcctcgtctccaccttccaccactccaagaccccctccgccatcgaccagatgacgttcgcgaggtacgcggagaggacggcgttcgagcggccgctgacgagcggggtggcgtacgcggtgcgggtgacgcacggcgagcgggagcagttcgagcggcagcaagggtgggcgatcaagaagatgtactcctcctccaacaagaagcagtcgtcgccggggcccgggcccggcgacgccgccgtcgcggagatccgggagcccgccgaggagtacgccccggtcatcttcgcccaggacgcctacaagcacgtcatctccttcgacatgctctccgggaatgaggatcgggataacatattacgggctaggaaatctggcaagggtgtcctgactgctcctttcaagctactgaataatcgcctcggagtgatcttgacgtacactgtttataagtatgagctccctgcatatgccaggccacatgaacgcatccaagccgcgattggctatttgggcggcatatttgacatacaagcactcgtcgagaagttgctcaaacaactcgcgagccaggaatccatcatggtgaatgtgtatgatacgaccaacgagagcccgatcagtatgtacggtgatgatactgggagtggcatgtgccatgtcagcgtgctcaactttggtgatccgtcgagaaagcatgagatgcattgcaggtttgaaaaaaagccaccatggccatggctggcaataacgtcatcgtttggaactcttgtgattgctttactgactggtcacatatttcaagctactgtccatcggattgctaaagttgaagatgatttccacaagatgagcgaactcaagaagcgtgcagaagatgcagacgtcgcaaagtcacagttcttggctactgtttcacatgagatcagaactccaatgaatggtgttctagggatgctccaaatgctcatggatactgatttggacacgacgcagcaggactatgttagaactgcccaagctagtggaaaagctttggtctctctcatcaatgaggttcttgatcaggcaaagattgagtctggtaaacttgagctcgagacggtgccctttgatcttagaacagtttgtgacgacattttatctctgttttgtgggaaagctcaggagaaaggactggagttagcagtgtatgtctcggatcaagttccacagatacttattggcgatcctggcaggataagacaaatcattacgaatcttgtcgggaactccataaagttcacagagagagggcatatatacctgacagttcatgtagttgaagaggtcatgagttgtttggaggtagagacaggaattcagaacacaaacactttaagtggctatccagtagccaacagaagatgtagctgggagagcattcggcttttcaacagagaattacactcatctgagaagtcttttgcgcccatcgcatctgattcaataagcttggttatatctgttgaagatactggcgtcggcatcccatttgaagcccaatcccgtgtgttcacccctttcatgcaggtaggtccatccattgcccgcatccatgggggcactggcattggattaagcatcagcaagtgcttggttggtctcatgaagggagaaatcggttttgcaagtaagccccatgttggttctactttcaccttcaccgcggtgcttatgagggcacactgcaaaggaaatgacatcaaatcatcagaatttaaagggatcaatgcattggttgttgatcataggccagtccgtgcaaaggttaccaagtatcacttgcaaagacttggagttaagaccgaactgacagctgagctaaatcagttcatttctaaattaaactctggatcactgactgcaaagctagtgctaatagacaaggaaacctggcttaaggaatcccattgcacgcctcttctggttaacaaattgaggaataatgacaagccagactctcctaagttatttcttttggggagctctgcaagttctcccaagggcggttcagatacatccagggaacataacttgaatgtaataatgaagccgcttcgtgcaagcatgcttcaggtctcactacgacgagcactaggtggggtcgataaggtgcactgcaggaatggagtagttggcaattcaacattgggcagccttcttcacaagaagcaaatcattgttgtcgacgacaatatcgttaacctgaaggtggctgctggtgctcttaagaagtatggtgccgaagttacttgtgcagacagcgggaaaaaagcaatcacattgctaaaacccccgcacaattttgatgcttgtttcatggacatacagatgccagaaatggatgggtttgaagccactagaaggattagagtgatggaaagagatctaaatgagcgaatagaacgcggagaggcgccaccagaatgtgctagtattcagaggtggcgaactcctatattggcgatgacggcagatgttatacaggcaacacacgaggagtgcctgaaaagcgaaatggatggctatgtctccaagccatttgaaggggagcagctgtacagcgaagtagcgcggtttttccaaaatcatgaccaagttgaatag

SEQ ID NO: 12753 - DNA, 408 bp, Oryza sativa
  Clone ID: TFbOSC407447j.C1.o3.fg
atgatcgagatcattgatttgagccaatacattggccctgagctagacaagaagaaggccaaacttgagaaggccaagtccaagcttcttgagctggagaagaaggccgacatagaggagaacactagggtgactgcagtagaaagtgtcatgcaagcattagtatttttggactcggaacatgatgtgaacatgattgttagtgactattgtatgccagagatgaccggctatgacttactcatggaagtgaagaaatcacctagactggtacatctcccggtgataattgcttcctctgataacatcccagaaaggatcagaaagtgcttcgatggaggagcaaaggattatattctgaagccagtcaagattgctgatgtgcctcgtattctgaactacatatga

SEQ ID NO: 12754 - DNA, 396 bp, Oryza sativa
  Clone ID: TFbOSC401978j.C1.o21.fg
atgtcgacgaagacagtgccggagccggagccgcacgtcctcgccgtggacgacagcatcgtcgaccgtactgtcatctccagactcctgcgcagctccaaatatcgagttacgacggtggatagtggcaagagagcactggaggttctcagcctggatcggaatgtgcatatgatcatcacggattactgcatgccggagatgacagggttcgatctcctcaagagggtcaaggagtcggcggagctgaaggagattccggtggtgctaatgtcgtcggagaattcgccgacgagaatccggcggtgcctggaggagggggctgaagactttttgatcaaaccggttcgcccgtctgatgtgtcgcgcctttgcaaccgcgtcatcatgaaatga

SEQ ID NO: 12755 - DNA, 2334 bp, Oryza sativa
  Clone ID: TFbOSC401835j.C1.o36.fg
atggcgatggtgacggcgcggcagttcttggcgtcggcggcggagctggggagcgggcggcggcgctgcggcggcggcggcgcgtgcgacatgcgggaggacggcggggtggaggcgctgatgcagtgccagcgcgtgagcgacctgctcatcgcggcgtccttcctctccatcccgctcgagctcttctacttcgccacctgcgccgacctgtccgaggtcaagtgcgccgtgctccacttctgcgccttcatcgtcctctgcggcgccacccacctcctcgccgcgttcacgcacgcccacccgcactccgccccgctgctcagggcgctcaccgccgccaaggtgctcgccgccgtcgcgtcgtcggcggcagcggtctcgctcctcaccttcatccccaagctgctccgcatcaaggtcagggagtcgctgctccgcgacaaggccagccgcctccaccgcgacctcggcctcgtccgccgccgcgaggaggccacctcccgcgccgtgcgggagctcacgggccggatccgcgcctccccgcccgacgcgcacgccatcctccgcaccactgcgctccagctcgccgacgccctcggcctccacgcctgcgccgtctggatgcccgccgccggccggccccacgacctcgtcctggtgcatcacctcacctcccggcccgacgacgcggccgacttgctgctggaggttggtgacgcgtgcaccgtcgccgccgatgaccccgacgtggtcgacgtaatggcgagcaaggtcgccaaggtgctcgggccggactcggcgctcgccatggcgagcagcgtcggcgcggcgccggcgggggcggtggccgccattcggatccccatcctcagggtgtccatctacgacggaggagggacgccggaggtgaccgaggcgagctacgccatcctggtgctgcttcttcccccccacgacgccgccggcgggtggagcagccacgacctggagatcgtccaggtcgtcgccgaccaggccgccgtcgcgctctcccacgccgcggtgctggaggagtcgcggtcgatgcgggacaggttcgccgagcagcacagagcgctgatgcaggccaagcaccgggccgccatggcgaccagggcgttcagctccatccagagcgccatgtgccacgccatgcgaaggcccgtgcactccgtagtcgggctggtctcaatgctgcaacatccggaggcagacacaatgcggccggagcagaggctcgccgtcgacgccattgcccgaacaagcaacctcttgtcggcgctcatggacgaggtgaccgtgaaccggcagcatttgtccgtgcagaggaaacccttcagcctgcacgcgctgatcaaggaggccatcagcgtcgccggctgcctgtctcattgcgggggagctgggttcctgcaccagccggaatgcgcgctgcccgaatgggtcgtcggcgacgagaggagggtcttccacctgctgcttgacatggtgggcaccctgctgaaccgatgcaacaccgggtccggggcgtgccgcctctcgttctcggtcaggatctgcaatgtgggtgaagagaggtatagccttgactggatcccgatgcgaccgaccttctccggttgcaacgtttgcgtcaagttcaaggtcgggatcgggagatctaggagttgtgctattgagaggagtttgccgtgcgaattgcctcgtcgttctgcggccactaccagctctcagatggggcatatcttcagcggctacttcaacaagattgtgcagatgatgaatggtaacatgtggtcggcgtcggactccgagggcgtcggagagagcgtcaccctgatcctgcagttcaagctgcagcagggacatgtcgaagcatccccgccgtacatccctcacttgaacggcctgagggtgctcctcgccgacgacgacgccatgaaccggggggtgaccaagaagatcctggagaggcttgggtgccaggtcatgtcggcgccgtcgggcgcccactgcctgagcctcctggcgagcgccgaggcctccttccagctcgtcgtcctcgacctcgacgatcgcgccgtgccctcggcggccatggaccggtttgaggtggccctcaggatcagggagctcaggaacagctgctggctgctgatcgtcattgccgtcgcggctggcgtcgtcgccaccgatgatggcggcgccgtgcaggagctgtgccagcgtgccgggatcaacgggctggtccagaaaccggtcacgctgccggcactgggagctcagctctgccgagtgctccaggacaactga

SEQ ID NO: 12756 - DNA, 744 bp, Oryza sativa
  Clone ID: TFbOSC900071j.C1.o16.hg
atgtcaaaaccatcgctgccctggaaagcgacgcggcgatcgaacgcgatatcatatcgaatcatctccacttctcgatcttattcagttggccgtgccaggcgtcaccggatccacgccttcagatttgggaaagttgctggctgcatcgccaagatttggctggggaaagttggtagcgaccgagaaatcgtccgatcaggaggatttcttggttggtgtggcaaccccatccgatccgaggatttgaagcctgattatattctaatcttcaacaaatctgatgcagcaaactggcagcctcttccttctgttcttccagagaagagaaacatatctgtgcaagctttgccttcttccatggcagtggctatagaggctccgttccatgtcctggctgtggatgatagccttcctgacaggaagctcatcgagaggctactcaagacctcttctttccaagtaaccactgttgattcggggagcaaggctctggagttcttggggctccatgatcatgaggacagcccaatttctactcaatcagatcagcaggaggttggagtgaacctgatcatcacagactactgcatgcctggcatgacaggatatgatcttctcaagaagatcaaggaatcgtcttatttaagggacatcccagttgtgatcatgtcatcggataacattccttcaaggatcaatagtataattaaggaacaagccccacagctcacgtcgtcttaa

SEQ ID NO: 12757 - DNA, 702 bp, Oryza sativa
  Clone ID: TFbOSC900087j.C1.o6.fg
atggcgtatgagaactatgcaaatacaactgttagtgtgaatttgaatctgcagtacagatttcacaatctggctgagtttgacgatgggaaaaaaagttgccggaaacggctggatggtcataacaggcgtcgaagaaagccacagcatgatgcattgaaccctaggagtttccttccgtatcatcaagcgaatcagttttcagtctacccgcaaacatttccgatagctgatcagaacgccgacgccttaatgcgtccgcttgatcgtcaccctcccttctccatctcattctcagggaccttccgggaaccgaagcagttcccctttatgcaagatggcgggagcggcctcggcgcagcgcgccacgatctcctgcggcccttctcttccccagaagatggagccaacattaccacaacccgcagcgcatgcaacggcgtcccccacgggctggacccggagtgtgctctctctcttctgtcatcgtcgctgcatccctcccccgctgccggcatctccagcgcaacagctccaccgcagttcgccccctcttctttcagcagaatcgccgcctcgtcgcaagccgtaaccaccgcattcgcatcagatggaggatcagttgccggtgaccatgtcttggttcctgctgtcacatatgaagatccttcccaagcaatgccattctcttggcaggtgtag

SEQ ID NO: 12758 - DNA, 112 bp, Oryza sativa
  Clone ID: TFbOSC400461j.C1.o1.gm
ccggtgccgcgactaccaccgccgccacaaggtctgcgaggcccaccccaagacgccggtggtcgtcgtcgccggccaggagcagcgcttctgccagcaatgcagccggtaa

SEQ ID NO: 12759 - DNA, 1203 bp, Oryza sativa
  Clone ID: TFbOSC33170j.C1.o3.fg
atggcgaccggcggcagcggcggcggcggcggaggtggaggtggtggtgacgatgtccacgggctcaagttcggcaagaagatctacttcgagcaggacgcggcggcgtcggcgtcggcggcggcggtggagtcgtcgtcgacgtcgtcgggcggaggcggcaagaaggggaagggcgtggcggcggcggcggctcccccgccgccgctgccgccgaggtgccaggtggagggttgcggcgtggatctgagcggcgtcaagccgtactactgccgccacaaggtgtgctacatgcacgccaaggagcccatcgtcgtcgtcgccggcctcgagcagcgcttctgccaacagtgcagcaggtgctctgtccacatggttaggttccaccaattacctgaatttgatcaagaaaaaaaaagctgccgcagacgccttgcaggtcacaatgaacgccggaggaagccgacacctggacctctttcttctcgctatggccggcttgctgcatcctttcatgaagagccaggcaggtccagaagctttgtggtagatttctcatacccaagggttccaagcagtgtgagggatgcgtggcctgctattcagcccagcgatcgcatgtccggttcaatccagtggcaagggggccatgaactccatcctcaccgcagcgcagttgcgggatacagtgatcaccatgcgttcagcagccatggtggctcagcggctggggcaccaatgctccaccacccagcctttgagctcacctcaggtggatgtctcgcgggagtcgccaccgactccagctgtgctctctctcttctgtcaactcagccatgggatactacccaaagcaccagcagccacaaccggtccccgccaatgtcgtcaacggccagcgccttcggaggcggcaacaacccggtgtcgccctcggtcatggcaagcaactacatggcggcgagccccggctggaacagctccagccggggccatgacggcgccaggaacgtgcacctgccgccaccgcacggggttgtgctgaacgaggtccctccgggctctgtccaccacggccatttctccggcgagctcgagctcgcactgcagggaggtgccccgtccaaccggccggaagccgagcatggctccggcagcggcgccttcagccactccaccaatgccatgaactggtctctgtag

SEQ ID NO: 12760 - DNA, 1419 bp, Oryza sativa
  Clone ID: TFbOSC33084j.C1.o13.fg
atggattgggatctcaagatgcctgtttcttgggacctggccgagctggagcacaacgccgtgccgaacatggcggcggcggcgagcgcggcggagccgggcattgccgcggtggcggcgtcgcgcggggcgccgggccggccggagtgctctgtcgacctcaagctcggcgggctcggcgagttcggcgccgcggacgcgctcaaggagcccgccgccgcggcgaaggcgccggtgtcgagcgccgccgccgccgcctcggtggcgaaggtgccgccgtccacgagcacgctgaagcggccgcgcggcgggggcggcggcggcggcgggcagtgcccgtcgtgcgccgtggacggctgcaaggccgacctgagcaagcaccgcgactaccaccggcggcacaaggtgtgcgagccgcactccaagactcccgtcgtcgtcgtctccggccgcgagatgcgcttctgccagcagtgcagcaggtttcacttgcttggggagtttgatgaggctaagcgtagttgtagaaaacgcttggatgggcacaatcgacgccgcaggaagccacaggcagatagcatgagttctggcagctttatgacaagtcaacaagggacaaggttcgcgtccttcactcctccaagaccagagccaagctggcctgggatcatcaaatccgaggagaccccatattacagccatcatcaccaccctcatccggtgatgaccagccggcagccgcatttcgtcggctcgccgtcgtcggcgacgacggcggcgttctcccccaaggaaggccggcggttcccgttcctccatgagggcgatcagataagcttcggcggcggcggtggcgcggcggcggcggcgacgctggagatctcggtgtgccagaccaccgtcgtcgcgccgccgccaccggagagcagcagcagcaacaagatgttctcctccgacgggctgacgacggcgacgacgacgacgaccaccgcccaccaccaccaccaccaccaccaagtgctcgactccgattgtgctctctctcttctgtcatccccggccaactcctccagcgtcgacgtcagccggatggtccagccgtcaccggcggcggcggcgggagccgagcaccaccaccaccaccaaatccccatggcgcagccgttggtccccaacctgcagcagcagttcggcggcagctcgccgtggttcgccagctcgcccgccgccgcggccgtcgccggcggcgggttcgcctgcccgagcatggacagcgagcagcagcagcagcagcagctgaacgccgtgctggtgccgggctccaacgagaacgagatgaactaccacggcatgtttcacgtcggcggcgagggctcctccgacggcacgtcgccgtcgctcccattctcgtggcagtag

SEQ ID NO: 12761 - DNA, 981 bp, Oryza sativa
  Clone ID: TFbOSC900405j.C1.o10.fg
atggattggatgcctcctccgaagcccacctcgccgcgctcccctcccctcctctgggactgggccgacgccgccgtgccgggctcctcctccggcgaggtatccgccgccgccgccgccgccgcggctcatccgggaaggcggcggaaggagaagcgaggcagggcggaggaaggaggaggtggtggtggggaggtgaggtgccaggtggaagggtgcggggtggagctcgtcggcgtcaaggactaccaccggaagcaccgcgtgtgcgaggcccactccaagttcccccgcgtcgtcgtcgccggccaggagcgccgcttctgccagcagtgcagccggttccatgcgctctcggagtttgatcagaagaagaggagctgcaggagacgcctgtatgaccacaacgctcgtcggcggaagccccagaccgacgtgttctcctatgcatcggcaaggccgccgtcgtcattattatttgatgataaccgacaaataagttttgtctggaacaaagctccactcagccatgtaaggcctttcgcaatttctccatgggaaagctcatctgaagttgggacaactgatggacatatttatttggataaatctcacatatccaaatctctcccagcatttaacaccgacatagatgagctcttaccaatgaaaggtccggacgcatctttaactgcttcaaaatttgatggagcaccggatcttcagcgtgctctctctcttctgtcatctagttcttgtggattacctgatcctgtacagcaagcatctcgcgtcatccaattcacaggcgccagccaaaacaaccgggaacttcctccacttaatggagggaattctgcttcagcatcatgtgccaatgtacaaactatagcacaaccggctcagctggttcgttttaccatgaatgctagcagcaatgcttgtcagtccaatttcttcggtttaaaccagataaactaa

SEQ ID NO: 12762 - DNA, 3354 bp, Oryza sativa
  Clone ID: TFbOSC416193j.C1.o1.fg
atgccacggcggcgaagaagcgcgggaacccgtggccggccgccgcggtggcggcggcggaggctaagggaggagggaactggaaccccaggatgtgggactgggatagccgcgccctcaccgccaagccgtcctccgatgcgctgcgcgtcaacgcgggggctgagccaccaccagcagcagcagcaacagtcgccgccggcggcggctaaggctgctgaggcgctgcggcagggcggcgggggtagcggtgggctgaaccttcagctcggcctgcgggaggacgcggcgacgccgatggatgtgagcccggcggctactaccgtgtcttcttcgccttctccgcctgcgtcgtcggcgccggcgcaggagccagttgttaggccgagcaagagggttcggtctggatcgcctggaagtgccagtggaggaggaggtggaggcggaggcggtggaaactcaggcggtggtggcggaagctacccgatgtgccaggtggatgactgcagggcggatctgaccaacgccaaggattatcaccggagacacaaagtctgcgagatccacggcaagaccacgaaggcgctggttggcaaccagatgcagcgcttctgtcagcagtgcagtagatttcacccgctctctgagtttgatgagggtaagaggagctgcagacgtaggctcgccggtcacaacaggcggcgaagaaaaacccagccaacagatgttgcttcgcagctgctgctacctggaaaccaggaaaatgcagcaaataggacacaggatattgtaaatctgatcacggttattgcacgcttgcaaggcagtaatgttggtaaactgcccagcatccctccgataccagataaagacaatctggtccagattataagtaaaataaactctataaataacgggaactctgcttcaaagtctcctccatcagaagctgttgatttgaatgcgtcacatagccaacaacaagattctgttcaaaggacaactaatggattcgagaagcaaaccaatggattggacaaacaaacgaatggatttgacaagcaagctgacggattcgacaagcaagctgtgccatcaaccatggacttgctagcagttttatcaactgccctcgcgacatcaaaccctgatagcaatacgtctcagtcccaagggagcagtgacagcagtggtaataacaagagcaagagtcagtcaacagagccagctaatgttgtaaattcccacgagaaatctatccgggtattttctgccactcgcaagaatgatgctcttgaacggtcacctgaaatgtacaagcaaccagaccaagaaaccccgccatacttgtcactacggctctttggtagcaccgaggaggatgttccttgtaagatggacactgcaaataagtacttatcttccgagagtagcaatcctctggatgagagatctccatcatcatctccgcctgtaacacataagtttttccccatccgttcggtagacgaagatgctcgtattgcagactacggggaagatattgcgacagttgaggttagcacaagtcgggcttggcgtgcaccaccacttgagctgtttaaggattcagaacggccaattgaaaatggttcaccaccaaatcctgcatatcaatcctgttatacctcaacctcttgttcagatcattcgccatcaacttcaaattcagatggacaggaccgtactggtagaatcatatttaaactatttggcaaggagccaagcacaatccctgggaaccttcgtggagagattgtaaattggctcaaacacagccccaacgaaatggagggatacattcggccaggttgccttgtactatcaatgtatctttcaatgcctgctattgcatgggatgaacttgaagaaaatcttctccagcgagtaaacacattagtccaaggttccgatttggacttctggagaaaaggaaggtttttagttcgaactgatgcccagttggtgtcatacaaagatggagcaacccgcttatcaaaatcatggagaacatggaataccccagagttgacctttgtctcaccaattgctgttgttggtgggagaaagacctccctcattcttaagggccgtaatctgacaattcctggcacccaaatccactgtaccagtacggggaagtacatatcaaaagaagtactgtgctctgcatatccaggaacaatatatgacgattcaggtgttgagacttttgacttacctggagaaccacatcttattcttggacgttacttcattgaggtcgagaataggttcagagggaacagctttcctgttatcattgccaattcaagtgtttgtcaggagttgagaagccttgaagctgagcttgagggttcacagtttgttgacggctcttcagatgatcaggctcatgatgctaggcggctaaagccaaaggatgaagttttgcactttctaaacgaacttggatggctcttccagaaggcagctgccagtacatctgctgaaaaatctgattcttctggtttggatttgatgtacttctcaactgcacgcttcagataccttctgctgttttcaagtgagcgggactggtgctctcttactaaaactcttctggaaatccttgccaagaggagtttggccagtgatgaactatcacaggaaactctggaaatgctctcagagatccatctcctgaacagggcagtgaaaaggaaaagtagccacatggcgcgcttgcttgtacagtttgttgtcgtgtgccctgatgattccaaattgtaccccttccttccaaatgtagctggcccaggtggtttgactccattgcacctggctgcatccattgaggatgcagtggatattgttgatgctttgacagatgatcctcaacagattggtttgagctgttggcactcagcgctagatgatgatggtcagtcccctgaaacttatgccaagttgaggaacaacaatgcgtacaatgagcttgtagcacagaaattggtggacaggaagaacaaccaagttactataatggttggcaaagaggaaattcatatggatcaatcagggaatgttggtgagaaaaataaatctgcaattcaagcattgcaaataagatcttgcaaccagtgcgctattttggatgctggcttgctaagacgtcctatgcattcacggggattgctcgctcgcccctatatccattccatgcttgcgatagcagcagtctgtgtttgtgtttgtgtattcatgcgagctttgctgcggtttaattctggtagatccttcaaatgggagaggctggattttggtacgatataa

SEQ ID NO: 12763 - DNA, 1377 bp, Oryza sativa
  Clone ID: TFbOSC422778j.C1.o2.fg
atggcggtgccagcggcggcggtggcggccgacgtcgtcgacttcgggtacgccgcccccatgccgccgccctacgtcggcttcgacccagccggcatgggcggcgagcgccagctgttccagcacggcggtgcatgccatggcctctacgacggtggcctcgacttctccgccgccgcggcgttccaggaagcggccactcttggagttggcctgccgggcggcaatctgctgcagtccctggcgccgcccgccgccgccgccgccacgccgtcgtcgctgcagatgccgatgatgatgtcgctgccgggcctgcctgcgacggcggccgacgtgtacccgttcggcggcggcgggttcgtgaagcgggaggatggccccgtcctggacgtcgtcggcggcggcggcggcgggaggatcgggttgaacctcggccgccggacctacttctcccccgccgacgtcctcgccgtggaccgcctccttctccggtcgcgcctcggcgggatggggatggagatggggatgggcatgggcgtgctcgggctgggcctcgccgcggcggcgcaccaccaccagccgccgcggtgccaggccgagggctgcaaggccgacctctccgccgccaagcactaccaccgccgccacaaggtctgcgacttccacgccaaggccgccgccgtcctcgccgccggcaagcagcagcgcttctgccagcagtgcagcaggtttcatgtgcttgctgagtttgatgaggcgaagaggagctgccggaagaggctcaccgagcacaaccgccgccgccggaagcccaccgccggcggccaatcgtccaaggactcgccgccgccgccgccgtcgaagaaagggactgacgccagcatcgctagctcctacaccagctgtgaccaccacaaggcagctgcgagcaccacgacggccagcggcgtgagctgcctgcaggagcttgcagaccaccacgacgtcggcggcggccatcaggcagccatggcggcggcgccgccgccgacgctgtccctggccgcgctgccgccgcaggaggaggacgacgaggacgaagacggcggcctcggcaacgtcctgatgatgcagcagcaccatcaacggcggcgactgcaacacgacggcgacggcgacgacgatgtcgccgccgccgccgcccaccaccatctgatgagatctctcgcgcggcagcagcagcagcatcgccatagcagcggctgcagcaacaacaacgacggcgacgacgacgaccacaacaacaacaacaacatactgtcgtgctcgtcggcgtcggaccagcagaacagcagcaacaacaacaacatgcatttcttcgaggtggatttcatctag

SEQ ID NO: 12764 - DNA, 963 bp, Oryza sativa
  Clone ID: TFbOSC900393j.C1.o8.fg
atgccgatgcccggagacgtgtacccggcgctcggcatcgtgaagcgcgagggcgggggcggaggtcaggacgccgccgccgggaggatcgggctcaacctcggccgccggacctacttctcccccggcgacatgctcgccgtcgaccgcctcctcatgcgctcccgcctcggcggcgtgttcggcctcggcttcggcggcgcccaccaccagccacctcgctgccaggccgagggctgcaaggccgacctctccggcgccaagcactaccaccgccgccacaaggtctgcgagtaccacgccaaggcctccgtcgtcgccgcctccggcaagcagcagcgcttctgccagcaatgcagcaggtttcacgtgctcacggagtttgatgaggccaagaggagctgccggaagcggctggcggagcacaaccgtcgccggcggaagccggcggcggcggcgacgaccgccgtggcggcggccaaggacgcggcggcggcgccggtagccgccgggaagaagcctagcggcggcgccgccacgtcttacaccggtgacaacaagaacgtggtgtccatgagcgcggccaagtcgcccatctcgtcgaacaccagcgtgatcagctgcctgcccgagcagggcaagcatgcggcggcggcggcgaggccgacggcgctcacgctcggcggcgcgccgccgcacgagagctccgcgccgcagatcggcgccatgctccatcaccaccaccatcaccagcaagaccacatgcaggtgagctccctggtccacatcaatggcggcggcggcggcggtagcaacaacatcttgtcgtgctcgtcggtgtgctccagcgcgctgccgtcgacggcgaccaacggcgaggtatcagaccagaacaacgacaacagccacaacaatggcggcaacaacaacaacatgcatctgttcgaggtcgacttcatgtag

SEQ ID NO: 12765 - DNA, 1026 bp, Oryza sativa
  Clone ID: TFbOSC404997j.C1.o1.gm
gatcccccgtgcgcggtggacgggtgcaaggaggacctgagcaagtgccgcgactaccatcgccggcacaaggtgtgcgaggcccactccaagacccccctcgtcgtcgtctccggccgcgagatgcgcttctgccagcagtgcagcaggtttcacttgcttcaggagtttgatgaggccaagcgcagctgtagaaagcgactagatgggcacaaccgtcgccgcaggaagccacagccagatcccatgaactctgcaagttatcttgcaagccaacaaggggcaagattctcaccgttcgcgacgccgagaccggaggcaagctggacagggatgatcaaaaccgaggagagcccatactacacgcaccaccaaatccctcttggcatcagcagcaggcagcagcatttcgttggctccacctctgacggcggccgccgcttccctttcctccaggaaggcgagatcagcttcggcaccggcgccggcgccggcggcgtgccaatggatcaggcagcagctgctgctgctgcttcagtgtgccagccacttctgaagacggtagctcctcctcctcctcctcatggcggcggcggcagcggcggcggcaagatgttctccgatggtgggttgacacaagtgctcgactccgattgtgctctctctcttctgtcagctccggcgaactccacggccatcgacgtcggcggtggccgggtggtcgtccagccgaccgagcacatccccatggcgcagcctctcatctctggccttcagttcggcggcggcggcggcagctcagcctggttcgcggcgcggccgcatcatcaggcggccaccggcgccgccgccaccgccgtcgtcgtctcgacggccggtttctcctgcccggtggtggagagcgagcagctgaacacagtcctgagctccaatgacaatgagatgaactacaatgggatgtttcacgtcggcggcgaaggctcatcggatggcacgtcgtcgtctctgccgttctcatggcagtag

SEQ ID NO: 12766 - DNA, 588 bp, Oryza sativa
  Clone ID: TFbOSC422154j.C1.o2.fg
atggccgcgctcgccgccgcggcggccgcgggggacggcggggcggcgctgccgtcccccatggaggaggacaagaagcccaggctggtggcgtcgtcgctggcgcccgtggcaggcggcggcggcggcggttcctcctcgtccgctgctgttgctgctggcgcgtcttctagctcctcctcctcctcggtggccgcggcggcgaggaggggcgcgggccgtgccggcggtggcgccccgtcgggcggcggcggcgggcccaggtgccaggtggagaggtgcggcgtcgacctcagcgaggctgggcggtacaaccggaggcacaaggtgtgccaaacgcactccaaggagcccgtcgtcctcgtcgctggcctccgtcagcgcttctgccagcaatgcagccggttccatgagctgacggagttcgacgacgcgaagaggagctgccggcggcggctggccgggcacaacgagcggcgccggaagagcgcggcggacacggcgcacggcgagaactgccgccacgccgaccaggacgccggccggagccaccagggcaccgggaacccgccgttccagatcagataa

SEQ ID NO: 12767 - DNA, 1014 bp, Oryza sativa
  Clone ID: TFbOSC900087j.C1.o1.fg
atggacgccggtgagccctacacctcggactcgttggtccttgccactgcagctagccaatggtcccctctccatctctcgctgctcctccaccaacagcagccgcgacccgtccgttccttgtcatccccaccgggggacacggcacccttgtggcctcgccaccgtcatcaagggaatcagcagccagggagcttctccgccatcagaatgggtaacgcactggctacggttttgggcacagctacaaagctctttttgagcaaaggctgggatgttatattccattatcttaaaaaaatggacgccggcgagcccaagagggcgacaactgaggggaatcggcaaccggggagccgagggcgaagctcagcgggacgagcggcacgggggaaggagatcggtggcggcggcggcgagggttggggacgacgacgcggtggtgggcagggtggcgatcagcatgggggcggtggccgggacctcgccgggggagcggacgacgacgacacaaggcacagatcagcccgctggctccgagacgaggggatcgacaacgacgatgcaggcgcagcccggcccgacggctctgagacgaggtgtcaacaacgacgacatgcacgtagccggctggcggtcgaaagaggggtcagagatgaacggccgccgccaccgttgaagaggctgtccgtcgccgggccgtcgtcgtcgtcgtcttcccccgacgccgccgcgtcggcggcggcggcggcggcggcggcgctgcacgacttctccgtccgcgccaggccggcggcggcggcgccggcgacgaggagggcgcgcggagggtcgggcggcggcggcggcggcggcggcggcgcggaggcgtgctcggtcgacgggtgccggtcggacctcagccggtgccgcgactaccaccgccgccacaaggtctgcgaggcccacgccaagacgccggtggtcgtcgtcgccggccaggagcagcgcttctgccagcaatgcagccggtaa

SEQ ID NO: 12768 - DNA, 1410 bp, Oryza sativa
  Clone ID: TFbOSC406405j.C1.o2.fg
atgggttcttttgggatggactggaatcagaagagctcggtgttgtgggattgggagaatatgccgccgataggaaatagcgcgaacgagaatcccaagaatgtgatgctggctgaatcaaaacttgcaggtgttggggttgacataggccatgaatcaggccattcttctggtggtactttctcttctagctcagagattgggtatggttcatccaagagttccatatccgcgtcgatcgattctccgtccaaagtggggaacaccatagagctcaattttgcatctgcggaagagcatgataagaacatggacaagggtaagagtaaagttgatgacaccggaacttctcgatcaccggtggtagcagccaatcgtgtagagcccttgattggcctgaagcttggcaagagaacctattttgaagatgtctgtggagggcagaatgtcaagagttctccatctggtgtgagtgtggctaccccatctcctggtctggccaagaaggtgaaggtggctcagcagaacactcagaacccacactgtcaagttgaaggctgcaatgttgatctctcttctgctaaaccttaccatcgaaagcaccgagtctgtgaacctcacagcaagactcttaaagtcatcgttgcgggtcttgagcgacgcttttgccaacagtgtagtcggtttcacggtttagctgagttcgaccagaaaaaacgaagctgtcgcaggcgcctccatgatcacaatgcccgcagacggaagccacaaccagaagcaatttccttaagttcgtcgaggctctctacattactctatggtgatgcaaggcaacaggcaagttttctatttggtcaagctccttatggtcagatgggaagctgtgcaagttcttgggataacccagtaccaggaggcttcaaatttacagcaacaaaagctccttggtcaaggccaacaatagctgccggtgttgatgggacgcatgtatctaatcagcaggcatcgggcaatgtactgccacatggagcacatcatagttttgatggtctcatggcgttcaaagaaaccaacgcgaaggtccttaaccaaggcatggaagcttctgctgtcgcttccggctccgctagaggcccagactttgagcatgctctctctcttctgtcaatcgattcagtgggtgctgcaaaccttcagccaggttctcagattcaccctggtgtcaccgccattgccggcacctccaaccctgtcatgatgccatctccagcaatctggcaaggaggcttgtcccttgatcagcaggcgcagtttcaggctttcgaccgccttggcaacgacgacgacgaagatcatctccagctcccaaagccttcctatgacaactcccactatgatcagatgaactga

SEQ ID NO: 12769 - DNA, 1542 bp, Oryza sativa
  Clone ID: TFbOSC400657j.C1.o2.fg
atggcttcttttgggatgaactggaatcagaagagccctgtgttttgggactgggaaaatccagcgcctttcggtccgaatacaatggaaaatcccaagagcatacctcaccctgaaccaagaggtgtagttgtcgcggccgcaaatcatggatccaccaattcatccggtggcacgttcacttctagctcggagctagccaatggttcatcgaagagctccttgtcagcgtcgttcgattcctcatccaagctggggaacagcttagagttcaggtttgcttctgtcaaagggcatggcaagaacatgtgcaaggatggcgaggccggtagagttgaagactcgggcacttctccagctgtggcagttagccatggtgagccggtaataggactcaagttagggaagagaacttactttgaaaatgtttgtggagggcagaatgtcaagagctcctctgcagcttcaggtgtgacttgtccatctactgtggtcaagaagatgaaggtgtctcagcagagcacacaaagctcatactgccaagttgaaggctgcaaagtcgatctgtcctccgcaagagaataccatcgcaagcacaaagtttgtgaagctcattctaaggcaccaaaggttattgtttctggtctggagcgccgtttttgccaacagtgtagtcggtttcatggtttagctgaatttgaccagaaaaagaaaagttgccgcaggcgtctatctgatcataatgcacgaagaaggaaaccgcaacaagaggcaatttcatttggttcatcaaggctcgccacgatgttttacgatgcaaggcagcagacagatatttactttggccaatctccttttggccaagtgagaagcaatgcaatttcttcatgtgacaacctgggaggcttcaaatttacagaagcaaaactcccctggatgaagccaatgaaaactataggccttgaggatctgaatttctctaccctgcagatgccaggcaatgttgtgtcgcatacggtgcatcatcatgattttgatgggctcataccattcaagggaaacaccccgaaggtcctcaaccaagcttgctttatggacaagctagaaccacaaattgtttctcaaaaaaacaaaaacaaaaacagagaggctagatccaccaattatctgttacaagctttttggacttcctgccttggtgtggatccagcctgtgccgtcgtgtcctccaactcgaatggagccccggatcttcggcgtgctctctctcttctgtcaagcgattcctggggcccggccgacgttcaggccggctcccaggtgcatcccggtggagtgatgccgcccctcgccgttgccgccgccaccgtcaccgccccgacgaaccctgtcagtgtgatgcatgctctgcacccgtccaccggaggaggaggattctggcaagacggcgacgacccgcctccgctcgatcatgcctcgcaggctcaggcgttcatgcatcctggcaatggcagcagctccggctatggccatctgcactga

SEQ ID NO: 12770 - DNA, 1032 bp, Oryza sativa
  Clone ID: TFbOSC401261j.C1.o16.fg
atggagtgcaaccccgtctcctccaccacctcctcctccctgctctgggactgggacgccaccgcctccgccgagccgccgccgccgcccgggaagcgcggcgggagggattcgtcgtcggcgtcggcgtcggcgaagcgtgggaggtcggcggcagcagcgggggatgcggcggcggtggcggcggaggcgccgcggtgccaggtggagggctgcgggctggagctgggaggctacaaggagtactaccgcaagcaccgcgtctgcgagccccacaccaagtgcctccgcgtcgtcgtcgccggccaggaccgccgcttctgccagcagtgcagcaggttccacgcgccttcggagtttgatcaggagaaacggagctgccggagacgactttctgatcataatgcccgtcgacggaaaccacagacagatgtgtttgcttttggctctggaacactaccgcgatcactgtttgatgataggcagcaaataagtttcgcatgggataataacgctccacttaaccatgcaaacaccacttcaagttcctcgtggacatctgacttacagctctcccaagtgatggacataagcaaaaggtcacgaaaagctggggcagacagtgcaaatatccgtttgtcaaatgctttgccaactctttgtcatgacacaaatgagctcttgccaataaaaggtgcagatgcatctgaaactgcttcaaaactagatggagcactagatgttcagcgtgctctctctcttctgtcagctagttcaaggggtttgactgaccccggacaccaaacatcttctatcatccaatttacgaattcgaaccaaaacagcacattgcccagtgtaccaagcgaaggaaactctaatgtacccttttgggttgatggacaacatcaagcagtagagcctcaggtgtttcagttcacaatggacaccggtaacactgtgtttccggatctagagcggatcaaaccttcctacgagtcttcaatgtttggtctgaaccagatacattga

SEQ ID NO: 12771 - DNA, 540 bp, Oryza sativa
  Clone ID: TFbOSC222j.C1.o2.fg
atggaggctgcccgggtcggggcgcagagccgccacctgtacggcggagggctaggcgagcctgacatggacaggcgcgacaagaggctgttcggctgggacctcaacgactggcggtgggacagtgaccgcttcgtcgctacgccggtgcccgccgcggaggcgagcggcttggcgctgaacagctcgccgtcttcctccgaggaagccggggccgcgtcggtgagaaatgttaatgctagaggtgactccgataagaggaagcgggtggtggtcattgatgatgatgatgtggaggatgacgagctggtggagaacggcggcgggtcactgagcttgagaattgggggtgatgctgttgcccatggagcaggggtgggtggtggtgctgatgaggaagacaggaatggcaaaaagatcagggtgcagggaggcagtcctagtggccccgcgtgccaggtggagggctgcactgcggaccttactggtgtgagggattaccatcgacgacacaaggtagaatatgctatgcaagtttga

SEQ ID NO: 12772 - DNA, 1083 bp, Oryza sativa
  Clone ID: TFbOSC400235j.C1.o44.fg
atggaaggaaacggctgcggcggaagcggggcgacaccacgtggtgtcgttgggatgcactgggctcccgtcgtcacctcgccgcctagcccgcagccgccgttcctcccgccggcgccatgcaggcccgacgtccagatgcaacagcaaggcgggctgacctgcctcaagctcgggaagcggccgtgcttctggggtggcgacggcgccggccaggtggcgcaggggagcggcggcggcggaggcggaggcggtggtggttccgcggatcaggggaagaggaaggagaaggcggcgacggcggtgccggtggtgccccgttgccaggtggaggggtgcgacattacgctccagggagtcaaggagtaccaccggcggcacaaggtgtgcgaggtgcacgccaaggccccgagggtcgtcgtgcacggcaccgagcagcgcttctgccagcaatgcagccggttccacgtgctcgcggagtttgacgacgccaagaagagctgccggcggcggctggccgggcacaacgagaggcggcggaggagcaacgccagcgaggccatggccaggggctctgcgcacccacacggtatgccggtgctgggacacggtttcccgccgtacggcctgccgacgtcgtcggctggtgctctctctcttctgtcatcggctagagccaccggcccatggctgatgccgacgcccgacatctccgcccgctcaagcgcggcgctcgacgagctcatcgccgagaaccgcgcggccctcctctcgtggcaattcttctccgaccgacagccgccaccagctggccgtccaacgggccgcagcccgggctccgaaacggccggtggctggcacgcgcacctgcaggcgcggccgccaccgcccggcgccggagggcagcacgagaatcagtcggggcacgtgacgctcgacctcatgcaggccaccaccgcggcaggaggcagcggcgcgccgttccggcccgtgccagcgaggccccccaaggagggcggcgacgccggctgcacctccgacgcgtggacgccgtcgcccatggagggcgcccgcgtggtctga

SEQ ID NO: 12773 - DNA, 156 bp, Oryza sativa
  Clone ID: TFbOSC33170j.C1.o5.gm
atggtacatatcgcgccgcgccacgaggtgttcgacacgggaccgaggcgtgtgtccgtgtcggagaaggattctcaaccagaggaaggagaccaagagtcccaagacaggccccgattacctttctcgctcaacgagaggaaattactggcctaa

SEQ ID NO: 12774 - DNA, 2262 bp, Oryza sativa
  Clone ID: TFbOSC401478j.C1.o49.fg
atgtcgagtgggctcaagaagaagggcctggagtgggatttgaacgattggagatgggattcaaacctgttcttggccacaccatccaacgcttctccatccaagtgcagcaggagggaattgggccgagccgagggggagatcgattttggtgtggttgataagaggagaagagtctcaccagaggacgatgacggcgaggagtgcatcaatgcagcaaccacgaatggggacgatggccagatttctggtcagagaggaaggagcagtgaggacgagatgcctaggcaaggcacctgttctagtagcggtccgtgttgccaagtcgacggctgcacggtcaatctcagcagtgccagggattacaacaagaggcataagttttatggtaattatttgacatgccttgtcaggtttcactttcttcaagaatttgatgaaggaaagaagagctgtcgctcacggctagcacaacataacagaaggaggaggaaagtacaagtgcaggctggtgtagatgtgaattccttgcatgaaaatcattctttgagcaacacattactcctgttgttgaaacaactttctggcctagattctagtggtccatctgagcaaatcaatggtcctaactatttgaccaatcttgtgaagaatcttgctgctcttgctggtacacaaagaaatcaagatatgctaaagaatgcaaattctgctgcaatagcatcacatactggtaattatgttgcaaaaggcaatagtctacatgactcaagaccacatattcctgtaggcactgaatccactgcagaagaacctacagtggaaaggcgtgtgcaaaattttgatttaaatgatgcttatgtggaaggagatgagaatcgaacagataaaattgtgtttaaactcttcgggaaagagccaaatgattttccttctgatttacgtgctcagatcctcagctggttgtcgaattgcccaagtgatatagagagctatatcaggcctggctgtatcatcctaactatttacatgcgcctccctaattggatgtgggataagcttgctgccgacccagctcactggatacagaagctaattagcttgtccactgataccttgtggagaacaggatggatgtatgcaagggtgcaggactacctgacattgagttgcaacggtaatcttatgttagcgtctccctggcagcctgcaataggcaacaagcatcagatattgtttataacccctattgcagttgcttgttcttcaacagcaaacttctcagtgaaaggtctcaacatagctcaaccaaccacaaagttgaagatcttgatcaaagcagcctttcatttccctttgttgttgctgaagaagatgagccacatacgagctacatctgagactccaaaagattgtactgagggctttcctgctgcaagatttagatggttgctgtcctttgcagttgatcgggaattttgtgctgttataaagaagcttctggacaccttgtttcagggtggtgttgatctggatgtccaatcaacagttgaatttgtcctgaaacaagatttagtatttgtggctgtcaacaaacggtcgaagcctttaattgactttctgttgacatacacaacatcttctgctccaatggacggaactgaaagtgctgctccagctcagttcttgtttacacctgacatagctggtccatcagatattacacctcttcatattgcagccacatacagtgatactgctggtgttttagatgctttaactgatgatcctcagcagctgggaatcaaagcatggaagaatgctcgcgatgctactggattgactccggaggattacgctcggaagagaggccacgaatcctacatcgagatggtccagaacaagattgacagcaggttacccaaagctcatgtgtctgtcaccatatccagcaccacatccaccaccgacttcaccgaaaagcacgcgagccaatcgaagactacagatcaaaccgcatttgatgtggagaagggccaacagatcagcacaaagccaccactgagctgcaggcagtgtctcccagaactcgcttaccggcatcatttgaacaggtttctgtcaaccaggccagcagtactctccttggtcgccattgctgctgtctgtgtctgtgtagggttgatcatgcaggggccaccccacattggaggtatgagaggtcctttccgctggaattctttgcgttcaggccccaagtga

SEQ ID NO: 12775 - DNA, 2421 bp, Oryza sativa
  Clone ID: TFbOSC418761j.C1.o28.gm
atggcgctgtcgacggcgcagacaggggagtcgatgcactcctcgacgttcgcgtcgcggtacgtgcgcacggcgctgccgaggttcaggatgccggagaagtcgatccccaaggacgcggcgtaccagatcatcaacgacgagctgatgctcgacggcaacccgcgcctgaacctggcgtccttcgtcaccacgtggatggagcccgagtgcgacaagctcatgatggccgccatcaacaagaactacgtcgacatggatgagtaccccgtcaccaccgagctccagaaccggtgcgtgaacatgatcgcgcatctgttcaacgcgccgatcggggacgacgagacggcggtcggggtgggcacggtggggtcgtcggaggccatcatgctggcggggctggcgttcaagaggaagtggcagaacaggatgaaggccgaggggaagccccacgacaagcccaacatcgtgacgggggccaacgtgcaggtgtgctgggagaagttcgcgcgctacttcgaggtggagctcaaggaggtgaagctgacccaagggtactacgtgatgaacccggagaaggccgtggagatggtcgacgagaacaccatctgcgtcgccgccatcctcggctccaccctcaacggcgagttcgaggacgtcaagatgctcaacgacctcctcaccgccaagaacgccgagacagggtggaacacgccgatccatgtggacgcggcgagcggcgggttcatcgcgccgttcatctacccggagctggagtgggacttccggctgccgctggtgaagagcatcaacgtcagcggccacaagtacgggctcgtctacgccggcgtcgggtgggtcatctggcgcaacaaggaggacctccccgatgagctcatcttccacatcaactacctcggcgccgaccagccaaccttcacgctcaacttctccaaaggatcgaaccagataattgcgcagtattaccagctcattcgtctcggattcgaggggtacaaggacatcatgcagaactgccgggacaacgcgacggtgctccgggaggggatcgagaagacgggccacttcgacgtggtgtccaaggactccggcgtgccgctggtggccttctccctcaaggactcgtcgcggtacacggtgttcgaggtggccgagagcctccgccgcttcggctggatcgtgccggcgtacaccatgcccgccgacgctgagcacgtcgccgtgatgcgcgtcgtcatccgcgaggacttcagccgcggcctcgccgagcgcctcatcaccgacctcaccaagacggtggccgatatggacgcccacgccgtcaagaaggccgccgccgagccggccaagaagaccgtgcgggagatagagaaggaggtgaccacctactggcggagtttcgtcgccaggaagaagagcagcctctgggaggacgagggcaatggtggtagcggcggcccaagatgttgctcgtcgtcctcgccctcgcaattaccggtgcggtcttcgacggctcgcgagtcgctggaccacatctccatcaactgcactggcggggtcggggccacatccggctgccgctccgtccactcgcgccgttcagcaccgacgaggagggcgaggctcctcgtccccgctcagccgcggctttgcttggatagtcccgactggaggcagtcggcggcggggagggagtgggaacaggagcgggacgacggcgacgacagaagaggaagttggctcgcgtcggaatcttggtggttcgtaggcgatgatgccaccgccgccgctgccacccgagttcgacgcgagaaacggcgtgcctgcgccggggcaggcggagcaggaggcgatggagctgcacgggcgccgccatcctcctcctcggcgagcacgagggcggcggcctcaactccgggcggtgggatgcgcggttcgcgcatgcactacctacggtactacgacgcggcattcgacgcggtggacgcggcggggttgctggagactagacccgcgagggccaaggtggaggagatgttcgcgcgggagatccgcaacgcagtggcgttcgagggcgcggagcggtttgagcgccacgagagcttcgccgggcggcggcggcgcatggaggacggtggcggtttgcagtggggttcgaaggcggaggagaaatgtttattgccgtcgtcctccttggctcgtcgtcccagacgccaaccgtcgcccccggtttcgctgcgccccgatgggagcttgccaccagccgtcgccgccgctccactcgtcctcccactgccacgagcctccgcggccgagccgccgcgctgcgccccgatgccgccaaccgccgctcccctcgtcctcccgccaccgctgccaacagagaaagagagaatatag

SEQ ID NO: 12776 - DNA, 651 bp, Oryza sativa
  Clone ID: TFbOSC22910j.C1.o3.gm
atgatcacgtttgggttgaactcccgcccccatccggagttccggaacgacctccgcccatcgtcatcgtcacttgccgccggcgaaagtgagtccccaaaggcggtggagaggctggagagagagggatgtaccagatctggaagctcccgccgtcagccgcgccgaggctccgggatgcggcagccgctccgcccgtcgccggcggccctccacccacgaggtgctgccgtcgcccctacgcgctcgcctggtgccgccgtcgccggcgctgagatgcggcagcaggccaccggcgggtggggaggaggctggcggggagctcctcctgcgcggccgcgagctcctgctgctgcagctgctgctaatttatctcgtacggccatggcgctcacgaaagaagcagagcgcctcgacgtgcccttccagttcaacccggtggtgtcccgcctcgatgccctcgatgtggagtccctccgcgtgaagaccggcgaggccctcgccatctgcttcagcctccagctgcactgcctcctggcgtctgacgacgacgccacggccggcgcgggcggcgacaaggagaggcgaagcccggagtccgggctgtccccgtcgaagtcacgcgcggacgcgttcctgggcgcgctatag

SEQ ID NO: 12777 - DNA, 651 bp, Oryza sativa; identical to SEQ ID NO: 12776
  Clone ID: TFbOSC412551j.C1.o9.gm

SEQ ID NO: 12778 - DNA, 414 bp, Oryza sativa
  Clone ID: TFbOSC407154j.C1.o12.fg
atgggagcgggacggcggcgacgacagaagatgatgccgccgccgctgtccaactttgacgcgaggaacggcgtgcctacgccgggacaggcggagcaggagacgatggagctggtgcgcatgctcaccgcgtgtgccgactcagtctccgccggcaaccatgaggccgccatctactacctggcccggctctgcgagatggcttcgctggcagggcccatgccgatacaccgcgtggctgcctacttcattgaggtgctcacgctgcgcgtcgtgcgcatgtggccacacatgttcaacatcagcccaccgcgggagctcactaacgacgccttcagcggcgacgacgacgccatggcgctgcggatactcaacaccatcacgcccatcctcctcctcggcaagcacagctag

SEQ ID NO: 12779 - DNA, 390 bp, Oryza sativa
  Clone ID: TFbOSC1414j.C1.o5.gm
ggggagatcgccgacatcgtgagccgcgaggggagcagccgggtggagcgccacgagcagatgccgcggtgggtggagaggctgcggcgcggggggatgacgcagctgccgctcggcgccaccggcctctggcaggcggcgatgcagctccgcgagttctccggcgccggcttcggcgtccaggagaacggcggcttcctcacgctcacctggcatagccagaggctgtactcggcgtcggcgtggcgcgcgaccgcggggaagaagatgacgatgatggctagcggcgccgccgacgccatggaggagagtcagaacagcaacaccaacggcggcggcggcggaagcagtggtggtggccatggtgctctcaaccaaatcatgcagtga

SEQ ID NO: 12780 - DNA, 1539 bp, Oryza sativa
  unsure (1)..(1539): unsure at all n locations
  Clone ID: TFbOSC9377j.C1.o2.gm
atggcggtggaagccatggcgtgggcatccaagctgcttgatggtggagggcgacggcacagtgacggttttgtgaagccggtggttggcgtcggtgacaacgccgacggcgactgtgactctgaagacggtggcaacgtcggcggcggggaaggagtcgggtgcaaggtgggaatgatgacgncaaggtggctgggctcaggaggaacaggcggaggggcggcggcggtggcgcggcagcagctggtgctggccggagagggcggagatgaggccggcgtgtcgtgtctcttcgctcccttccagcaccatgagccacttggagaacacgctcgaggcgcgtctcgccggaacggggagccagatgtaccagtcgctcgttgcgaagcgcacatcgacggtggacttcctcaaggcgtacaagctgttcacggcggcctgctgcgtcaagaaggtgagcgtcatcttctgatcttctccaacaagaccatctacaacgccgtcgccgggaagcgcaagctgcacatcgtcgactacggcctcagctacggattccagtggccagctttgttctttttgctgggaaccagggaaggcggaccaccggaggtgaggatgaccggcatcgacgtcccgcagccgggcttccggccagccgaccagatcgaggagacaggccgccggctgagcatctgcgcgcgcgcgccagttcggtgtgccattcaagttccgcgccattgccgcaaagacgagagcgtggtcatggacagggacagcccgagccccagagatgtggtgctcaacaacaaccgcgacatgaggcctcacgtgttcgtccagtgcgtcgttaatggcgcgtacggcgcgcccttcaaggaggcctcacgtatcggcttgggcatcagcgccaggtgctgcctcgctgggaagcagacgagcaggtcggcgccgtcgtcgtcgccaccacgcccttccctccacctccacctccacctccgccgccggccgccgccttcttcctcacgacacgcggccgacgatgcggcgctccaccccctctcccgccggcgcgacgcgtacgtggagaggatgggagagggagaggtggtcgacgggatatggccagatgggggaggggaaaggcggccggcagctgctgtgctcgccctccaccgctctgcccgccaccggtccgcctgccactcgcagaccgctgccgcgctcgctcgctgccagcctcccgcatccgccggagagaagagaagggcgacggagggaggcctacgagcgcgcgtggaggccgacgagcaggacagcacctcggcggcgaggcgtggacgagcgggcgaagcgggctggcggagcagaggaggagcggtggcgggcgagctcctcgcccttgcagggcttcatcgtcgaggagaggtcgcaatccatcgtcttcgcagggcgtcgcgcggcgaggcggccggtcgcagcagcgccgaggagcggccgcacgggaaggggtcgtggcgtggagtagctagaaggagatga

SEQ ID NO: 12781 - DNA, 723 bp, Oryza sativa
  Clone ID: TFbOSC414562j.C1.o7.gm
atgccgtcacctttggtgctgctgcttcagtgcttcggagacgttgcactgacggacctcctcgtcggacttgcgctgctgctcagctgccttcaaagccgccgccgctggttggacgcccgctcgaagcagcagccggcgccgctggagagtgagcgcttcgaagttggaatggatagtgtgctgctgggagcttacgagctagggtttgcagcactttacccacctctcgactctggtctagttgggccgacggccatggcgctcatgaaagaagcagagcgcctcgacgtgcccttccagttcaacccggtggtgtcccgcctggatgccctcgacgtggagtccctccgcgtgaagaccggcgaggagtctgggctgtccccgtcgaagtcacgcgcggacgcatcgccgaaggtgatggtggtgacgaagcaggaggcgagccacaacgcggcgttgctgacggagcggttcgtggaggcgctcaactactacgcggcgctgttcgacggcctggaggagtggcacgagcggctggaacggtgggtggggcggctggagggcgccggcttcggccgcatcccgctcagctactacgcgctgcttcaggcgaggcgggtggcgcagggccttggctgcgatggcttcaaggtccgggaggagaagggaaacttattcctcttctttgtttccacatggcgcggccgccgcttcgactga

SEQ ID NO: 12782 - DNA, 1173 bp, Oryza sativa
  Clone ID: TFbOSC402543j.C1.o5.gp
tcacatcaatgcaaataataattaaaaaaacaatatcacacacatcaatgggcaaaaatgtttgaccctctgttgcaacatggatcatgaatagaccaaataagttggccgaaaagatagttctcaggttgacaacagcacaagactagccaaaacccagttcaacattttgagcatattacaatgttactgtctgccacagtgcagtaagcacctagtaaaaacagagtaactggtgtcaattacaaccggatcaactgactggattgatcgcaagaaccggtgacgctgcagcgaacatcatccggaccaggacctaagtctattttctaagtggtagtgtggcactaagctgcaacatgacaacagaagcaactaattaacatcacataaaaacatggatatctacatgcatgcttggttatcttatggcttcaacaacttgggctaccaattctccctcatagcctgcattgcatgaattggtttgaatcagaagaagaaccaacccattggaatcacaagtgcactccaaattctagataggcatacctcaagtcattgggtccatcaaaccaacaccaacaccatcgatcttcatacatgacatactgccactagccatcttattgaaatacctagatcttatatttgtcgcgatgccaaaaaaaaaaacaactaaaaataagagagagcatcatttggcgtccatgttgagatggcatagagtattcgtcccttccatccttgcaagagccattggtgatctatatctatcacgaagtccttgtggtagcagtccttgaccttgttccgcactacctgaacaatttctggattcaatggcagttgcttgaagccagcccgttgattccgcacctgccattgcttgtatgtctcagggcgctccacccgatctatgccctcacacgcaatgacattcagagcagctcgtccaaagatgttttgctcaatcagcagccgctgttcgctttcccttggggtagttgcatccagaacatcgaacaaggccgagtaaaagaacaaagcctcccggaaccgtgtcacaaagaatggtgcactgaatgagccattcactattgcatggatgaacacatgaggctgcatcttccggatgttgctgagcacaatatcccttgggctgtcgatcac

SEQ ID NO: 12783 - DNA, 769 bp, Oryza sativa
  Clone ID: TFbOSC416737j.C1.o13.gp
taattgtgatataatttactctttttccatatataagcattagctaccaagaattatgagttgctacaactaattaagctttaccagatcaataccaaactcactcaccaaatggaaaatgaaaaaaatggaaaaagagcgcgaattaattaagtgaccgatttggtgacggcaataatgtcgcggcatcccctggtctaacgccaggcggaggcgacggtgaccacgcgccccatccatccgagccggagcacgccgttctccgccttgacggcgaaccctgccgcgacggggccctgccgggccaacacctggtcagcaatgcccggtccgagcgccaccggccggaatcccgccatgccgaaccgggagcgccacttgccgaacacctcgcaccgctccagccggtcggcgccttccctggccaccgcgttcgccgccctcccgcccagcgccgcctcagcacgcgccctctccgcgctctcccgggggatcgtggcgtccagcgactccaggatggccccgtagtgcgcgcacgcgtcggtgaagcgcgtggtcagcggggccgtgttggagttcagctcctgctccacgagggccaccacctgcgggccgagggcgcgcacccgccggaggatctcgtcgcgcgggttcgccggcgagacgctctcgtcggggacgtgggagagcgcgaacgccaggttgacagccagcgcctccccggcctcgcaccccagcttggatgcttctatctcccctgctctgcagc

SEQ ID NO: 12784 - DNA, 738 bp, Oryza sativa
  Clone ID: TFbOSC900243j.C1.o1.fg
atgatccggatcaccgtgccgtccgtgcgccccgccgtcccgccgcttctcgccgtgtcgagctcggagctcggagcccggctcgccatcttcgccaagtccaaaggcgtgcagctggagttcaacgtcgtcgagagcgcgacgacgacgtctccgaagaagacgtcgacgacgctgtgccaagaactcgcgtccgtgctgtccgacccgccgtcgctggggctaagggacggcgaggcggtcgtcgtgaactgccagagctggctccggcacgtcgcgccggacacgagggacctcttcctcgacacggtccgggcgctgaacccctgcctgctcaccgtcaccgacgaggacgccgacctgggctccccgagcctcgcgtcgcgcatggcgggctgcttcgacttccactggatcctgctcgacgcgctcgacatgtcggcgcccaaggacagcccgcggcggctggagcaggaggcggccgtcgggcggaagatcgagagcgtcatcggcgaggaagacggcgccgagcgctcggagcccggcgcgaggctcgccgagaggatgagccggaaagggttcgccggcgtcgtgttcgacgaggaggcggcggcggaggtgcgacgattgctgagcgagcacgccacggggtggggcgtgaagcgggaagacgacatgctggtgctgacgtggaaggggcacgccgccgtgttcaccggcgcttggacgcccaactag

SEQ ID NO: 12785 - DNA, 1482 bp, Oryza sativa
  Clone ID: TFbOSC401329j.C1.o80.fg
atggataccttcccgttccagtggcccatggatccagccgcgtcatccggcctcgacgctgggtttctgccgcctccagcggctgtggcgcccgacgacggcgtggggtactacgacccgcctgcgggggcggatgtggacgccgctgctctgccggagttcgccgcggccttcccgccgtgcgcgcctgatgctgccgctgctgtgttggccatgcggcgggaggaggaggaggtcgcgggcatccgcttggttcatcttctgatgagctgcgcgggcgccatcgaggctggtgaccacgcgctcgcgtccgcgcagctcgccgactcgcacgccgcgcttgcggccgtctcggccgcctccggcatcggccgcgttgccgtccacttcaccaccgcgctctcccggagattgttcccttcgcccgtcgctccgcctaccaccgacgccgagcacgccttcctctaccatcacttctacgaggcgtgtccctacctcaagttcgcgcacttcacggcgaaccaggccatcctcgaggccttccatgggtgcgaccacgtccatgtcatcgacttcagcctcatgcagggcctgcagtggccggccttgatccaagccctcgccctccgaccaggcggcccgccgttcctccggatcaccggcattggcccgccctcacctaccggccgcgacgagctgcgcgatgtcggcctccgactcgccgacctcgcgcgctccgtccgcgtccgcttctccttccgcggggtcgctgcgaacagcctcgacgaggtccgcccgtggatgctccagatcgcgcccggggaggccgtcgcgttcaactccgtgctgcagctccaccgcctcctcggcgacccggccgatcaggcgcccatcgacgccgttctcgactgtgtcgcctccgtccggcccaagatcttcacggtcatcgagcaagaggccgaccacaacaagacgggcttcctcgacaggttcacggaggcgctgttctactactccgcggtgttcgactcgctggacgcggcgagcgccagcggcggcgcgggcaacgcgatggcggaggcgtacctccagagggagatctgcgacatcgtgtgcggggagggcgccgcccggagggaacggcacgagccgctgtctcggtggcgggacaggctcacgcgcgccggcctgagcgccgtgccgctcggttcgaacgcgctgcggcaggcgaggatgctggtcgggctgttctccggcgaggggcacagcgtcgaggaggccgacgggtgcctcaccctcggctggcacgggcggccgctgttctcggcgtccgcctgggaagccgccggggacggcggcggcgacaataacaacaacagtaacagcaacgttagcggtagcagcggcagtgacagtaacaacagcggcagcagcaatggtaaaagcagtggggctcgggatggtagcagcgtgtgtttgtaa

SEQ ID NO: 12786 - DNA, 321 bp, Oryza sativa
  Clone ID: TFbOSC20530j.C1.o4.gp
tggcacccatgcggagtgagcaaagaggactcgccccatccatccctgcagcagccactgcccgtcctctcccagcagaaagtccttatggtggtacttgttcacctcttccctgattgtatcaacgatatctggtctcagtttcagctgctgcatgcctgcacggtggttcctggcctgccactgtctgtacttctcagggcgctccaccaggtctgcaccctcacaggcgatggcgttgagggcataaggccccagaacgttctgctccagcgccagccgcagcccactctcccttggggtggtggcgtccagcatgtc

SEQ ID NO: 12787 - DNA, 1728 bp, Oryza sativa
  Clone ID: TFbOSC100759j.C1.o3.fg
atggaggtgaccatggaggacgtggccggggacttcgagttctccggctgcggctccaccaccaccacctcctccgcgtcctccctcgacgacggcacggggatgtgctacgcgtggggcgagctgtccccggtcgccgactgggccaacttctgctgctccgacgacgacggcggccacgacctgcacggcctcatcgagtccatgctctgcgacgacacgctcgtcggcgtcgacgacgacggccaagctggcctccaccacgcggatatgttccgcgacgacctttactgctacggcaatggctccaacccgagcagcaccaccaccacgaaccctggctcgccggtgttcgacgacccgacgcagggctgccccgagaagggcctccggctgctccacctgctcatggcggccgccgaggcgctctccggcccgcacaagagccgggagctggcccgggtgatattggttcggctcaaggagatggtctcacacaccgccagcgccaacgccgccgcgtccaacatggagcgcctcgccgcgcacttcaccgacgcgctccaggggctcctcgacggctcccaccccgtcggagggtccggccggcaggcggccgccgcggcgtcgcaccaccacgccggcgacgtgctgacggcgttccagatgctgcaggacatgtcgccgtacatgaagttcggccacttcaccgcgaaccaggcgatcctcgaggcggtgtccggcgaccggcgcgtgcacattgtcgactacgacatcgccgaggggatccagtgggcgtcgctgatgcaggccatgacctcccgcgccgacggcgtgccggcgccgcacctgcgcatcaccgccgtctcccgcagcggaggcggcggcgcccgggccgtccaggaggccggccgccgcctgtcagcgttcgcggcgtccatcgggcaacccttctctttcggacagtgccgcctggactccgacgagaggttccggccggcgacggtccggatggtcaagggggaggcgctcgtcgccaactgcgtcctccaccaagccgcggccaccaccaccatcagacgccccaccggctcggtggcgtcattcctgtccggcatggccgcgctcggtgccaagctggtcacggtggtcgaggaggaaggcgaagccgagaaggacgacgacggcgactcggccggcgacgccgcggcgggcggcttcgtgcggcagttcatggaggagctgcaccgctactccgcggtgtgggactctctcgaggccgggttcccgacgcagagccgggtgcgcggcctcgtggagcgcgtcatcctcgcccccaacatcgccggcgccgtgagccgcgcgtaccgcggcgtcgacggcgaggggaggtgcgggtgggggcagtggatgcgcgggagcgggttcaccgccgtgccgctcagctgcttcaaccacagccaggcgaggctgctgctcggcctgttcaacgacgggtacacggtggaggagacgggtcccaacaagatcgtgctcgggtggaaggcccggcggctgatgtcggcgtccgtgtgggcgccgccgccgctgccggtgccgtcgtcgccgccggagggggtgtgccagcccgtcgtcgggatggcgccggtggccaccggtggcttcgcgcggacggagtttgactatattgattcgttccttgtcgagccagcttacgcgctagtttga

SEQ ID NO: 12788 - DNA, 1752 bp, Oryza sativa
  Clone ID: TFbOSC20525j.C1.o3.gm
atggctgccgcgccgaagccggaggaactcgtcgtcgccatcgagcagccattctccccgtcgctcttcctggacctgcccccgacgccgcaccacgatgacgaccccaacaatgtcaatgacgacctcctcctccccttcatctcacgcatcctcatggaggacgacatcgacgacaagttcttctaccagttccccgaccaccccgccctcctccaagcccagcagtcttacgcccaaatcctccatgcccctgccacatcttcttcctccgacgacaccaccatcaacaacaatacgaccaactccacctccgtccccgacacgctcgccatgcccgaccacgacgccgacacccagagcgcgccggacgacatggagatgctctacatggcgttcctcaagggcagggaggaggccaccaagttcctgcccacaaacaacaccctcttctctggcttcaaggcagagccggtgctggatattcaacccaccttcacgttcggaccaagcggcggcggcaggggccggaagaacaggcacgccgaggaggacgacctggagacggagaccagcaggagcagcaagctgatggcgccagaacatgacgacgccgccgccgccgacgagatattcgacgaaataattctcaatgggtaccagatgatcattaaggggatagatgagctgcgcgtcgccatgggcagccagagccaggccgacaagaacggccgaagagcgtcacgcgcgaagacggcggtggtcgacctacacaccctgctcatccactgcgcgcaggctgtggcgacgggagactggcggagcgccaccgagctgctgaagcagatcaagcagaactcgtcggcgagaggggacgcgacgcagaggatggcgtgctgcttcgctgaggggctagaggcgcgtctcgccggaacggggagccagatgtaccagtcgctcgtcgcgaagcgcacgtcgacggtggacttcctcaaggcgtacaagctgttcacggcggcctgctgcatcaagaaagtgagcgtcatcttctcgaacaagaccatctacaacgccgtcgccgggaggcgcaagctgcacatcgtcgactacggcctcagctacggattccagtggccagctttgttctttttgctgggagccagggaaggcggaccgccggaggtgaggatgaccggcatcgacgtcccgcagcctgggttccggccagccgaccagatcgaggagacaggccgccggctgagcatctgcgcgcgccagttcggcgtgccattcaagttccgcgccattgccgcaaagtgggagacggtccgccgcgaggacctccatctcgacccagaagaagaagaagaggaggtgctcgtcgtgaactgcctccatggattgaacaccctgcaagacgagagcgtggtcgtggacagcccgagccccagagacgtggtgctcgacaacatccgcgacatgaggcctcacgtgttcgtccagtgcgtcgtcaacggcgcgtacggtgcgcccttcttcgtgacgcgcttcagggaggctctcttcttctactcggcgcacttcgacatgtggacgccaccatcccgcgcgacaacgacgatcggctgctcatcgagcgggacatgttggggcgatgcgccctcaacgtcatcgcctgcgagggcgcagacagagttgatcggccggagacgtacaagcagtggcaggtgcgcaaccatcgcgccgggctga

SEQ ID NO: 12789 - DNA, 1758 bp, Oryza sativa
  Clone ID: TFbOSC1203j.C1.o6.fg
atggggccagccgcgccgccgtccgaagccgccgcggcggccgacgatgtggtgctcccgtacatctcgcgtattctcatggaggaggacatcgacgacgacatgttcttctgcctgtaccccgaccaccccgctctcctcgaggcgcagcagccgttcgcccagatcctctcctcctcctccggcatcgccggtgaggtgaacagtgcacccatggaggattctgctgccttgatgatgcaggggagcggcaatggtaggggacggaagggtagtaagcatggcggggacgagctggaggccgaggtgggcagggcgagcaaactgatggccacgccggaggaggaggacgacgacgacgatggcgtcggcgagatgttggagaagatgatgctcaacggggacgaggagatgaacgcgccacgcgtccccgcggagaaaaacggcgggaaggcggcgcggcggaagaggaggcagggcaagggggaggtggtggacctgcgcgagctgctcatgtcgtgcgcgcaggcggtggcatcgggcaaccgccggagcgccggcgaactcctggagcagatcaagcggcactcgtcgccgacaggggacgccaccgagcggctggcgcattacttcgccgacggcctggaggcgcggctggccggcgcggcgagcctggagcaccggctgctcgcgtccgcggaggagcgcgcgtcggccatggagttgctggaagcgtaccaggtgttcatggcggcgtgctgcttcaagtgggtggcgttcacgttcgccaacatggccatcctccgcgcggcggaagggaggagcaaggtgcacatcgtggactacggcggtcagtaccacggcctccagtggccatccttgctgcagcggctggcggagagggaaggcgggccaccggaggtgaggatgacgctcgtcggccacccgcagccaggtttccggccagcccgacggctcgagaggacggggcgccggctcagcaactgcgcgcgcgcgttcgggctcccattcaagttccgcgccgtggcggcggcgaggtgggagacggtcaccgccgaggacgtcgtcggcgtcgaccacgacgaggcggcggtcgtcgtgaacgacgtgctcagcctgggcaccctgatggacgagagcggcgtgttcgacgacccgagccctcgggacacggtcctcggcagcatccgcgacatgcgcccggcggtgttcgtccaggccgtggtgaacggcgcccacggcgcgcccttcttcccgacgaggttccgggaggcgctcttcttcttctcggcgctgttcgacatgctggacgcgacgacgccggaggaggggagccacctgcgggcggtgctggagagggacgtgctgaggcgggcggcggtgggggtgatcgccggggaaggggcggagcgggtggagcggccggagacgtacaggcggtggcaggcgaggaatcggcgcgcggggctgagacaggtggcggtggaggccgacgtggtggaggcggtgaggcgcagggtgaggaggcggcatcacgaggaattcgtgatcgaggaggatgcagggtggttgctgcaggggtggaaggggcgcatcctgtatgctcactcggcgtgggtcgtggcagaggatgcaactagcgttggagagctcacagtagtaacaacaagcttagtggcaataatcctttcagctgcttcagcacaagacgagcttccattgtccaccaatgaatga

SEQ ID NO: 12790 - DNA, 1479 bp, Oryza sativa
  Clone ID: TFbOSC400909j.C1.o3.fg
atgccgtacatggtaacagctgatggccattctccatcttctgcagacaattcctgctcagatgtggcaaaagactcaccattggtgtccaatgtatctcagcagaattctcagtctatatcagacaatcagagttctgaacttgaagtagagtttgatgaagatgatatcaggatgaagcttcaggagctggagcatgctttacttgatgatagtgatgacatcttgtatgagatttcccaggcaggtagcattaacgatgaatgggctgatccaatgaagaatgtcatactccctaactcaccaaaagaatcggaatcaagcatcagttgtgctggtagcaacaatggagaaccacggaccccaaagcagttgctctttgactgtgcaatggcattatctgattataatgtagatgaagcacaggcaatcataacggacctccggcagatggtctcaatccaaggggacccttctcagaggattgcagcctatctagtggaaggtcttgcagcaagaatagtagcttcagggaaaggcatatacaaggccttgtcgtgcaaagagcccccgactctttatcagctttcggcaatgcaaatcctctttgaaatctgcccgtgcttccgatttggtttcatggctgctaattatgctatacttgaagcctgcaaaggtgaagatagagtgcacattatagactttgacattaatcagggcagccagtacattacactgatacagtttctgaaaaataatgcaaataagccacgtcatttgagaataactggtgtggatgatcctgaaacggtacagaggaccgttggcggtttgaaggtcattggtcaacgtctagagaaacttgcagaggactgtgggatatcttttgagttcagggcagttggtgctaacattggggatgttacacctgcaatgctagattgttgtcctggggaagcactagttgtcaattttgcattccagctgcaccaccttcctgacgagagcgtttcaattatgaatgaaagggaccaactccttcgaatggtgaagggtctgcaaccaaagctcgtcacactggttgagcaggatgccaataccaatactgctccatttcagacaaggttccgtgaggtttatgattattatgctgcactttttgattcactggacgcgacacttccaagggaaagtccggatagaatgaatgtggagcggcaatgtcttgctcgtgaaattgtcaacatcttggcttgcgaaggtcctgatcgtgtggagagatatgaagttgctggaaaatggagggcaagaatgacaatggctggcttcacaccatgcccatttagtagcaatgtcatcagcgggataagatcgttactgaagtcgtactgtgacagatacaagttcgaggaggaccatgggggacttcacttcggctggggagagaaaactctaatcgtctcctccgcatggcaatag

SEQ ID NO: 12791 - DNA, 2964 bp, Oryza sativa
  unsure (1)..(2964): unsure at all n locations
  Clone ID: TFbOSC900004j.C1.o19.fg
atggcagcgcatacagtgacggacccactggaggagctatggaaccacacgatgtcgatggacaagacgcacctgatgtgcttctacccgagcaagatcaccatgggtggcgtctggacgggcgacaatccgctcgacttctccatacctctcctcctcttccagatcctcctcatcacctccaccacccgcgccgccaccctcctcctytytcctytccgtctccccacctacatctcccagatcctcgccggcttcctccttggcccctccgtccttggccacctccctcacttctccaacctcgtcttccccgtccgtagcctcttcgtccttgagtccatggcccttctcggcctcgtctactacaccttcatcgtcggcgtcgagatcgaggtctccgccatcacccgcgccggcatccgtagcttcggcttcgccattggctgcacgctcccgcccttcctcgtcggcgctctcaccggctacgtcgcgctcagcactgacgacaaacacaagggtgacacgttcctcaacaagctctccttccccatcttcctcggctccaccttctcctccaccgccttcgccgtcctcgcccgcaacatcgccgagctgaagcttgccggcaccgacgtcggccagctcacgctctctgcgtcactcatcaacgacaccttcgcctggaccggcctcaccgtcgccacggtgctcggccactcgcgctgcaccatcacgcagaccacgtggacgctcacgtcgggcgtcgtcatcttcggcgccagctacctcctgctccgccccatgctcctgcggctggcgaggcgcgccgccgagggggaggcggtcggcgaggaccgcgagtgctggattctgatcggcgtcatggtggcggcgctggtggcggacgcggggggcacgcacgccatattcggcgccttcgtgttcgggctcgcggtgcccaacgggccggtcggggtggcgctggtggagaaggtggaggacttcgtgcggcctccgcaccgacaccncaagatcaccaacatgcattctgccgtgttgctcatggtcgctgccatggtcgctgcggtcttgaaggtcgtcgccgcaatcggcgtcgccgaccaccaagaacaacaccacctcgccgcgcccatggtccgcaagcgccccgcctcggacatggacctgccaccgccgcgccgccatgtcaccggcgacctgtccgatgtcacggccgccgcggcgggcgcgccgacgttgtctgccagcgcgcagctccccgcgctgcccacgcagctcccggcgttccaccacacggacatggacctcgccgcgcccgcgccgccggcgccgcagcaggtggcggcgggtgagggtgggccgcccagcacggcttgggtggatggcatcatccgtgacatcatcgccagcagcggcgccgcggtctccgtcgcgcagctcatccacaacgtgcgtgagatcatccggccatgtaaccccgacctcgcgtccatcctcgagctccgcctccgctctctcctcaactccgaccccgcgccgccgccgccgccgccgtcgcatcctgctctcctccctcccgacgccacggcgccaccgccaccacccacgtcggtcgccgcgctccctccccctccgccagcgcagcccgacaagcggcgtcgcgagcctcagtgtcaggagcaggagcccaaccagccgcagtcgccgaagccccccaccgcggaggaaaccgccgccgccgccgcggccgccgcagcggcggctgccgcggccgccaaggagcgtaaggaggagcagcggcggaagcagcgcgacgaggagggcctccacttgctgacgctgctgctccagtgcgcggagtcggtgaacgcggacaacctggacgaggcgcaccgcgcgctgctggagatcgcggagctcgccacgccgttcggcacctcgacgcagcgcgtggcggcctacttcgcggaggccatgtcggcgcggctggtgagctcgtgcctggggctgtacgcgccgctcccgagcccgtccccggcgggcgcgcgggtccacgggcgcgtggcggcggcgttccaggtgttcaacgggatcagcccgttcgtgaagttctcgcacttcacggcgaaccaggcgatccaggaggcgttcgagagggaggagagggtgcacatcatcgacctggacatcatgcaggggctccaatggccggggctgttccacatcctggcgtcgcggccgggggggccgccgagggtgaggctgaccgggctgggggcgtccatggaggcgctggaggcgacggggaagaggctgtcggacttcgcggacacgctgggattgccgttcgagttctgcccggtggctgacaaggccgggaatctggacccggagaagctgggcgtcacgcgccgcgaggccgtcgccgtccactggctgcgccactccctctacgatgtcaccggctccgactccaacacgctctggctcatccagaggttggcgccaaaggttgtaacaatggtggagcaggatctgagccactcaggctccttcctggcacgttttgtggaggccatccactactattcggcactgttcgactcgcttgatgcgagttacagcgaggatagcccggagcggcatgtcgtggagcaacaactcttgtcgcgggagatccgcaatgtgctagccgtgggcggtccagcacgcaccggcgatgttaagtttgggagctggcgcgaaaagcttgcgcagtcgggcttccgtgtgtcgtcgcttgctggaagcgctgctgctcaggctgcactgctgcttgggatgttcccttccgatggatacacgcttattgaggagaatggcgctctgaagctcggatggaaggatctgtgccttctcactgcctctgcttggcgcccaattcaggcttcgggacgttag

SEQ ID NO: 12792 - DNA, 2026 bp, Oryza sativa
  Clone ID: TFbOSC12505j.C1.o1.np
cttactcccccccccccccccccaccgcctcatcctcttcaccacctccacccgcctcctcccgctcccgttccaccactcgctccgcctcgccccgtcgttctgcgcagcccgagccaacgagagcggcgagcaaccgctcgggcaaagcccgctcgaggccgagcagcagccgccgccgcagccgcggggaggggacggagggagcaaggacgccaccgccgtcgcgggggcctggcggggagggaacggggagagcgaggacgccgccgccatcgcgcacgcagctccatcgtttctcgttccccaacctcagctggggcaaccaccgcctcctccgctgctccaagaaccccgcctcatcgcctccacccgcggtgccggacaccccgtcgccggacaaggagaagaccgcccacagctccactgacggcgtcggcgtcggcagtttgcctcagcggggtccgcaacggccaccgatcgatcgctggtatccgagggggaggttttgtccgtcccctcgtcccccgcactgttcgcgctcgctcgcccgctgctctgctcgtctcttccaccatcaaatgatcacatgctgtccatcaactcacccccgtcgtctcgtgtgcgtgcagctttcccccacggcctcctgctgctgccgacccgacccgacctagcgtccctcgccatcgcgcgatcgtgagaaaaatcgggtgttattgtgtagtagaaaaaaaaaccggtcccgtcctttgattccctctgcctgggcgccgcccgctacgggacgcgagagcagctaccagcaacccgacaaaccgcacaggcggcctccccctcccgcgcgcgccagcgtacgggggaggaggaggaggcggcggcggagacgcgtgggctgcggctgcttagtttgttgctgaggtgtgcggaggcggtggcgatggaccagctgccggaggcgcgggacctgctgccggagatcgccgagctggcgtcgccgttcgggtcgtcgcccgagcgcgtcgcggcctacttcggggacgcgctgtgcgcgcgcgtgctgagctcctacctgggggcctactcgccgctggcgctccgcccgctcgccgccgcgcagagccgccgcatctccggcgcgttccaggcgtacaacgcgctgtcgccgctcgtcaagttctcgcacttcacggccaaccaggccatcttccaggcgctcgacggcgaggaccgcgtccacgtgatcgacctcgacatcatgcaggggctgcagtggccgggcctcttccacatcctcgcctcccgccccaccaagccgcgctcgctccggatcaccggcctcggcgcgtcgctcgacgtcctcgaggccaccggccgccgcctcgccgacttcgccgcgtcgctcggcttgcccttcgagttccggcccatcgaggggaagatcgggcacgtcgccgacgccgccgcgctcctcggcccgcgccaccacggggaggccaccgttgtgcactggatgcaccactgcctctacgacgtgacgggctccgacgccggcacggtgcgcctgctcaagagcctccggccgaagctgatcaccatcgtggagcaggacctcggccacagcggcgacttcctgggccgcttcgtggaggcgctgcactactactcggcgctgttcgacgcgctgggcgacggcgcgggggccgccgaggaggaggcggcggagcggcacgcggtggagcgtcagctcctcggcgcggagatacggaacatcgtcgccgtcgggggccccaagcgcaccggcgaggtgcgcgtcgagcggtggggcgacgagctgcggcgagcggggttccggccggtgaccctggccggcagccccgccgcgcaggcgaggctgcttcttggcatgtacccatggaagggctacactctcgtcgaagaggacggctgcctcaagctcgggtggaaggacctgtccctgctcaccgcctcgtcgtgggagccgacagacggcgacgccgacgcc

SEQ ID NO: 12793 - DNA, 326 bp, Oryza sativa
  Clone ID: TFbOSC20530j.C1.o8.gp
gattggcgcacccatgcggagtgagcaaagaggattcgtcccatccatccctgcagcagccactgcccgtcctctcccagcagaaagtccttgtgatggtacttgttcacctcgtccctgattgtatcaacgatatctggtctcagtttcagctgctgcatgcctgcacggtggttcctggcctgccactgtttgtacttctcagggcgctccaccaggtctgcaccctcacaggcgatggcgttgagggcgtaaggccccagaacgttctgctccagcgccagccgcagcccactatcccttggggtggtcgcgtccagcatgtc

SEQ ID NO: 12794 - DNA, 1353 bp, Oryza sativa
  Clone ID: TFbOSC415629j.C1.o8.gm
atggaggacgtcgatgagagggttgacctgcaccaaggggaggctgctcttcaggctgcagagaaacccttctatgatattcttggccagtcctgggaggcgacagagaagcccttctatgatattcttgggaaggcatacccatcttcatctaaggagacagcaattaacggtgacagtcaagcagattaccctgataatggtagcagcagttatcatgaacaggcatgtagtggtagctttgttagtgatctccttgggtcacaggatgcgcattcgataaccaccgactggtcttctgaatttgaccgtttggctttgcaattcaggagaggtgttgaggaagcaaagaggttcattccaaatattgaaaagttggtggatgatccagagaagaatggtctttatgcttgcaaacaaacaacagagacaacagaacagaagggcaagcatgagaacaaaataaggaatcatcctcatgatcctcatgttgagcacatagagttgatggaagcaaggaacagtaagcatatggccatctccactagtgaaacaatacgggatgaaatgtttgatagtattctgctctgcaataggcagctccctggtgaagttgctaaccttagaggaatgatggcaaaagaagcaagcgacaacccaaagaaatttcaaagcaaaggatatggaaaagggcaaaggaagccacacagtagtaagaagaaacagaaagaggcaatagatctcagtgttcttctcatccaatgtgcacaagcgatagcatctaacaaccatccctttgctagtgagctactgaggaaaataaggcatcacgctttgccagatggagatggttctcagaggctagcaaactgctttgcagatggcctcgaggctcgcttggctgggactgggagtcaaatcgacttgcaaatgaagaagggggtccacccaagcttaggatcacagggcattgcttcacggtgggaaaccgtacaaattgaggacctgaacattgacaaggatgaggttttcattcttggtgttgtgaatggattgtacagctccccattctttctgactagattcagagaggttttattccattactcatcactttttgatatgctcgacaacaatgttcctaggaaccatgaagcaaggatattggtagagaaggatctctttgggaatgatgcacttaatgctgtagcatgcgaaggtgcagaaaggattgagaggccagaaagctacaaacagtggcaaatgaggatcctcagggctgggttcaagcaacgtcctggatggaaggggaggataatacaggcactgtcaacatggaaagtggaaacctag

SEQ ID NO: 12795 - DNA, 2196 bp, Oryza sativa
  Clone ID: TFbOSC101577j.C1.o23.fg
atgggtctggacaacaatttcggggagctatctggcatgttctgtggcttgtcctatgatggctacacggatcacggcagccagagcgattacttcaggttcgccgacccgcagccggcgatcgtgccccagatggacgccggacccagctccgccgcttcctccacggcgtcgagggccgccgtcagctcggggaccgacaacccagaggactgggagttcatctcggacgagtcgctcaactatatcagccgcatgctcatggaggaggacattgatgagaaggtcagcatgtaccaggaggagtccgcggcgctccgcgctgctgcgaagccattctatgacattcttgggcacaagttcccgccctcccctgaccgccagctggtagcttggcccctcgacagcccgagtgagagtagcactagcagctatccacactccttggctagttctgttactagcagcaacattagtggtgcggtcgatagcagccaacgccgttatgttggacacagtgagtatcggagcttgtctggtcattcttctcaaccgccggttggcccatcaagtgatgttcgcaacgctatggagacactagaagatcctttgattagtaatggcaggatccctgagtatttgtttgagagctttccaacatgggatttcaggagaggtgttgacgaggcacagaagtttctcccgggtagcgataaggtagtgattgatttagaggctggtggtgttgcaaaacgtcaagaagcagggaaagctatttctctgaatgtcagcaaggcagaggttttgaaggtaaagaaaaacagacagagtgaagaccttgacgtgatggaaggacggaatagtaaacagtctgcattttgttctgatgaacctgattggattgagatgtttgatgttctgcttcgtcaaactgagaagaaggcaactgatcttcgaaaaatgatgcgttttgaggcttccaagaattctcaagttgctcagccaaaaggaccaagtgggacccgatcacggggacggaagccaactaagaaggatgtggtggaccttaggacgctactcatccactgtgctcaggcagtggcagctgatgaccgccggactgctaatgagttgttaaagcaaataaggcagcatgccaagccaaatggagatggctcccagagattggcgtattgctttgcagatggtcttgaggctcgcttggctggaacagggagccaactttaccataaacttgtggcaaaacggacaacagcctctgacatgctcaaggcataccatctttaccttgcagcatgcccattcaagaggctctcacattttctttcaaatcaaacaattttgagtttgacaaaaaatgcatcaaaggtgcatatcattgactttggcatttacttcggcttccaatggccgtgcctgattagacgtctcttcaagagggaaggtgggccaccaaagctgcgtatcacagggattgatgtacctcagccaggtttccgcccaactgagcgcatcgaagagacagggcagaggcttgcagaatatgctgagaagattggtgtcccttttgagtaccaaggcattgcatcaaagtgggaaacaatctgtgttgaggatctcaatattaagaaagatgaagtagtgattgttaattgcttgtatcggttcagaaatcttattgatgaaacagttgccatagacagtcctaggaatagggtgctcaataccataaggcaagtgaacccagcaatttttatccatggcattgtgaatgggtcgtacagcgttcccttcttcatcacacggttccgtgaggcattatttcatttctctgcattatttgacatgctcgagacaactgtgccacgggatgatgcccagcgtgcactaattgagagagatctatttggccgggaagcactcaatgtgattgcatgtgaaggctcagacagggtcgagagaccggagacatacaaacagtggcaagtgaggaatctgagagctggatttgtccagtctccattaaaccaagacattgtgctgaaagccaaggacaaagtgaaagacatctatcacaaagactttgtcattgatgaagacagtgaatggctccttcaagggtggaaaggaaggataatctatgccatatctacatggaagcctaataacaattag

SEQ ID NO: 12796 - DNA, 1488 bp, Oryza sativa
  Clone ID: TFbOSC401401j.C1.o8.gm
atgtcggtttgggagggaggaaccgacattgggcggtcaagccagcaagctggctcttcggctagcggccaaaacgcttcttcttcttcattcaccctgacttcgcccggcctccgcccgcccacccacgcggcctcaacgccgccgccgccgccatggctcgacgacgccgaccaccaccacgacaacgccttcctccactgggtcatcaacgaccaccaccatccactccttgatcttgatgacgtcgacctcgactacgctaagcctgcacctttcttcttcgctgatcgaggcctgcaccaccaccacccagcttcttcgtctttcccaaacccaaagccgacggccgacgacaacactagtactgtggagcagctggtccaggccgccaaactcaccgaggccggcgacgtcttggccgcccgacacatcttggcgcgcccggcgatcaactaccgcctccccgcctccgccgccccgccgctactccgctccgccttgtatttcaaggacgccctgcgccgagccctcatctccgacgacgactcctcctcctcctctacaccgcccccgcccctccacgagccgcacccgcacgacctcctcctcaagctcacctcctacaagtccttctccgacctctccccgctgctccacttcgcccacttcacctgcgtccaggccgtcctcgacgagctcgcaccctccgcctcctgcatccacctcctcgacttcgacatcggtgtcggcgagcagtgggcctccctcatgcatgacctcgcccaccgccaccccggcgtcgccctcaaggtcaccgccctcaacgtcaccgcctcctcctcctcccatcacccgctccagctgcagctcatccacgacaccctctccaccttcgccgccgacctctccgtccccttccgcttcgccgccttcaacctcgacgccaccgacctcaccccccttcttgccgttgccgccgccaccgacgccattgccgtccaccttcccgtcggctcggtccacgccaccgcagtgccgtccgtgcttcacctggtcaggcgccttggcgccaagctggttgtctccgtggaccgcggctgtgaccgcggcgagctgccgttcgcggcgcacctgctgcaggcattgcgctccaccgtgtccctgctggagtcgctggacgccatgggcacggactccgacgtggcggccaagatcgagcggttctgggtccagccaaagatccaagagtgcgtgcgcgccgccgtgggggtggggggcgacaagacggcggcgtcggcgtggcgggcgacgctggcgtcggcggggttcgtgccggtgcaagtgagcagcatggcggaggcgcaggcggagtctctcctgaagaagctgccggtgaggggattccgactggagaggcgcgccggctcgctcttcctccattggcaacgcggggagcttgcctccgtctccgcatggcgctgttaa

SEQ ID NO: 12797 - DNA, 1806 bp, Oryza sativa
  Clone ID: TFbOSC401196j.C1.o71.np
atgcaggacgcgctgctggggcggcgctgccagcggcgggcaggagccgggagccagcggcggtgggacagcgggcgggcgaggatcggatcccctttgcgagctcgcgacttcgagacggcggcgggcagcggagacggcggcgagcggcggagacgagggcgtggcgcggcggccctcgagcggtggagatgttgggagtggcagcagcccgattccctagctgctgccgcttccgccctagatgagctcgacgtgtcgagcaagacgttgttgggcttgacgtcgccgtgcacgaccggcggcttgacgacggagtggaggataggagtactctacatgctgcctatgatcaatattgccctcatgtcctcctcctcttgccatccccacaaccccaccaccctgccgctgccggagccggacagcagcaagtcgccggagcccacctccgtgctctacaaccgcagcagcccgagcacctccctcggctcctgctcctccaaaccaccggaggaccctcctccccccatcgccgccgacgacgactgcgactgggacgccgtcgtcgacatgcacatgcacatgctcgcccccgcccccgcccccgactcctccttcctccgctggatcatggataccggctatgccgacgccgacacctttcccgaccacccctccttcgactccgacctgctccaactccccatgcccatgccctctgaccatcctcctcagccgctcgtcgacgacctcctcgacgccgcacgcctcctcgacgccggggactccacttccgctagggagatattggcgcggctcaatcatcgcctcccctctcttccgtcgcctccgggccatgcccaccctccgctcctccgcgccgccgccctcctccgggacgcgctcctcccgcccaccgccctccccgtctcctctactcccctcgacgtcccgctcaagctcgccgcgcacaaggccctggcggacgcctccccgaccgtgcagttcaccaccttcacatccacgcaggccttcctcgacgcgctcggctccgcgcgccgcctccacctcctcgacttcgacgtcggcttcggtgcccattggccgcctctcatgcaggagctcgcgcaccactggcgccgcgctgctgggccgccgccgaacctcaaggtgaccgcattggtgtcgccggggtccagccacccactcgagctccacctcaccaacgagagcctcacgcgcttcgccgccgagctcggcatcccgttcgagttcaccgccctcgtgttcgaccccctcagcagcgcgtccccgcccttgggactctcggccgcgcccgacgaagcggtggccgtccatctcacggccggctccggggccttctcgccggcgcccgcgcacctccgtgtcgtgaaggagctccgccccgccgttgtggtgtgcgtcgaccacgggtgcgagcgcggcgccctcaacctcctgcagtcttgcgcggcgctgctggagtctctggacgcggcgggcgcgtcgccggacgtggtgtccaaggtggagcagttcgtcctgcggccacgggtggagcgcctcgcggtcggcggcggcgacaagctgcctccgccgttgcagtccatgttggcgtccgcggggtttgcggcgctgcaggtgagcaatgcggcggaggcgcaggcggaatgcctgctgaggcgcacggccagccatgggttccatgtggagaagcggcaggcggcgctggcgctgtggtggcagcggtcggagctcgtctcggtgtcagcgtggcgatgc

SEQ ID NO: 12798 - DNA, 1419 bp, Oryza sativa
  Clone ID: TFbOSC400553j.C1.o7.fg
atgcagttcacgcacaccgcgccacctccaccgcctctgcaccctaatgggcatggactagggttagggttgtaccttgacgtcggcgcgacgaggggaggaggaggagcgcggccgtggtcgtcgtcgtcgtcgacgacgacgttgggtgggagcggctacttcccgtcgtcggcggcggcgtcgaagatctcgttggggaacctcaacagcacgggctgcatggagcagctgctggtgcactgcgccaacgccatcgaggccaacgacgccacgctgacgcagcagatcctgtgggtgctcaacaacatcgcgccggcggacggggactccaaccagcggctcacagcggcgttcctgtgcgcgctcgtgtcgcgggcgtccaggaccggggcgtgcaaggcggtgaccgcggcggtagcggacgccgtcgagtcggcggcgctccacgtgcaccggttcacggccgtcgagctcgccagcttcatcgacctcacgccgtggcaccggttcgggtacacggcggccaacgccgccatcgtcgaggccgtcgaggggttccccgtcgtgcacatcgtcgacctcagcacgacgcactgcatgcagatcccgacgctcatcgacatgctcgccggccgcgccgaggggcccccgatcctccgcctcaccgtcgccgacgtcgcgcccagcgcgccgccgccggcgctcgacatgccctacgaggagctgggcgcgaagctggtcaacttcgcgcggtcccgcaacatgtccatggacttccgggtggtgcccacctcgccggccgacgcgctcacgtccctcgtcgaccagctccgggtgcagcagctcgtctccgacggcggcgaggcgctggtcgtgaactgccacatgctcctccacaccgtcccggacgagacggccggctcggtcagcctgacgacggcgcagccgccggtgtccctccgtaccatgctcctcaaatctctccgggcgctcgacccgacgctggtggtggtggtggacgaggacgccgacttcaccgcgggcgacgtggtggggcggctgcgtgcggcgttcaacttcctgtggatcccgtacgacgccgtggacacgttcctccccaaggggagcgagcagcggcggtggtatgaggcggaggtggggtggaaggtggagaacgtgctggcgcaggaaggggtggagagggtggagcggcaggaggacaggacgaggtggggccagcggatgcgcgccgccgggttccgcgcggcggcgttcggcgaggaggccgccggcgaggtgaaggcgatgctgaacgaccacgcggccgggtgggggatgaagcgggaggacgacgacctcgtgctcacgtggaaggggcacaacgtcgtgttcgcctcggcatgggcgccgtcctga

SEQ ID NO: 12799 - DNA, 2260 bp, Oryza sativa
  Clone ID: TFbOSC402781j.C1.o4.gm
cccggggcgcctctcttcgaggacttgcaaacgcttgctgcaaggattggatcctctggcttctgttgatttggggagcttttcatcgtctcgaccgaacggccagccgccgagatcgaggaaggaggagatcgaagggcagagtgatttggcagcggtggacatggatgtgaggtttgggcccgaggagcagatcgtgtggccggcttctgttcttgctgggatcctcatgtgcgcagcggtatatgatataactcgtgaagttagctcccggtgctacaagggttataatggactgaatgaattgcacaaacttgagtggaacaacaggggattctctaccttccacgcattagttgctgctgtagtctctttttatctgctggtgatatctgacctcttcagtaaggacgtccatggtgccatcataattgatcgaaaatcatggatgtctgatgccatgtttggtgtatccctgggctacttcttgacagatttgttgatgatcctctggcatttcccttctctaggaggaaaggaatatctcttgcatcatggattgtccatgtatgcaatctctcttgctctgttgagtggcaaaggacacgtgtacatcctcatggtcctcatcactgaagcaaccacacccttcgtgaacctcagatggtaccttgatcttgcaggccggaaggactccaagctttacctgtacaacggggtggcactgtttgctggatggctggttgctcgcgtcatactgttcgtatacttcttcgctcatgtgtaccttcacttcgaccaggtgaggacggtgttcccgctagggttctacagtatgatggcggtgccgccggcgatgtcggcgatgaacctcctctggttccggaagatctgcaaggggatggtcaaggccatgtccagcgccaaccgaaccaatgagggttgcgccggcgaggacgactcgccggagttcgtcgagccgccggcggcggcggcggcggccgggacgttcgagcaacggccggagttaggagcgtgcaaggaggtgtactccgaggaaggcggcgcggcggaggagaggacgggcgtggcgatggcgggggccgacgtcgaacaggtggcggtggaggatgaggaggaggctcacggcgtgcggatgatcgcgctgctgatggagtgcgcggcggcgatgtcggtgggcaacctcgcgggcgccaacggggcgctgctcgagctgtcgcagatggcctcgccgtacgcggcgtcgtgcggcgagcggctcgtggcctacttcgccagggccatggcggcgcggctggtggggtcgtgggtcggcgtcgtggcgcccatggcgccgccgccgtcgtgcggggccatcaacgccgcgttccgggcgctgtacaacgtcgcgccgttcgcgcggctcgcctacctggcgtgcaaccaggccatcctcgaggcgttccacggcaagcgcctcgtccacattgtcgacctcgacgtcgtccccggcggcgcgctgcagtggctctcgctcctcccggcactggcggcgcggccgggaggcccgccggtgatccgcgtcaccggcttcggcatgtcggcgtcggtgctgcacgacaccggcaaccagctcgccgggctggcgaggaagctgtgcatgtttttcgagttctacgccgtcgcgaagcgaccgggagacgccgacgcggtcgccgacatgcccggaaggaggccgggggaggcggtggccgtgcactggctgcgccacgccatgtacgacgcggccggcgacgacggcgcctccatgcggctggtgcggtggctggagccggcgcggttcgtctccgcgctgcaccactactcggcggtgttcgacgccatgggcgcgtcgcggccggacggcgaggacgcgagcaggcatctggcggagcacggcgtgctcggcagggagatcgcgaacgtgctcgccgtcggcgggccggcgcggagcagcggccgggaggggcccgggagctggcgggaggtgctcgcccggcacgggttcgcgcacgccggcggcggcggcggcgggcgcgcgcagctggtggccgcggcgtgtccgggcgggctgggctacacggtggcgggagaccacgacggcacggtgcggctggggtggaagggcacgccgctctacgcgccccaagaaatgaagaacggcctgagttggatagttgcatcaaagacttcaggaaataagatgagctatggatcttga

SEQ ID NO: 12800 - DNA, 1782 bp, Oryza sativa
  Clone ID: TFbOSC20530j.C1.o3.fg
atggccaacccagaggatttcttttgggaggccctcctcaaggagaacgaagcaccatccccaccacctgtcttctttgacctccccgcaacacccctctccaacagtgatggcacagatccctcatcattggacaaccaacttctctcctacgtctctcgtatgctcatggaggatgagatgggttcttctgctgctatcaccaacttgcagtgtgtcaacaggggcagcacagaggaggccaacaatatgttgccgggcagtgaagtggttagggtgttctcgaagggcatgggagaggccagcaagttgttgcccagaaacaacagcttcagaacgctggagacggtggatcaagtatcaagtgatggtcattgtaggggacgaaagaagaaaaaccatgacagggacgagcagcagctggaggaggaactggggaggaccagtaaattagctgccttgacgattgcagggacacaggaggctggtgctcgcgagttgctggacgaactgatgctgcacgcacacgagacatgcatcaaagacatggagaagctgcgtatcgacatggacaatgaggcagagaagaagatcaacaagaaggacaagaaaggcagtagtagcaaggtggtggacttacggttgctgctgatccagtgtgcacaggccatggcgacagacaaccagcaatctgcaggcgagctgctgaagaagatcaagcagcacgctttggcaacaggcgacgccatgcagcgagtggctcactacttcgccaaggggcttgaggcacggctagctggcagcgggaagcatctgtatcagaatcatgtgcgcatgtcgttggtggagtacctcaaggtgtacaagctctacatggcagcctgctgcttcaagaaggtggcgctcatgtttgctgccatgacaatcatgcaagctgtgcaagggaagaagaggctgcacatagttgattatggcatacgctgtgggctgcactggccagacctgttccgccggctggggagcagggaagacgggccgccagaggtgaggatcaccatcgttgacatcccccagcctgggtttcgtccatttcagcgtattgaggcggcagggcattgcctgagcagctgtgccaatgagttccgcgtgccattcagattccaagctgttgtagcagcaaagtgggagacggttggtgccgaggacctgcacatcgagcctgatgaggtgcttgtggtgaatgacctctggagtttcagtgctctgatggacgagagtatcttctgcgatgggccaaaccccagggatgttgccctccgtaacatcagcaagatgcagccagacgtgttcatccaaggcatcatcaatggtggctatggtgcctccttcctgtcacgctttcgtggagcgctcttgtattactcggctctgtttgacatgctggacgcgaccaccccaagggatagtgggctgcggctggcgctggagcagaacgttctggggccttacgccctcaacgccatcgcctgtgagggtgcagacctggtggagcgccctgagaagtacaaacagtggcaggccaggaaccaccgtgcaggcatgcagcagctgaaactgagaccagatatcgttgatacaatcagggacgaggtgaacaagtaccatcacaaggactttctgctgggagaggacgggcagtggctgctgcagggatggatgggacgaatcctctttgctcactccgcatgggtgcgccaatcacaagacacttcctccggatga

SEQ ID NO: 12801 - DNA, 650 bp, Oryza sativa
  Clone ID: TFbOSC20530j.C1.o3.gp
agagcactgaaactccagaggtcattcaccacaagcacctcatcaggctcgatgtgcaggtcctcggcaccaaccgtctcccactttgctgctacaacagcttggaatctgaatggcacgcggaactcattggcacagctgctcaggcaatgccctgcctcctcaatacgctgaaatggacgaaacgccggctgggggatgtcaacgatggtgatcctcacctccggcggcccgtcttccctgcttcccagccggcggagcaggtctggccagtgcagcccacagcgcgggccgtaatcaactatgtgcagcctcttcttcccttgcacagcttgcatgattgtcatggcggcaaacatgagtgccaccttcgtgaagcagcaggctgccatgtagagcttgtacaccttgaggtactccaccaacgacatgcgcatctgattctgatacagatgcttccctctgccagctagccgtgcctcaagccccttggcgaagtagtgagccactcgctgcatggcgtcgcctgttgccaaagcgtgctgcttgatcttcttcagcagctcgcctgcagattgctggttgtctgtcgccatggcctgtgcacactggatcagcagcatcccatcagttcgtccagcaactcgcga

SEQ ID NO: 12802 - DNA, 1860 bp, Oryza sativa
  Clone ID: TFbOSC416737j.C1.o10.fg
atggagccaggcgcgccgtggcgcgatccgcgccaggggtacctgtatggcgtcggatcggcggtgcagatgccgatgcagcagcgctccgacgcggccgcggccggcggggtgctcaagaggagcctcggcgacatggagaggtggcagcagcaccagcatcagcagcgacagattgcgatgcagcagcagctgtacctgcgaaccgtgaggcagcgcacggccgcggcgtcggcggccgtctcgccgctcacctcggcggatatcgcggctgttctaggcgggccaccgtcccagcctctggttctatccgggtccagcatgggaggggccttcggatcgccgtcgtcgacgctgtcgtccatcaccaccgcgtccagggcggtggcgatgccgctcatgcagccacagctgcagcggcagcagcaggtgacatacatggcgtcctcgccacaggttcaggcctttggaacggcgagggcgctgcctccagcgccggcgacgagcgacctgtccatcctgcaggagctcgagaagcagcttctcggagacgacgatgaggtggaggccgcgatgagcgggaccggctccgcggtcaccgggtccgagtgggaggagcaactcaactccatcaccgcggcgccgtcgcccccacttactgcggcgacgaccccgaacaacaacaataacgccgtgggtatgacgcggtcgccctcgaactcgtccacctccacggcgtcttcctcggcttcctgttcgccgccgacctcggccaccacgtcgcggcaactactctccgaggcggcggctgccatcgccgacggacacaatgaaacggcggccactcatctgaccgccctcaagcgcgcggcgaactcacgcggcgacgtggagcagcggctggttgctatgatggtggcggcgttgtcctcccgcattggtcagaccgcctcagtcccggacatctgcggcggcgagacgcgcgccgggtcccaactcctccacgacatatccccgtgcttccgcctcgccctccacgctgcaaacgtggccatcgtcgacgccgtcggcgaccaccgcgccatacacctggtggacttcgacgtcagtgccccgcagcacgccgacctcatcaggtgcctcgctgctcgccggttgcccggaacctccctgaaggtcaccgccgtcaccgatcccgcctcaccattcacgcagtctgtaacagcaacactccacctccagaagctcgccgagcgagcgggcatagattaccggttcaaaatggtgagctgcagagcaggggagatagaagcatccaagctggggtgcgaggccggggaggcgctggctgtcaacctggcgttcgcgctctcccacgtccccgacgagagcgtctcgccggcgaacccgcgcgacgagatcctccggcgggtgcgcgccctcggcccgcaggtggtggccctcgtggagcaggagctgaactccaacacggccccgctgaccacgcgcttcaccgacgcgtgcgcgcactacggggccatcctggagtcgctggacgccacgatcccccgggagagcgcggagagggcgcgtgctgaggcggcgctgggcgggagggcggcgaacgcggtggccagggaaggcgccgaccggctggagcggtgcgaggtgttcggcaagtggcgctcccggttcggcatggcgggattccggccggtggcgctcggaccgggcattgctgaccaggtgttggcccggcagggccccgtcgcggcagggttcgccgtcaaggcggagaacggcgtgctccggctcggatggatggggcgcgtggtcaccgtcgcctccgcctggcgttag

SEQ ID NO: 12803 - DNA, 1236 bp, Oryza sativa
  Clone ID: TFbOSC405105j.C1.o1.fg
atgctccggtcactccactcctcgtcgtcttctgacacggataacaacagcggtggctgcaagaacaatggcggcggcggtggcgaggccgccgccgccgttgagggtggcggtgatcagcgtgccgttgcggcggcggcgccgtcgacgcgggacttgctgctggcgtgcgcggacctgctgcagaggggggacctgccggcggcgaggcgagcggcggagatcgtcttggcggcggcggcgtcgccgcggggcgacgcggcggaccgcctggcgtaccacttcgcccgcgcgctggcgctccggatcgcgccgttcctgcgtttcgcgcacctcacggcgaaccaggccatcctcgaggccgtcgacggcgcgcgccgcgtccacatcctcgacctcgacgccgtccacggcgtgcagtggccgccgctgctgcaggccatcgccgagcgcgcggacccggcgctcggcccgcccgaggtccgcgtcaccggcgccggcgccgaccgtgacaccctcctccgcaccggcaaccgcctccgcgccttcgcccgctccatccacctccccttccacttcaccccgctcctcctctcctgcgccaccacggcgccccaccacgtcgccggcacgagcaccggcgccgccgccgccgcctcgaccgccgccgccgccactggcctcgagtttcacccggacgagacgctcgccgtgaactgcgtcatgttcttgcacaacctggccggccacgacgagctcgccgcgttcttgaagtgggtgaaggccatgtcgcccgccgtggtgaccatcgccgagagggaagcaggcggcggcggcggcggcggcgaccacatcgacgacctgccgcggcgggtcggggtggccatggatcactactcggcggtgttcgaggcgctggaggcgacggtgccgccggggagccgggagcgcctcgccgtggagcaggaggtgctgggccgggagatcgaggccgcggtggggccctccggcggccggtggtggcgcggcatcgagcggtggggcggcgccgcccgcgccgcggggttcgcggcgcggccgctcagcgcgttcgccgtgtcgcaggcgcggctgctgctccggctgcactacccgtcggagggctacctcgtgcaggaggcgcgcggcgcctgcttcctcgggtggcagacgcgcccgctgctctccgtctcagcgtggcagccgtcgtcgtcgtag

SEQ ID NO: 12804 - DNA, 1599 bp, Oryza sativa
  Clone ID: TFbOSC400032j.C1.o10.fg
atgggcatgtcccctgagccatgcaactccatctcagactgttcccagcagcagagccatcatctgactctgacacagcaacaagattcaacgattatttgtactaatcaagaacttgattattactaccgattctacgacgtggacgaagcggcgtttgatggcaacgaggtagagctcgtctccaggttctccaaggtcaccaggatggaccacatgatcagctcgccgtatcagccgacgtggtcgccggcacaggccgccgtcgacgtcgtcgggtcgtcggagacgtcgcgcgtcaggaagaagaggttctgggacgttcttgagagttgcaagcagaaggtcgaggccatggaggctatggacacaccggcgacggcgacgttccgggtcggtgccggtgatggcggcggcggcggcgggggtggcgcaggaggaggaggaggaggagctgacgggatgcgtctcgtgcagctgctggtcgcctgcgccgaggcggtggcgtgccgcgaccgcgcgcaggcggcggcgctgctgcgcgagctgcaggccggcgcgcccgtgcacggcacggcgttccagcgcgtcgcgtcgtgcttcgtgcaggggctcgcggaccggctgccgctggcgcacccgccggcgctggggccagcgagcatggcgttctgcatcccgccgtcgtcgtgcgcggggcgcgacggcgcgcgcggcgaggcgctcgcgctggcctacgagctgtgcccgtacctgcggttcgcgcacttcgtggcgaacgcgtgcatgctggaagccttcgagggagagagcaacgtccacgtggtcgatctcggcatgacgctgggcctcgaccgtggccaccagtggcgcggcctcctcgacggcctcgccgcccgcgccagcggcaagccggcgcgcgtgcgggtcaccggcgtcggcgcgcgcatggacaccatgagagcgatcgggcgggagctcgaggcgtacgcggaggggttagggatgtacctcgagttcagaggcatcaaccgtggcctcgagagcctccacatcgacgacctcggcgtcgacgccgacgaggccgtcgccatcaacagtgtcctggagctccactccgtggtgaaggagagccgcggggcgctcaactcggtgctccagaccatccgcaagctgtcgcccagggcgttcgtgctcgtcgagcaggacgccggccacaacgggccattcttcctcggccggttcatggaggcgctgcactactacgccgcgctgttcgacgcgctcgacgcggcgctcccgcgctacgacgcgcggcgggcgcgcgtcgagcagttccacttcggcgcggagatccgcaacgtggtcgggtgcgagggcgcggcgcgcgtggagcggcacgagcgcgccgaccagtggcgccgccgcatgagccgcgcggggttccagtcggtgccgatcaagatggcggccaaggcgcgggagtggctggacgagaacgccggcggcggcgggtacacggtggcggaggagaaaggctgcctcgtgctcggctggaaggggaagccggtcatcgccgcctcgtgctggaaatgctag

SEQ ID NO: 12805 - DNA, 1483 bp, Oryza sativa
  Clone ID: TFbOSC29408j.C1.o10.gm
atatgcgtccgacacacagctgttccgttatgggcctgaaccatacaatcctgagaactccttttacaatcaacaggcctcaccaatgccgtacatggtaacagctgatggccattctccatcttctgcagacaattcctgctcagatgtggcaaaagactcaccattggtgtccaatgtatctcagcagaattctcagtctatatcagacaatcagagttctgaacttgaagtagagtttgatgaagatgatatcaggatgaagcttcaggagctggagcatgctttacttgatgatagtgatgacatcttgtatgagatttcccaggcaggtagcattaacgatgaatgggctgatccaatgaagaatgtcatactccctaactcaccaaaagaatcggaatcaagcatcagttgtgctggtagcaacaatggagaaccacggaccccaaagcagttgctctttgactgtgcaatggcattatctgattataatgtagatgaagcacaggcaatcataacggacctccggcagatggtctcaatccaaggggacccttctcagaggattgcagcctatctagtggaaggtcttgcagcaagaatagtagcttcagggaaaggcatatacaaggccttgtcgtgcaaagagcccccgactctttatcagctttcggcaatgcaaatcctctttgaaatctgcccgtgcttccgatttggtttcatggctgctaattatgctatacttgaagcctgcaaaggtgaagatagagtgcacattatagactttgacattaatcagggcagccagtacattacactgatacagtttctgaaaaataatgcaaataagccacgtcatttgagaataactggtgtggatgatcctgaaacggtacagaggaccgttggcggtttgaaggtcattggtcaacgtctagagaaacttgcagaggactgtgggatatcttttgagttcagggcagttggtgctaacattggggatgttacacctgcaatgctagattgttgtcctggggaagcactagttgtcaattttgcattccagctgcaccaccttcctgacgagagcgtttcaattatgaatgaaagggaccaactccttcgaatggtgaagggtctgcaaccaaagctcgtcacactggttgagcaggatgccaataccaatactgctccatttcagacaaggttccgtgaggtttatgattattatgctgcactttttgattcactggacgcgacacttccaagggaaagtccggatagaatgaatgtggagcggcaatgtcttgctcgtgaaattgtcaacatcttggcttgcgaaggtcctgatcgtgtgaaaagcgggataagatcgttactgaagtcgtactgtgacagatacaagttcgaggaggaccatgggggacttcacttcggctggggagagaaaactctaatcgtctcctccgcatggcaatag

SEQ ID NO: 12806 - DNA, 1419 bp, Oryza sativa
  Clone ID: TFbOSC10722j.C1.o5.fg
atggtgctagattctaatgagttgcatcaacatgatgctcctgatgttgatgtgtctattaattgtgatgatagaatttttggccaagagagtgtcaacttggcagcaatccaagaggagctcttggaggaggacagtttaagcgacctcctccttgctggtgcagaggcggtcgaggcaggagattcaatccttgcatcagtagcattctcgaggcttgatgacttcctgtctgggatacctgaaaatggagcagccagttctttcgatcgattggcataccactttgaccaaggtctgcgttcccggatgtccagtgcatccactgggtgttatcagccagagccacttccatctggtaacatgttggtgcaccagatcatacaagagctatcaccatttgttaagtttgcacacttcactaccaatcaggccatcctagatgccatcattggtgacatggatgtccatgtcgtcgacttgaacatcggcgagggcatccagtggtcatcactcatgtcggaccttgctcgctgtggcggtaagtccttcagactaacagctatcacaacatatgctgactgtcacgctagcactcatgacacagttgtacggctgttatcggagtttgccgactctttggaacttccatttcaatacaattccatctgtgttcacaatgaggatgaactgcatgccttcttcgaggactgtaaaggctcagtgattgtctcatgtgatacaacaagtatgtattacaagtcactaagcacattgcagagtttactgcttgtctgtgtcaagaagctacagcctaagctagtggtcaccatagaagaggacctagttagaattggaagaggggtatctccatctagtgcctcctttgtcgagttcttcttcgaggcattgcatcacttcaccacggtgttcgagtcaatggcgagttgcttcattggtagtagttatgaaccatgcctgagacttgtggagatggagttgctggggccaaggatacaggattttgtggtgaagtatgggtcagtgagagttgaggccaatgcttctgaggttttggaagggtttatggcttgtgagttgagtgcttgcaacatagctcaggccaggatgctagttgggctgttcaacagggtgtttggggttgtgttcaagaagataagtttgttaatggtctactatatctccttagggaaaaatgatttgagagagccaaataaggtcatctggtcaagtttggctgctggatgcgggagtcatggaattgttgtacttgccttctatgctgctgacaagctgcttgagttcaagccaaaagggattgaaacttatatccatcctgctgttgaacgtgcacatttccacaaagaagacagaatgtggcaagagtacgaaaactga

SEQ ID NO: 12807 - DNA, 2433 bp, Oryza sativa
  Clone ID: TFbOSC1192j.C1.o3.fg
atgatgcatgggctatgggtgcaagatcagggtgtggtggatcacttagcgcagctcgtccctctcttgcatgagtgtgcttcccatgtaactgagggatcttttgagaaggctgacttcagctttaagaagatcagaatgctcaccatagctgacgggccattgcagcgcctatccacgatcattgttgacagcctagctcaccgccttctctcctccatccagggccttcctggtgcccttatcgatccatctgattactttgagaagtcaaccctccgggctgcacgccacaacttcttcaagctgaacccctacctaagcaccggttttgtcactattaactgggccattatggaggcaatggaggatgaaaagtcattgctatctaagaaagctgaatctcttggggtgtccttccattttatttctgtgataggcagacttgagaccttggatttcagcaatctccgtagcacctttcagataaaatttggtgtggcagttgcaatcagctgcgctctacaaatgcatcgcctcctcttggttgatgacaatttgagctccaccagcattgctcagctccagaaaatggccaacttcactcagcctaagcaaatggccagctctgtgtgcagcccagcctccacactgaactatctgcagacaccatcccctcgtacaccaaaattgctggcaagattactgtctgccatccgagcgctcaagccaaacatcatgttgattatggagcaagatgcagaccataacaccctgctgttccgtgatcggttcaatgaggtactcaactactatgctgccctctttgactgcttccatgcagtggctgcagctaacccagggaggactgatgaacgcttacgtgtggataggatgatcctgagggaagagattaaaaacatactgttgaggctgtgctgcacggacaggggcatgttccaggacgacatgctgtcgtcggcgacgtcatcgccggcgtcgtcggtgtactcgccgtcgccgtcgccgtcgaacgggtcgtgggtgcaggagctgagccatgaccagcagagcgttcggctgatcggcctgctttaccagtgcgccgccgaggtgtccgccggctccttcgaccgcgccaacctctgcctcgagcacatcacgcagctcgcgtccctggacgcgccgcacgcgctccagcgcctcgccgccgtcttcgccgacgcgctcgcgcgcaagctgctcaacctcatcctgggcctctcgcgcgcgctgctgtcgtcggccaactccgccgacgcccacctcgtccccgtcgcgcgccgccacatgttcgacgtgctcccgttcctgaagctcgcgtacctgaccaccaaccatgccatccttgaggcaatggagggggagaggttcgtccacgtcgtcgacttctccggcccggcggcgaacccggtgcagtggatcgcgctgttccacgcgttccgaggccgccgggaaggcccgccgcacctccgcatcaccgccgtccacgacagcaaggagttcctcgcgaacatggccgcggtgctgtccaaggaggcggaggcgttcgacatcgccttccagttcaacgccgtggaggcgaagctcgacgagatggacttcgacgcgctccgccacgacctcggcgtcaggtccggcgaggcgctcgccgtcagcgtcgtgctgcagcttcaccgcctcctcgccgtcgacgacgggaggaggcacgccgccgccggctgcctcaccccggtccagatcatcgcgcgctccagcccgagaagcttcggcgagctgctggagcgggagctgaacacgcggctgcagctgagccccgacgcgtccgtggtgtcgtcgctgtcaccccactcccccgcagcagcaacggcggcgcacccgacgacgtcgacgccaaagctggggagcttcctgtcggcggtgaggtcgctgtccccgaagatcatggtgatgacggagcaggaggcgaaccacaacggcggcgcgttccaggagcggttcgacgaggcgctcaactactacgcgtcgctgttcgactgcctgcagcggagcgcggcggcggcggcggagcgcgcgcgcgtggagcgggtgctgctcggggaggagatccgcggcgtggtggcgtgcgagggggcggagcgggtggagcggcacgagcgggcgcggcagtgggcggcgcggatggaggcggccggcatggagcgggtggggctgagctacagcggcgccatggaggcgaggaagctgctgcagagctgcgggtgggcggggccgtacgaggtgaggcacgacgccggcggccatggcttcttcttctgctggcacaagaggccgctctacgccgtcacggcgtggcgcccggcggcgtcgcgacgcggccacactcggtcgtag

SEQ ID NO: 12808 - DNA, 1479 bp, Oryza sativa
  Clone ID: TFbOSC403597j.C1.o9.gm
atgttccaggacgacatgctgtcgtcggcgacgtcatcgccggcgtcgtcggtgtactcgccgtcgccgtcgccgtcgaacgggtcgtgggtgcaggagctgagccatgaccagcagagcgttcggctgatcggcctgctttaccagtgcgccgccgaggtgtccgccggctccttcgaccgcgccaacctctgcctcgagcacatcacgcagctcgcgtccctggacgcgccgcacgcgctccagcgcctcgccgccgtcttcgccgacgcgctcgcgcgcaagctgctcaacctcatcctgggcctctcgcgcgcgctgctgtcgtcggccaactccgccgacgcccacctcgtccccgtcgcgcgccgccacatgttcgacgtgctcccgttcctgaagctcgcgtacctgaccaccaaccatgccatccttgaggcaatggagggggagaggttcgtccacgtcgtcgacttctccggcccggcggcgaacccggtgcagtggatcgcgctgttccacgcgttccgaggccgccgggaaggcccgccgcacctccgcatcaccgccgtccacgacagcaaggagttcctcgcgaacatggccgcggtgctgtccaaggaggcggaggcgttcgacatcgcgttccagttcaacgccgtggaggcgaagctcgacgagatggacttcgacgcgctccgccacgacctcggcgtcaggtccggcgaggcgctcgccgtcagcgtcgtgctgcagcttcaccgcctcctcgccgtcgacgacgggaggaggcacgccgccgccggctgcctcaccccggtccagatcatcgcgcgctccagcccgagaagcttcggcgagctgctggagcgggagctgaacacgcggctgcagctgagccccgacgcgtccgtggtgtcgtcgctgtcaccccactcccccgcagcagcaacggcggcgcacccgacgacgtcgacgccaaagctggggagcttcctgtcggcggtgaggtcgctgtccccgaagatcatggtgatgacggagcaggaggcgaaccacaacggcggcgcgttccaggagcggttcgacgaggcgctcaactactacgcgtcgctgttcgactgcctgcagcggagcgcggcggcggcggcggagcgcgcgcgcgtggagcgggtgctgctcggggaggagatccgcggcgtggtggcgtgcgagggggcggagcgggtggagcggcacgagcgggcgcggcagtgggcggcgcggatggaggcggccggcatggagcgggtggggctgagctacagcggcgccatggaggcgaggaagctgctgcagagctgcgggtgggcggggccgtacgaggtgaggcacgacgccggcggccatggcttcttcttctgctggcacaagaggccgctctacgccgtcacggcgtggcgcccggcggcgtcgcgacgcggccacactcggtcgtag

SEQ ID NO: 12809 - DNA, 1010 bp, Oryza sativa
  Clone ID: TFbOSC410945j.C1.o12.gp
ttacagagcaacagcagtataatattaattctgtaccacacaaccatttgataggttaaattaccctctagtctctactcataagcagtgtttccaatgagatgatcatggctaattgagcagagcatggcaacaacctaaagcaacatcattagctatagagactgacaccaatattcctaaatccactaggctagctaataagctgcaacgaaaagcaatatgaagagttcaacagctcaagacaacaatttcatttgcaacatttaattgcaagaataaatggacattactggagtggtcgatgcttgcaaacggtggtggaaccttggtggagtgaagcttatggctgatcagcaccgccaagatgatatggatacaagctccccacgctgccagtagagcgtaagagcagctccgcgtttctccacatggaatcctcggacctgcacccgcttcaggaggcagtctgcctgtgcctcggcgaggttgctgagctgaacgggcttaaacccagttgctgcaaaaacgctcctccatgctatagctttctgcgccttgtgccgcccaatcactgcatcctcaactcttggttgaattaggaacctctcgatcttgcaggcagaatcagcatcaataccagcagcatcaagcgagtcaaggaggaacacacaggactggaaacaattcaggaaatgctgcgagaatggaaggtctgcacgatcacctccatgatcaatagccacgacaaccttaggacaaagctgtttcaccaaccgaagaatcgctggcagcggtggtgcacgagcagagcagccaacagggaggctaacagcaacaacttcatcaccagaggaagaaatgagttccgcaggattgaatgcatcaagactgacggcattgaattcgaaaggaattctgagctctgcggcaaactgagagaggttatcctgggtaaggtgcagctccagtggatggtgagaagcagtcgacatgaaagccgtgagctt

SEQ ID NO: 12810 - DNA, 375 bp, Oryza sativa
  Clone ID: TFbOSC16170j.C1.o1.gm
atggcggcgcacccggcatcgacgtcgacgctcaactactatgcgacgttgttcgacggcctgcagcagagcacgacggcgccggcggagcgcgtgctgctcgggatggagatccgcagcgtggtggcatgcgagggggcggagcgggtggagcggcacgaaggcatgatgagcctccggaggacagccagccgccgtagggtcacggagcccctccggaggccacatggtctccagggccccacggagtctctggaggccatcgatccgctggaggccaacaaggactccgaggatatcaagccattaagggccaatcgactttcggcaaacaacggaactccggaggccatcccggactccggagttggttag

SEQ ID NO: 12811 - DNA, 1656 bp, Oryza sativa
  Clone ID: TFbOSC413654j.C1.o5.fg
atggcggtggagatcccgaggctagccctgggtggaggaggagggggagcgggaggagagcggctaccggcggccggggaggattcggcgccggcggccaccaacgcggggaagcgcccggtggtcgggctcgggttcgggtcctccttggcggccatggcggcggcggcggcggcggggatccagcccgacgcgttcgccctaggtggcccggcggagtaccccgccggcgacggggagcgggacgttctgatggtgagcttcctgcgttccatcgcggcgttcctggccgacgggacgtgccagatgcaggtcaacgacgggctgagctgcgtcgtcgacctcgccggcggggacgccgacggcggcggcgtcggcgaggggaggtcggcgcagcggctggcgtccgcgttcgccgaggcgctcgcgctgcgcttcatcctgccgtgcgacggggtgtgccgctcgctccacctcacgcgggccccgccgccgccggccgtctccgccgcgcgccaggggttccgcgcgatgtgcccgttcgtccgcctcgccgccgccgcggccaacctgtccatcgccgaggtgatggaggccgagcgggcggtcgtccacgtcgtcgacctcggcggcggcgtcgacgccaaccagtgggtggagctcgtccgcctcgtcgccgcgcgccccggcggcccgccgggcctgctccgcctgaccgtcgtcaacgagtcggaggacttcctctccgccgtcgccgcgtacgtcgccgcggaggcccagcgcctcgacctcagcctccagttccatccggtgctatccagcatcgaggagctctccgccaccgccaccggatcaatcggatcccgcctcgtcgtcatccccggccagcccctcgccgtcgtcgccaacctccagatccaccgcctcctcgccttccccgactacgtggacggcgtcgcgagcaggaggccggcggcggagcaatccggatccagccagcatacgatgacgacggcgacgaagacgaaggcggacgcgctcctccgcgccatccgcgacctgaacccgaagctggtggtcctgacggagaacgaggccgaccacaacgtcgcggagctcggggcgcgcgtctggaacgcgctcaactactacgcggcgctgttcgacgccctggaggcgagctccaccccgccggcggccgtgccgccgcacgaacgcgcgtgcgtcgagcggtgggtgctcggcgaggagatcaaggacatcgtcgtccgtgagggcacggggcggcgggagaggcacgagacgctggggcgctgggcggagcggatggtcgccgccggcttctcccccgtgacggcggccagggcgctggcgagcacggagacgctcgcgcagcagatggtggcggcgggcgggggcggtgccggcgccggggtgctcagggcggcgcacggcggcgggtgcttccccgtgatctgctggtgcgacgtgcccgtcttctcggtctcgacgtggaccgcgaggagggtccttgtgccggcgccaccgctgtggccaccggcggcggctggtggtgctggtccatcgggctcaggctacggcggcgacggcccatcgacggcgagctcgtcggcggcaatgtggtgggtcggatga

SEQ ID NO: 12812 - DNA, 750 bp, Oryza sativa
  Clone ID: TFbOSC406886j.C1.o1.fg
atgcaggggctccaatggccggggctgttccacatcctggggtcgcggccgggggggccgccgagggtgaggctgaccgggctgggggcgtccatggaggcgctggaggcgacggggaagaggctgtcggacttcgcggacacgctgggattgccgttcgagttctgcccggtggctgacaaggccgggaatctggacccggagaagctgggcgtcacgcgccgcgaggccgtcgccgtccactggctgcgccactccctctacgatgtcaccggctccgactccaacacgctctggctcatccagaggttggcgccaaaggttgtaacaatggtggagcaggatctgagccactcaggctccttcctggcacgttttgtggaggccatccactactattcggcactgttcgactcgcttgatgcgagttacagcgaggatagcccgaatcggcatgtcgtggagcaacaactcttgtcgcgggagatccgcaatgtgctagccgtgggcggtccagcacgcaccggcgatgttaagtttgggagctggcgcgaaaagcttgcgcagtcgggcttccgtgtgtcgtcgcttgctggaagcgctgctgctcaggctgcactgctgcttgggatgttcccttccgatggatacacgcttattgaggagaatggcgctctgaagctcggatggaaggatctgtgccttctcactgcctctgcttggcgcccaattcaggcttcgggacgttag

SEQ ID NO: 12813 - DNA, 1437 bp, Oryza sativa
  Clone ID: TFbOSC401949j.C1.o29.fg
atggagaccatgtcatacccttgctcccttctcattcccttctccacacaatttgaagagatcagtagcagtagcctcctcctatggtctcctcaagcagaagaaaatcctcatgagaatgccaatatgtatgaatttgatgctgatcactctcatgatcagattcatcaagatcatcagttcttggacatgatggtcatccaagaatctgctaatgaatttgatggtaatcactctcatgatcagattcatcaagatcatgagttcttggaaacgatggtgatccaagaatctgctaatgaatttgatggtgatcactctcacgatcagattcatcaagatcatgagttcttggaaatgatggcaatccaagaatctgctaatgatttgctgcaactgcaagatgatttctctgtccccaatgctgatccattagcagctagctttgaatttgatgagagattagcagtggcagggcacgagaacggcaacgtggtggcaacccaggaggagagcgcaggtgaccttctcctcgccggcgccatggccgtggacgccggagacgctgtccacgcctcggcgatcatgtcgaggcttgacgacctcctcgccgacatcgccggcagaagaagctgtgaagcaacaagcccggttgatcacctggcctactacttcgcccgaggcctcaagctccggatctccggtgcggccacgccggcgtcgtcgccgccgccgccggcggccaactggtcgtcgccggcgtaccggatgctgcaagagctgacgcctttcgtcaagttcgcccacttcaccgccaaccaggccatcctcgaagccacggcggatgacctcgacgtccacgtcgtcgacttcaacgtcggcgagggcgtccagtggtcgtcgctcatgtcagacctcgccgccgccggccgccaccgctgttccacctcacggacgctgaagcttctcctcctcggcacgatcacaatccttcaaccaaagctggtgatcctgatcgaggacgagctatcccgaatcagcaagaacccaccatcaccgtccctcgccgcgccgccgccgttcccggagttcttctccgacgcggtggcccacttcacggcggtgatggagtcaacggcgagctgcctcgtgagctacgacgacgaggcgtggctgagcctgaggcgcgtgggggaggaggtggtggggcccagggtggaggacgctgtggggaggtatgggtcactggcaggtggggcccagatgatggaagggctcagggctcgtgaggtgagcggcttcagcgttgctcaggggaagatgttggctgggctcttcggtggagggtttggggttgtgcatcaggagaaagggaggctcgctctctgctggaagtccaggcctttgatctcagtgtctctttggtgtcccaagtag

SEQ ID NO: 12814 - DNA, 1129 bp, Oryza sativa
  Clone ID: TFbOSC9377j.C1.o3.np
aaatggtggagtccacatgggccccacatgtcatcctcacccctcccctcctctccttcctcctctcttccccatatcccctctcttcatcccactctcctctcctctctctccaggtgacggagaggcagcggcacacacggcggctcccggtcgtcgctggccgacttgcgcagcggcgccggaagcaggaggaggtggcggccgcgacgccaactgcgacacgctcgtgccgtccttcgtgcgcactgacggctgcggccgtggcgaccactccccgccggtccacacgttcggcttcggcaaggaccacgacgcggtggcgatgcacaccatcgccgaggtcaccggcgggacgttctccttcattgagaacgaggcggccatccaggacgggttcgcgcagtgcatcggtggcctcctctccgtcgccgtgcaggagctccacttcgacgccgagacatggagaggaccggacagaccacgagcgtggccggcgacgaggaggcggagtccggcgtcgccgagcgctccgtggaggtggaccgggagctggtccgggtggaagccatcgacgacatcgcgctggaactgaaatcgcgtgtgtttgctgatagctccgtcgtggtctccttcatgcagcggccggtgggaagctaccaccatgtcacctgccacgacggcttcaaggagttcgacgatgatctcgggttcacgctgtgcaatgattactactcgccgccgccgaagttggtggacttcgtcgccgaccatccgcgctgctgcgaccggccgcctcgccgcgcgacgccctgcgaagacgatggattgcgacctctcctcgacgatgaagccctgcaagggcgaggagctcgcccgccaccgctcctcctctgctccgccagcccgcttcgcccgctcgtccacgcctcgccgccgaggtgctgtcctgctcgtcggcctccacgcgcgctcgtaggcctccctccgtcgcctgtagagaaaggagaggagagagtgatgaagagaggggagatggggagagatgaggaagaagaggaggggtgaggataaaatgtggggcccacacgccgacatcgccaacacacacgaccaggagaaggttagc

SEQ ID NO: 12815 - DNA, 1383 bp, Oryza sativa
  Clone ID: TFbOSC1192j.C1.o1.fg
atggagaaggccacgcgttgcctcgcgcgcgccacgggcctcgccgccgccgccgccgccggcgacgggccgcggaagcgcctcgccgtggcaatggtggactgcctcgcgcggcgcctcctccgccccgtccaggccatcaccgacgcgctcatcgacccctccgtctacctcgaccggcgttccgtcagggcggcgcgccgcgggttctttgaactcagtcccttccccaaggtggcgttcgtcgtcggcaaccgcgccatcgtcgaggcggtggagaacgagagcttagtccatgtcgtcggcatgtccggtccatttacccagccatgccagtggatccagctcctgcacgagcttcgccgtcgcccggaaggcccgccacgtgtcgttcggctcaccgtcgtccacgacgacggggagttgcttgccaagatggaagagttggtctccgacgaagccgaagagctcggcatggagttccagttccatggcgtcgtcggccagctcgaggatctggacttcagtaaccttcgcaatgtccttgagataaaatccggcgaggcgctcgtcgtcagctgcactctgcaactgcatcgtcttcttgctgctgatgacgatgcgatgtatagctctcgctctgcccatctcaaccaaatggcgagcatcgcgcagctccagcacatggcggtgaattcgtgcccgtcgagtagcggcggcggaagcgtgcagtacaaagacgatgacccttaccgaagcccggccacaccgctgacgttcgtctcgccaccggtgtcaacccctcacttccagacgccggcggcgctggcgagcttcctgtcggcggtgcgcgcgctgtccccgaagatcctggtggtggcggagcaggacgcggaccacaacggcgtctccttccggaagcgcttctgcgaggcgctccaccactacgccgccgtgttcgacagcctcgacgccgcggccgccaccacctcggcggcgtcgcgcctgtggtctcccgacgaacgcgcgcaggtggagcgcgtcgtggtgggcgaggagatcaagggcgtcctactccgggatggcgcgcaccggcgggaatggcacgaccggctgcggcaatgggcggcgcgcatggagatggccgggttcaccggcgtgccgctcagctacgccgccatcaagaaggggaacgacatggtgaggcgatgcggattgagacgctgcgagaacaaggaatgcggcggctgcctcctgctgtgctggagctcgaggcctctctactcgatctcggcatggcggccggcggcgagcagaggatctgggtcaggttcagagagaagcgagtacgtacatgtcggtgccgagccagatgatcgatga

SEQ ID NO: 12816 - DNA, 2217 bp, Oryza sativa
  Clone ID: TFbOSC402543j.C1.o3.fg
atgggctcgtcggcggccgactcgttccccgcttgtggagatgatgcaatccgagacgtgtacggcatcggtggtggtggggaggaggacgatccgtccctcttcctctacctctccgacctcgcccccgtctccccctccgcctacctcgacctccccccctcgccgccgccgccgacgacgacggcgacgacgatggtgaaggagggggaggaggcgccggaggacctggtgctgccgttcatctcgaggatgctgatggaggaggacatcgacgacaagttcttctacgactaccccgacaacccggcgctgctccaggcgcagcagcccttcctcgagatcctctccgatccctcctccaactcccgctcctccaactccgacgacccccgcctctccccgacctcctcctccgacacctccgccgccatcaactcctacgacgccgccgccaccgccaccgccgttgccgccgccgcggtgcccgtgccgcagtacgagagcatcgagctcgatcccgccgcgttcttcgccgcggccaactccgacctcatgagctccgccttcctcaaggggatggaggaggcgaacaagttcctccccaccgagaacaagctcatcatcgacctcgaggcctcgtcggagaataattacctcaggggtctcgaggaggccaagaggttcctgcccagcgacgacaagcttcaggttggattcgctgcggcggcggcgcctgtggtgagcgtgaagaaggaggcggtggatgtggtggtggcaaccgcctcgggcggcggcggacgagggcggaagaacccgtacgacgacgaggagctggagctggagggagggaggagcagcaagcagaccgcggttcagggggacgatgtcgcggcgcgcgccatgttcgacaaggtgatgatgccctcccatgagaattgcaccgagatgatggagaagctgaggattgccatgaaggaggaggcggccaagaacgaggccagcgccggcgggaagggtgggaacgggaaggtgaagggagggcggcggggcgggagggacgtggtggacctgcgcacgctgctcatccactgcgcgcaggccgtggccaccgacgaccgccggagcgccaccgagctgcttaagcagatcaagcagcacgcgaaaccgaccggcgacgcgacgcagcgccttgctcattgctttgctgagggcttgcaggcgcggatcgctggcacgggcagcctggtgcaccagtcgctcgtggctaagcgcacctcagccgtggacatcctccaagcgtaccagctgtacatggctgccatctgcttcaagaaggtgtccttcattttctccaatcaaaccatctacaatgcttccttgggtaagaagaagatacacatcgttgattacggtatacagtatgggttccagtggccgtgcttcctgcggcggatatcacaaagggagggtgggccaccggaggtaaggatgactggcattgacctcccccagcctggtttccggccaactgagcgtattgaggagacagggcaccggctcagtaaatacgcccaggagtttggggtgccattcaagtacaatgccattgcagcggttaagatggagtcagtccgcaaagaggatctgaacattgatcctgatgaggtgctcattgtgaattgccagtatcaatttaagaacttgatggatgagagtgttgtgatcgacagcccaagggatattgtgctcagcaacatccggaagatgcagcctcatgtgttcatccatgcaatagtgaatggctcattcagtgcaccattctttgtgacacggttccgggaggctttgttcttttactcggccttgttcgatgttctggatgcaactaccccaagggaaagcgaacagcggctgctgattgagcaaaacatctttggacgagctgctctgaatgtcattgcgtgtgagggcatagatcgggtggagcgccctgagacatacaagcaatggcaggtgcggaatcaacgggctggcttcaagcaactgccattgaatccagaaattgttcaggtagtgcggaacaaggtcaaggactgctaccacaaggacttcgtgatagatatagatcaccaatggctcttgcaaggatggaagggacgaatactctatgccatctcaacatggacgccaaatgatgctctctcttatttttag

SEQ ID NO: 12817 - DNA, 2482 bp, Oryza sativa
  unsure (1)..(2482): unsure at all n locations
  Clone ID: TFbOSC900311j.C1.o8.np
cgggacgccggcgtgggcggcgcacggcgggcgcgaccacttcctcgtcggcggccgcatcgcccactaaaccccctcctccgcctcgccgccgccatgggctcgtcggcggccgactcgttccccgcttgtggagatgatgcaatccgagacgtgtacggcatcggtggtggtggggaggaggacgatccgtccctcttcctctacctctccgacctcgcccccgtctccccctccgcctacctcgacctccccccctcgccgccgccgccgacgacgacggcgacgacgatggtgaaggagggggaggaggcgccggaggacctggtgctgccgttcatctcgaggatgctgatggaggaggacatcgacgacaagttcttctacgactaccccgacaacccggcgctgctccaggcgcagcagcccttcctcgagatcctctccgatccctcctccaactcccgctcctccaactccgacgacccccgcctctnnnnnnnnnnnnnnnnnnnnnnnnnnnnnnnnnnnnnnnnnnnnnnnnnnnnnnnnnnnnnnnnnnnnnnnnnnnnnnnnnnnnnnnnnnnnnnnnnnnntcgctacaacttcaaaaggccgccacgtatctccaaaactttggtggtgctaggtgagtagcctacctctagagcccgctgacccctttttcaactccgttccgccaatttctatgaccctggcttttccccgacctcttcctcctacacttccgtcgccatcaactcctacgacgccgccgccaccgccaccgccgttgccgccgccgcggtgcccgtgccgcagtacgagagcatcgagctcgatcccgccgcgttcttcgccgcggccaactccgacctcatgactccgccttcctcaaggggatggaggaggcgaacaagttcctccccaccgagaacaagctcatcatcgacctcgaggcctcgtcggagaataattacctcaggggtctcgaggaggccaagaggttcctgcccagcgacgacaagcttcagtggatgtggtggtggcaaccgcctcgggcggcggcggacgagggcggaagaacccgtacgacgacgaggagctggagctggagggagggaggagcagcaagcagaccgcggttcagggggacgatgtcgcggcgcgcgccatgttcgacaaggtgatgatgccctcccatgagaattgcaccgagatgatggagaagctgaggattgccatgaaggaggaggcggccaagaacgaggccagcgccggcgggaagggtgggaacgggaaggtgaagggagggcggcggggcgggagggacgtggtggacctgcgcacgctgctcatccactgcgcgcaggccgtggccaccgacgaccgccggagcgccaccgagctgcttaagcagatcaagcagcacgcgaaaccgaccggcgacgcgacgcagcgccttgctcattgctttgctgagggcttgcaggcgcggatcgctggcacgggcagcctggtgcaccagtcgctcgtggctaagcgcacctcagccgtggacatcctccaagcgtaccagctgtacatggctgccatctgcttcaagaaggtgtccttcattttctccaatcaaaccatctacaatgcttccttgggtaagaagaagatacacatcgttgattacggtatacagtatgggttccagtggccgtgcttcctgcggcggatatcacaaagggagggtgggccaccggaggtaaggatgactggcattgacctcccccagcctggtttccggccaactgagcgtattgaggagacagggcaccggctcagtaaatacgcccaggagtttggggtgccattcaagtacaatgccattgcagcggttaagatggagtcagtccgcaaagaggatctgaacattgatcctgatgaggtgctcattgtgaattgccagtatcaatttaagaacttgatggatgagagtgttgtgatcgacagcccaagggatattgtgctcagcaacatccggaagatgcagcctcatgtgttcatccatgcaatagtgaatggctcattcagtgcaccattctttgtgacacggttccgggaggctttgttcttttactcggccttgttcgatgttctggatgcaactaccccaagggaaagcgaacagcggctgctgattgagcaaaacatctttggacgagctgctctgaatgtcattgcgtgtgagggcatagatcgggtggagcgccctgagacatacaagcaatggcaggtgcggaatcaacgggctggcttcaagcaactgccattgaatccagaaattgttcaggtagtgcggaacaaggtcaaggactgctaccacaaggacttcgtgatagatatagatcaccaatggctcttgcaaggatggaagggacgaatactctatgccatctcaacatggacgccaaatgatgctctctcttat

SEQ ID NO: 12818 - DNA, 2136 bp, Oryza sativa
  Clone ID: TFbOSC400235j.C1.o17.fg
atgagggcggcacccttcagtgccgacgggaacggggcggcggagctcgcggggagcatagcggcgctgctttggccggaggacaagggcggcggcggcgggggcggcggggggtcgttgctggtggagccgaggtcggtgctggactgcagggggagcccgagcccgcccaactccacatcgacgctgtcttcgtcccatggtagcggcgcggcggattctatatctaccggcgtggcggcggtttcggagagcagcgcagccgccgccgaagccaccagatgggcggcccccggcgaacacggcggcggcggtggcggtgagctgccgcccataccgggggccctggatgtgggcttcgtcgcggaggagagctgggacgccatgctcggcgacgccgcggcggcggcaggccaggagcagacatttttgaactggatcatggctgcccccggcgacatggaaccccaggcgccggggctctcgcagcagcagctcctcgccaatgccgccgggttcgggttcccgctgcagcatcaccccggtggcgtctcctcgccagccgccctcgcctccgacctgtcgtcctccggcgggaggtcgctcacaagcagcagcggcagcaatagcaaggccacctccgctttcggcctcctgtcgcccgaagcggcgctccagccgccgccggcgactactgcgcctttccacaacggcgctgacatgaagccccctctccttggcttgccatcacccacactactcctcaaccagcatcagccgacgccggcctccaccttgttcatgccgttcccctccttctccgaccatcaacaacagccactgctccagccaccgccgaagcgccaccactccgtgcccgacaatctcttcctcctccacaaccagccccagccaccgccgccggcgcccgcgcaatgcctcccgtttccaacgctacatagcgcggtacccttccagctccagccttcgatgcagcatccgcgcaacgcgatgaagtcaaccgcggcggcggcggcggcgcagcagcaacacctcctggacgagcttgcagcggcggcgaaggcaaccgaagtcggcaactccataggcgcgcgagagatattggcgcggctcaatcagcagcttcccccaattgggaagcctttcctccgctccgcctcctacctaaaggacgccctcctcctcgcgctcgccgacggccaccacgccgccacccgtctcacgtctccgctcgacgtcgccctgaagctcaccgcttacaaatccttctccgacctctcccccgtgctccagtttgccaacttcacggtaactcaggcgcttctggatgagatcgccagcacaaccgcgtcttgtatccgcgtcattgatttcgacctcggtgtcggcggccagtgggcttcgttcttgcaggagcttgctcaccgctgtggctctggcggtgtgtccttgccgatgttgaagctcacagccttcgtctcagccgcctcccaccacccgcttgagctgcatcttactcaggataacctctcacagtttgctgctgatcttggtattccatttgagttcaatgctattaatctcgacgcatttgatcctatggaactcattgctcctacagctgatgaggttgttgcagtaagcctcccagttggttgctcagcacgcactccactcccagctatgcttcagttggtgaaacagcttgctcctaagattgtggttgctattgactatggcagtgatcggagcgacctcccattttcccaacacttcttgaattgcttacagtcttgtctatgtcttcttgaatcacttgatgctgctggcactgatgcggatgctgtcagtaagatcgagaggtttctgattcagcccagagtggaggatgcagttcttgggcggcgtagagctgacaaagcgatcgcttggcggacagtgctaacatcagcagggtttgcacctcaaccactcagcaaccttgcggaggcacaggctgactgcctcttgaagcgggtgcaggtccgaggcttccatgtggagaagcgtggagcaggccttgcactctattggcagcgtggcgagcttgtatccgtctcagcatggcgatgctga

SEQ ID NO: 12819 - DNA, 4092 bp, Oryza sativa
  Clone ID: TFbOSC101500j.C1.o28.fg
atggtgattgagcttccctttgacaatcaatacaccaccacagaaacagaacagccacatgatgggtcttcctgttcttcccagcagcaactcagcttgtacaactacagccccagcgatccgcagctgttttcccagccaaccacaggatcaagaacgtatttgtcaggtgcagtcaccatccctgggatttgcaatgacaaaagtaatcttggacaacaacaatttcagattgatgcagcgcttagtctagggtaccagaggatcagatcaagcgatgccctttgctacataagtcgggtgctgatggaggacgtcgatgagagggttgacctgcaccaaggggaggctgctcttcaggctgcagagaaacccttctatgatattcttggccaggtatatccaccatcgctaaaccggctagcactccatagcgcaaatgaaccagatacgcctgatgagagcagtagcagaaacaattatcataataggtaccatagtagccattccagtttcaacatgttacagcccttgccaaccccattgagtccatatagctatggcaggagtctttttcttccaaaccaacacttggtaagcactgcctggacttctacctttggcatccctggcttccaaattagaagaggtgccgaggaggcaaagagatttgttccaattattgataagttggtgatcgatttggacactgaccgggggctctccatttcaaaaatgaccacgaaggcaaaagtaggagacaagaaaagatatgcaatctttgagttgacagatcaaaggcacagcccttacaccacagacttggatatcttggaagggaggaacagcaaacgctatgccatcacttactgtgaaataatccggaatgatatgtttgacagggttctgctctgctatggtgtggagaatttcgccgaagcatcaaatcttcgaaaaataatgacgaagcaagcacgcaagaattcactgaatggacaaaccagaggatctgcacaacggaaattacggggtatgaaacaactcaagaaggatgtagttgatctcaggaatctcctcatccactgtgcacaagcagtagcagctgacgaccgcatttcggccagtgaactagtgaagaagataagacagcattcttcaccagatggagatagtaaccagaggttggcattttacttggtggatggtctggaggcgcgcttggctgggatcgggagccaggtgtatcgcaagctcatggcaagccgaaccagtgctgagagtttgttgaaggcttacagcctctacctttcagcttgccctttcgaaagggcgtcattcgcctatgcaaaccaaactattcttgatgcatcaaaggggcagcaaccaagaaaggtgcacattgttcatttcggcatttgcactggctttcagtggccatcattgattcagcggcttgcaaatgaagaagggggtccacccaagcttaggatcacaggtatagatatgccccagccaggtttccacccctgtgaaataattgaggagacagggaagcggttggctgattatgcaaacttgttcaaggtgccttttcaatatcagggcattgcttcacggtgggaaaccgtacaaattgaggacctgaacattgacaaggatgaagtgctcatagtcaactgtatgttcaggatgaagaatcttggtgatgagatggtatctatgaatagcgcaagggatagggtgctgaaaataatgaggatgatgaacccaagggtttttattctcggtattgtcaatggatcatacagctctcccttcttcatcacacgtttcaaagaggttctgttccattactcttcattgtttgacatgattgatgcaaatgttccacgggataacgaggcgaggaagatgatagaggggggactctttgggcaggaagcacttaacatcatagcatgcgagggtgcagaaaggactgagaggccagaaagttacaagcagtggcaagcacggtgcctcaaggctgggttcaagcagctccctgtcgatccagccaccttgaaagagataataaatatgaagaaagggatttaccatgaggactttgtagctgatgaagatggtgcctggctactacaaggatggaaagggagagtaatttatgccatatccacatggaagccaaatgaatcatatttggatcagtgtcttccagagtttggaggttatccatgtcaaaagtatgatttacatagcagaatattgatggaggaggatattgatgaaaagatcagcataaaaaaaggacaggatgcacttcaggcgacagagaagcccttctatgatattcttgggaaggcatacccatcttcatctaaggagacagcaattaacggtgacagtcaagcagattaccctgataatggtagcagcagttatcatgaacaggcatgtagtggtagctttgttagtgatctccttgggtcacaggatgcgcattcgataaccaccgactggtcttctgaatttgaccgtttggctttgcaattcaggagaggtgttgaggaagcaaagaggttcattccaaatattgaaaagttggtggatgatccagagaagaatggtctttatgcttgcaaacaaacaacagagacaacagaacagaagggcaagcatgagaacaaaataaggaatcatcctcatgatcctcatgttgagcacatagagttgatggaagcaaggaacagtaagcatatggccatctccactagtgaaacaatacgggatgaaatgtttgatagtattctgctctgcaataggcagctccctggtgaagttgctaaccttagaggaatgatggcaaaagaagcaagcgacaacccaaagaaatttcaaagcaaaggatatggaaaagggcaaaggaagccacacagtagtaagaagaaacagaaagaggcaatagatctcagtgttcttctcatccaatgtgcacaagcgatagcatctaacaaccatccctttgctagtgagctactgaggaaaataaggcatcacgctttgccagatggagatggttctcagaggctagcaaactgctttgcagatggcctcgaggctcgcttggctgggactgggagtcaaatgtacgaaaaactgatggcgaaacaaacgagcaccagagacatgctaaaggcctatcatctatattttgtagcatgcccttttgagatggtaacatactacttctccaacaaaaccatcattgatgcattggaggggaaaacaacattgcatatcgttgattttggcatcctcttcggctttcagtggccatgtctaattcagcgacttgcaaagcgagaaggtggcccccctaagcttcgtatcacaggtgtagatgtaccccagcctggttttcgccctcatgaaaggattgaggagactggaaagcggttggcagagtatgcaaatatgttcaacgtacctttccagtatcatggcattgcttcaagatgggaaactatctgcatcgaggatctcagtattgacaaggatgaggtactcataatcaactgcatgtcacgaatgagaaagctaggtgatgagacagaaaacattgatagtgcaagggatagggtactacacatgatgaagaggatgaacccgcaggttttcattcttggtgttgtgaatggattgtacagctccccattctttctgactagattcagagaggttttattccattactcatcactttttgatatgctcgacaacaatgttcctaggaaccatgaagcaaggatattggtagagaaggatctctttgggaatgatgcacttaatgctgtagcatgcgaaggtgcagaaaggattgagaggccagaaagctacaaacagtggcaaatgaggatcctcagggctgggttcaagcaacgtcctgttaatcaagccattctgaatagatcagtacattacaaggaattttatcatgaagactttgtaattgatgaagatagtggctggctgctgcagggatggaaggggaggataatacaggcactgtcaacatggaaagtggaaacctag

SEQ ID NO: 12820 - DNA, 706 bp, Oryza sativa
  Clone ID: TFbOSC416395j.C1.o2.gp
cgtgttggagtcggagccggtgacatcgtagagggagtggcgcagccagtggacggcgacggcctcgcggcgcgtgacgcctagcttctccgggtcaagattcccggccttgtcagccaccgggcagaactcgaatggcaatcccagcgtgtccgcgaagtccgatagcctcttccccgtcgcctccagcgcctccatggacgcccccagcccggtcagcctcaccctcggcggcccccccggcctcgacgccaggatgtggaacagccccggccattggagcccctgcatgatgtccaggtcgatgatgtgcaccctctcctccctctcgaacgcctcctggatcgcctggttcgccgtgaagtgcgagaacttcacgaacgggctgatgccgttgaacacctggaacgccgcggcgacgcgcccgtggagacgcgccgccgccggggacgggttggggagcggcgcgtacagccccaggcacgagctcaccagccgcgccgacatggcctccgcgaagtaggcggcgacgcgctgcgtggatgtgccgaacggcgtggcaagctccgcgatctccagcagcgcgcggtgcgcctcgtcgaggttgtccgcgttcaccgactccgcgcactggagcagcagcgtcagcaggtggaggccctcctcgtcgcgctgcttccgccgctgctcctccttccgctccttg

SEQ ID NO: 12821 - DNA, 1089 bp, Oryza sativa
  Clone ID: TFbOSC272j.C1.o1.gm
ccaccgccgaagcgccaccactccgtgcccgacaatctcttcctcctccacaaccagccccagccaccgccgccggcgcccgcgcaatgcctcccgtttccaacgctacatagcgcggtacccttccagctccagccttcgatgcagcatccgcgcaacgcgatgaagtcaaccgcggcggcggcggcggcgcagcagcaacacctcctggacgagcttgcagcggcggcgaaggcaaccgaagtcggcaactccataggcgcgcgagagatattggcgcggctcaatcagcagcttcccccaattgggaagcctttcctccgctccgcctcctacctaaaggacgccctcctcctcgcgctcgccgacggccaccacgccgccacccgtctcacgtctccgctcgacgtcgccctgaagctcaccgcttacaaatccttctccgacctctcccccgtgctccagtttgccaacttcacggtaactcaggcgcttctggatgagatcgccagcacaaccgcgtcttgtatccgcgtcattgatttcgacctcggtgtcggcggccagtgggcttcgttcttgcaggagcttgctcaccgctgtggctctggcggtgtgtccttgccgatgttgaagctcacagccttcgtctcagccgcctcccaccacccgcttgagctgcatcttactcaggataacctctcacagtttgctgctgatcttggtattccatttgagttcaatgctattaatctcgacgcatttgatcctatggaactcattgctcctacagctgatgaggttgttgcagtaagcctcccagttggttgctcagcacgcactccactcccagctatgcttcagttggtgaaacagcttgctcctaagattgtggttgctattgactatggcagtgatcggagcgacctcccattttcccaacacttcttgaattgcttacagtcttgtctatgtcttcttgaatcacttgatgctgctggcactgatgcggatgctgtcaggtttgcacctcaaccactcagcaaccttgcggaggcacaggctgactgcctcttgaagcgggtgcag

SEQ ID NO: 12822 - DNA, 566 bp, Oryza sativa
  Clone ID: TFbOSC295j.C1.o4.gm
atgcagtttcttgatcatcaccagtatctatacagcagcagtagcagcaacctgccactgcagcagcctttgttgtcccatcaccaccgatttcttgaagccaatgagggttgcgccggcgaggacgactcgccggagttcgtcgagccgccggcggcggcggcggcggccgggacgttcgagcaacggccggagttaggagcgtgcaaggaggtgtactccgaggaaggcggcgcggcggaggagaggacgggcgtggcgatggcgggggccgacgtcgaacaggtggcggtggaggatgaggaggaggctcacggcgtgcggatgatcgcgctgctgatggagtgcgcggcggcgatgtcggtgggcaacctcgcgggcgccaacggggcgctgctcgagctgtcgcagatggcctcgccgtacgcggcgtcgtgcggcgagcggctcgtggcctacttcgccagggccatggcggcgcggctggtggggtcgtgggtcggcgtcgtggcgcccatggcgccgccgccgtcgtgcggggccatcaacgccgcgttccgggcgct

SEQ ID NO: 12823 - DNA, 1079 bp, Oryza sativa
  Clone ID: TFbOSC20531j.C1.o1.gp
cctcgcggcggaccgtctcccactttgcagcaatggcttggaacctgaatggcacgccgaattggcgcgcgcagttgctcagccgccggcctgtctcctcgatctggtcggctggccggaaccccggctgcgggaagtcgatgcccgtaatcctcacctccggcggcccgccttccctctccgacagacacttgaacagacctggccactggaatccgtagctgaggccgtagtccacgatgtgcagcttgcgcttccccgccacggcgtccaggatggtcttgttggagaagatgaagctcaccttcttgatgcagcaggccgccgcgaacagcttgtacgccttgaggaagtccaccgtcgacgtgcacttcgcaacgagcgacttgtacacctggctccccgtgccggcgagccgcgcctccagcccctcggcgaagcagcacgccagcctctgcgtcgcgtcccctctcgccgacgagttctgcttgatctgcttcagcagctcggtggcgctccgccggtcgctcgtcgccaccgcctgcgcgcagtggatgagcagggtgtgtaggtcgaccaccgccgcctttgcgcgcgccgccctccggccggccccgccgccgttccgggccttcttctcggcctcgctgtccatggcgacgcgcagctcctccatccctttcatgatcacctcgtaccagttgaacattatttcgtcgaacatctcgctggcggccgcggtggcctcttgcggtggcaccatcagcttgctgctcctgccggtctccgcctccaggtcgtcctcctcgccgtgcctgttcttccggcccctgccgctgccgccgcttcgtccgaacattaacgtgggctcatccaccgccggctccgtcttgagcagcgaggcgccgtcgaagccggcgaagagggtgttgttggtgggcaccaacttgttggcctcctccctgcccttgaggaacgccatgttgagcatctccatgttgtcggcggcggagaacagaagtttcaggtctttgtcgtcttccggcgcgctcctggtgtcgccgacgtcggcgtcgtgg

SEQ ID NO: 12824 - DNA, 492 bp, Oryza sativa
  Clone ID: TFbOSC406886j.C1.o3.gp
cgtgttggagtcggagccggtgacatcgtagagggagtggcgcagccagtggacggcgacggcctcgcggcgcgtgacgcccagcttctccgggtccagattcccggccttgtcagccaccgggcagaactcgaacggcaatcccagcgtgtccgcgaagtccgacagcctcttccccgtcgcctccagcgcctccatggacgcccccagcccggtcagcctcaccctcggcggcccccccggccgcgaccccaggatgtggaacagccccggccattggagcccctgcatgatgtccaggtcgatgatgtgcaccctctcctccctctcgaacgcctcctggatcgcctggttcgccgtgaagtgcgagaacttcacgaacgggctgatcccgttgaacacctggaacgccgccgccacgcgcccgtggacccgcgcgcccgccggggacgggctcgggagcggcgcgtacagccccaggcacgagctcac

SEQ ID NO: 12825 - DNA, 631 bp, Oryza sativa
  Clone ID: TFbOSC1273j.C1.o1.gm
aaccaacaggctttgcagttccgccgcgggtttcaagaggcaagcaagtttcttcctgatgagagcaagcttgtgattgatgtggataagctctacagtggagatgaggggagtaggttccttggtgaggttagacaagagaagaagcttgtgaaggtgaagacagaaacctctgatgttgaatcagcaggtcaccgaggaaagaagcatttctatggtgatgacctggatgcggaggaagggaggtgcagcaagcattccgcgcaagggattgacactgaccaccttgtgagggatttgatggacaaggtcttgctatgcaatggtgagacatgctcaaaaggtgttaaggagttgcgtgaggctctgcagcatgatgtggcgaaacattcaggcggaggccatggcaaagggtccagccatggcaagggtcgtggaaagaaacaacccaagaaggaggtggttgacctggagacccttctcatccattgtgctcagtctgtggccactgatgacaggcgcagtgcaactgagctcctgaagcagatcaggcagcatgctcatgccaatggtgatggtgatcagcgtttggcacactgcttcgccaacggcctcgaggcgaggctggcag

SEQ ID NO: 12826 - DNA, 519 bp, Oryza sativa
  Clone ID: TFbOSC400419j.C1.o1.fg
atgtcgcccgccgtggtgaccatcgccgagagggaagcaggcggcggcggcggcggcggcgaccacatcgacgacctgccgcggcgggtcggggtggccatggatcactactcggcggtgttcgaggcgctggaggcgacggtgccgccggggagccgggagcgcctcgccgtggagcaggaggtgctgggccgggagatcgaggccgcggtgggggccctccggcggccggtggtggcgcggcatcgagcggtggggcggcgccgcccgcgccgcggggttcgcggcgcggccgctcagcgcgttcgccgtgtcgcaggcgcggctgctgctccggctgcactacccgtcggagggctacctcgtgcaggaggcgcgcggcgcctgcttcctcgggtggcagacgcgcccgctgctctccgtctcagcgtggcagccgtcgtcgtcgtagccggcgacgaagacgacgatggcgacggcggcggcgaccacgggctagggtttgccaagctcgattga

SEQ ID NO: 12827 - DNA, 1143 bp, Oryza sativa
  Clone ID: TFbOSC400011j.C1.o18.fg
atggcgggcgactacgcggcggcggccgggagcctgtccgacgcgcgcgagatcttcgccaagatgcccaccacccgcaccgggatcggccgcgtcctcacccacttcgccgacgcgctcgccgagcgcctgttcccggcgttcccgcagtccgcgccgccgccgcccccgccacgcggggagcagcgcgagctcttccgcgggttctacgaggcggggccgtacctcaagttcgcccacctcgcggcgaaccaggccatcctcgaggcgttcgaggggtgcaacagcgtgcacgtgatcgacttcgccctcaccgatggcatccagtggccgtcgctcatacaggccttggccgtccgccccgggggcccgccgttcctccgcatcaccgggatcggcccccacgccgccggcaaccgcgacgagctccgcgacgtgggcctccgcctcgccgagttcgcgagatcttgcagcgtccccttcgccttccgcgggatcgccgcggaccagctcgacgggctccgcccgtggatgttccaggtcgcgcccggtgaggcagtcgccatcaactccgtgctccagctccaccgcctcctggtcgaccaggacgccgccgccgcggcgtcgttcccggcgcccatcgacggcgtgctagactgggtcgcgtccatgaaccccagggtcttcacggctatcagccgccatggcggcggcgacggggcgggcaacccgctcgccgaggcgtacctgcagggggagatcgccgacatcgtgagccgcgaggggagcagccgggtggagcgccacgagcagatgccgcggtgggtggagaggctgcggcgcggggggatgacgcagctgccgctcggcgccaccggcctctggcaggcggcgatgcagctccgcgagttctccggcgccggcttcggcgtccaggagaacggcggcttcctcacgctcacctggcatagccagaggctgtactcggcgtcggcgtggcgcgcgaccgcggggaagaagatgacgatgatggctagcggcgccgccgacgccatggaggagagtcagaacagcaacaccaacggcggcggcggcggaagcagtggtggtggccatggtgctctcaaccaaatcatgcagtga

SEQ ID NO: 12828 - DNA, 1575 bp, Oryza sativa
  Clone ID: TFbOSC401739j.C1.o20.fg
atgccgtactataataactcagtgccttcagggggaaatggtaggttctatataacacaaaatcatcaggatgctcactacgcttcttctgatgatgggtcacagaagattggttcgagccctcaagcatttgaagcgccgtactgcactctagaatcatcctcagcaaatggtgctcatcctgcccatagctctgcatcttctcacagcatctctcctattagcgggagccccctgtctcatcatgatagccactcagaccacacgtacaattcccctccaagtgcatcctgtgtcacagagattacagatctccagattaaactgagggagctggagaatgcaattcttgggcctgagctagacatagcttatgacagccctgagagcgccttgcaaccaaacataatggcaacaccagaaaattggagacagcttctgggaattaatacaggagatttgaagcaagtaatcatagcatgtggcaaggctgttgccgagaatgatgttcggctgacagaactactgatatctgagttaggtcagatggtgtctgtctctggtgatccattgcaacgattgggggcttatatgttggaaggccttgttgccagactttcttcctctggcagtaagatatataaatccttgaagtgtaaggagcctacaagctctgagctcatgtcatacatgcatcttctttacgagatatgcccattcttcaaatttggttatatgtcagctaatggcgccatcgctgaagctattaagggagagaactttgttcacataattgacttccaaattgcacaagggagtcaatggatgacattaatacaggcccttgcagcgaggcctggaggaccaccatttctacgaatcactggtatagatgactcgaattctgcttacgccagaggtggtggactggatatagttggtatgagattgtataaagttgctcagtcttttggtctgccctttgagttcaatgctgttccagctgctagccatgaggtttatcttgagcatcttgatataagagttggtgaagttattgttgtgaattttgcctatcagctgcatcacactccagatgaaagtgtaagcacagaaaaccatcgggataggattttaagaatggtcaagagcctctcccctaggttggtgactcttgttgagcaggagtcaaatacaaacacacggccattcttcccaagatacttggagactcttgactactacacagccatgtttgagtcgatagatgtcgctctcccaagggatgataagagacggatgagcgcagagcaacactgtgtggcgcgggacattgtcaatttaatcgcatgtgagggtgctgagagggtagagaggcatgaggtctttggaaaatggaaggcaagattaacgatggcagggtttcggccatacccgctgagttcagtggtgaacagtaccatcaaaacgctgttgcatacttacaatagcttctacaggcttgaggagcgagatggtgttctttaccttggatggaagaacagagtattggttgtatcttctgcatggtgttga

SEQ ID NO: 12829 - DNA, 1449 bp, Oryza sativa
  Clone ID: TFbOSC401887j.C1.o6.fg
atgccgctccacccggccgcggcggcgtcgcccacgccgccatggatggtgcgggagctgcgttccgacgagcgcgggctgtgcctcatccatctcctgctcaactgcgccgcggcggcggcggccgggcggcttgatgctgcgaacgccgcgctcgagcacatcgcgtcgctggcggcgcccgacggggacgccatgcagcgcgtggcggccgccttcgcggaggcgctggcgcggcgcgcgctgagggcgtggcctgggctgtgccgcgcgctgctcctgccccgcgcgtcgcccacgccggccgaggtcgctgccgcgcgccgccacttcctcgacctctgcccgttcctccgcctcgccggcgccgccgccaaccagtcgatactggaggccatggagtccgagaagatcgtgcacgtcatcgacctcggcggcgccgacgccacgcaatggctggagctcctccacctcctcgccgcgcgccccgagggcccgccgcacctgcgcctcacgtcggtgcacgagcacaaggaactcctcacccagacagccatggcgctcacgaaagaagcagagcgcctcgacgtgccgttccagttcaacccggtggtgtcccgcctcgacgccctcgacgtggagtccctccgcgtgaagaccggcgaggccctcgccatctgctccagcctccagctgcactgcctcctggcgtccgacgacgacgccgccgccgtggcgggcggcgacaaggagaggcggagcccggagtccgggctgtcgccgtcgacgtcgcgcgcggacgcgttcctgggcgcgctgtgggggctgtcgccgaaggtgatggtggtggcggagcaggaggcgagccacaacgcggcggggctgacggagaggttcgtggaggcgctcaactactacgcggcgctgttcgactgcctggaggtgggggcggcgcgcgggtcggtggagcgcgcgcgcgtggaacggtggctgctcggggaggagatcaagaacatcgtggcgtgcgacggcggcgagcggcgggagcggcacgagcggctggaaccggtgggcgcggcggctggagggcgccggcttcggccgcgtcccgctcagctactacgcgctgctccaggcgcggcgggtggcgcagggcctcggctgcgacggcttcaagaattcaactttgggcgtagcaatttcaacgtgtcggaagaagcggccaagatcgagctcaccttgtcggaaattccacggaatcggcagccggtggcgtggcgtttccaaattccaccaaacttctgccaaagttgggagctccaacctcaaaagcgtccctgctttgctttccacggtaaccgcatagctgcagcctgcagccactgtggattctacttattcttcatgttcttcatactagtactccagatatcatatttggatatctga

SEQ ID NO: 12830 - DNA, 1863 bp, Oryza sativa
  Clone ID: TFbOSC410211j.C1.o1.fg
atggcctgccgaatcgaggtctggccaccctccgccaccgccggccggagctgccttttcatcagccgaagcggcggcggcggcggtgagcagccggggagattatacaatttgttgccagaagaaatactattgactgagatttggaacagtgataacaacggcaagatcaactccctattaattgttcggaagtgcatcattcctcagcgactccagcatataaataaaatccagaaggttgcaccagagaatatgtcaatgcaggcctctaaccgaccatacagatatccagacaattctcaaataccatactacagccggagttcaatgcatgtggggcaaaatggtacttaccatgtgcaacaaaatcatgaggatctttacgcgtcatctgatgatggttcacagaacggcaattctaaggctcaggggttgcaagcacagtactgcactctagattcatcctcaggcaattttgtgtatccagcacatagctctacatcctcccacataagtgggagccccatttctcagcaagatagccactcagagcacacatctggttcccctgcaagtgcttcatgtgttactgaagttccaggcttgaggtttacaacaattgaggagatagagaatgcaatgtttggacctgaacctgacacagttagctcggactgctccttacttactgattctgctttttaccaagataactggagggagcatctgggaatcaatacaggggacttgaagcaggtaattgcagcatgcggtaaggctgttgatgagaatagttggtatagggacttgctgatatctgagttaaggaacatggtttccatttctggagagccgatgcaacgccttggagcctatatgttggaaggccttgttgccaggctttcttcgactgggcatgccttatataaatccctgaagtgtaaagaacctactagcttcgagctcatgtcttatatgcatctcctctatgagatatgcccgtttttcaagtttggttacatgtctgccaatggagcaattgcagaggctgttaagggcgagaactttgttcacatcatcgacttccaaattgctcaaggtagccagtgggcaactatgatacaggcccttgctgcaaggcctgggggaccaccatacctgaggattactggtatagatgactcgaattctgcccatgcccgaggtggtggactggatatagtcggacggcggttattcaatattgcccagtcatgtggtctgccctttgagttcaatgctgtcccagcagctagtcatgaggttatgcttgaacatcttgatataagatctggggaggttattgttgttaattttgcctaccagctgcatcacactcctgatgagagtgtgggcatagaaaatcaccgggacaggatattgagaatggtcaaggggctctctccaagggtggtaactcttgtagaacaggaagcaaacacaaacactgcacctttcttcaatagatacttggaaactcttgattattacacagctatgtttgaagctatagatgttgcttgcccaagggatgacaagaagcggattagcactgagcaacactgtgttgcaagagatattgttaatttgattgcatgtgaaggtgcagaaagggtggagaggcacgagccttttggaaaatggagggcaaggctttcaatggctggctttaggccgtacccactaagtgcactggtgaacaacactatcaaaaagttgctggatagttaccacagttactacaagctagaggagagagatggtgccctttatcttggatggaagaacagaaagctggttgtatcttctgcatggcggtga

SEQ ID NO: 12831 - DNA, 1464 bp, Oryza sativa
  Clone ID: TFbOSC422725j.C1.o1.fg
atggtccgcaagcgccccgcctccgacatggacctgccaccgccgcgccgccatgtcaccggcgacctgtccgatgtcacggccgccgcggcgggcgcgccgacgttgtctgccagcgcgcagctccccgcgctgcccacgcagctcccggcgttccaccacacggacatggacctcgccgcgcccgcgccgccggcgccgcaacaggtggcggcgggtgagggtgggccgcccagcacggcttgggtggatggcatcatccgtgacatcatcgccagcagcggcgccgcggtctccgtcgcgcagctcatccacaacgtgcgtgagatcatccggccatgtaaccccgacctcgcgtccatcctcgagctccgcctccgctctctcctcaactccgaccccgcgccgccgccgccgccgccgtcgcatcctgctctcctccctcccgacgccacggcgccaccgccaccacccacgtcggtcgccgcgctccctccccctccgccagcgcagcccgacaagcggcgtcgcgagcctcagtgtcaggagcaggagcccaaccagccgcagtcgccgaagccccccaccgcggaggaaaccgccgccgccgccgcggccgccgcagcggcggctgccgcggccgccaaggagcgtaaggaggagcagcggcggaagcagcgcgacgaggagggcctccacttgctgacgctgctgctccagtgcgcggagtcggtgaacgcggacaacctggacgaggcgcaccgcgcgctgctggagatcgcggagctcgccacgccgttcggcacctcgacgcagcgcgtggcggcctacttcgcggaggccatgtcggcgcggctggtgagctcgtgcctggggctgtacgcgccgctcccgagcccgtccccggcgggcgcgcgggtccacgggcgcgtggcggcggcgttccaggtgttcaacgggatcagcccgttcgtgaagttctcgcacttcacggcgaaccaggcgatccaggaggcgttcgagagggaggagagggtgcacatcatcgacctggacatcatgcaggggctccaatggccggggctgttccacatcctggcgtcgcggccgggggggccgccgagggtgaggctgaccgggctgggggcgtccatggaggcgctggaggcgacggggaagaggctgtcggacttcgcggacacgctgggattgccgttcgagttctgcccggtggctgacaaggccgggaatctggacccggagaagctgggcgtcacgcgccgcgaggccgtcgccgtccactggctgcgccactccctctacgatgtcaccggctccgactccaacacgctctggctcatccagaggtactacacttttcttctctcttcccttgtcaactcgggaccccccggaatcatggctactttacaccctatacttctcattgacattgtgacctag

SEQ ID NO: 12832 - DNA, 1263 bp, Oryza sativa
  Clone ID: TFbOSC401762j.C1.o34.fg
atgaacttgaagttgagtcttgccatcgatggtggtggtggtggtgatgcggcggcggcggtggccaagaagagtaaggtggtggggggcggcgccgtcgtcgtcgatggcgtcggcagcagcgccatttgtggcggcgatcggggtagcagggtgagagatcggatggtcaagaaggcggaggagtttgaccatgaaaatggaatggcggcgacgtcgtcggatggtggcggtcgcggcggcgctggcatggatctggcgtcgccgttctaccagttcgcgcacttcacggcgaaccagacgatcgtcgaggccttcgagtccggcggccggcgccgcctccacgtcgtcgacttcgacgtctcgtacgggttccagtggccttcgctgatccagtccctgtcggacgccgccgccgccgccaccagcagttcatcccacgacgacgacgacaacggaggcggctgcggcgacggtccggtgtccctgcggatcaccggcttcggcgcgagcgccgacgagctacgggaaaccgaggcgcggctccggcggttcgccgccggctgccccaacctacggttcgagttcgagggcatcctgaacaacggatcgaacacccgccatgattgcaccaggatcgacgacgacgcgacggtggtcgtcaacctggtgttcccggcgagctcaagagaagcgtgcgccgccacaagaatggcttacatcaactccctgaacccgtccatggtgttcttgatcgagaaacacgacggcggcggcgggctcaccggcggcgacaacaccactacaggaagaagcgcgagcttgctcccgcggttcgccgccaacctccgatacttcgccgccgtgttcgactcgctccacgagtgcctcccggcggacagcgccgagaggctcgccatcgagagggaccacctcgggagggagatcgccgacgccgtggcctcgctagaccaccaacaccgccgccgccatggcggcggcggcggcggcggcgatcacgcagcagctagctggaactggaaggcggccatggagggcgccgggctcgacggcgtgaagctgagctcgaggacggtgagccaggcgaagctgctgctcaagatgaagagcggctgcggcggcggcgggttccgcgtcgtggagggcgacggcggcatggccatgtcgctggcgtggcgtgacatggctctggctacggcgaccttgtggcggcggcgacggcggcggcggcgatgtcggtga

SEQ ID NO: 12833 - DNA, 1520 bp, Oryza sativa
  Clone ID: TFbOSC20523j.C1.o1.fg
atggctgccgcgccgaagccggaggaactcgtcgtcgccatcgagcagccattctccccgtcgctcttcctggacctgcccccgacgccgcaccacgatgacgaccccaacaatgtcaatgacgacctcctcctccccttcatctcacgcatcctcatggaggacgacatcgacgacaagttcttctaccagttccccgaccaccccgccctcctccaagcccagcagtcttacgcccaaatcctccatgcccctgccacatcttcttcctccgacgacaccaccatcaacaacaatacgaccaactccacctccgtccccgacacgctcgccatgcccgaccacgacgccgacacccagagcgcgccggacgacatggagatgctctacatggcgttcctcaagggcagggaggaggccaccaagttcctgcccacaaacaacaccctcttctctggcttcaaggcagagccggtgctggatattcaacccaccttcacgttcggaccaagcggcggcggcaggggccggaagaacaggcacgccgaggaggacgacctggagacggagaccagcaggagcagcaagctgatggcgccagaacatgacgacgccgccgccgccgacgagatattcgacgaaataattctcaatgggtaccagatgatcattaaggggatagatgagctgcgcgtcgccatgggcagccagagccaggccgacaagaacggccgaagagcgtcacgcgcgaagacggcggtggtcgacctacacaccctgctcatccactgcgcgcaggctgtggcgacgggagactggcggagcgccaccgagctgctgaagcagatcaagcagaactcgtcggcgagaggggacgcgacgcagaggatggcgtgctgcttcgctgaggggctagaggcgcgtctcgccggaacggggagccagatgtaccagtcgctcgtcgcgaagcgcacgtcgacggtggacttcctcaaggcgtacaagctgttcacggcggcctgctgcatcaagaaagtgagcgtcatcttctcgaacaagaccatctacaacgccgtcgccgggaggcgcaagctgcacatcgtcgactacggcctcagctacggattccagtggccagctttgttctttttgctgggagccagggaaggcggaccgccggaggtgaggatgaccggcatcgacgtcccgcagcctgggttccggccagccgaccagatcgaggagacaggccgccggctgagcatctgcgcgcgccagttcggcgtgccattcaagttccgcgccattgccgcaaagtgggagacggtccgccgcgaggacctccatctcgacccagaagaagaagaagaggaggtgctcgtcgtgaactgcctccatggattgaacaccctgcaagacgagagcgtggtcgtggacagcccgagccccagagacgtggtgctcgacaacatccgcgacatgaggcctcacgtgttcgtccagtgcgtcgtcaacggcgc

SEQ ID NO: 12834 - DNA, 645 bp, Oryza sativa
  Clone ID: TFbOSC20530j.C1.o7.gp
agagcactgaaactccagaggtcattcaccacaagcacctcatcaggctcgatgtgcaggtcctcggcaccaaccgtctcccactttgctgctacaacagcttggaatctgaatggcacgcggaactcattggcacagctgctcaggcaatgccctgccgcctcaatacgctgaaatggacgaaacccaggctgggggatgtcaacgatggtgatcctcacctctggcggcccgtcttccctgctccccagccggcggaacaggtctggccagtgcagcccacagcgtatgccataatcaactatgtgcagcctcttcttcccttgcacagcttgcatgattgtcatggcagcaaacatgagcgccaccttcttgaagcagcaggctgccatgtagagcttgtacaccttgaggtactccaccaacgacatgcgcacatgattctgatacagatgcttcccgctgccagctagccgtgcctcaagccccttggcgaagtagtgagccactcgctgcatggcgtcgcctgttgccaaagcgtgctgcttgatcttcttcagcagctcgcctgcagattgctggttgtctgtcgccatggcctgtgcacactggatcagcagcaaccgtaagtccaccaccttgcta

SEQ ID NO: 12835 - DNA, 1245 bp, Oryza sativa
  Clone ID: TFbOSC416456j.C1.o5.fg
atggacatggagcatgagctcaggggcggcggcgtcggggcggcggcgcatgggcatggctccatctgcttctccggcgggccggtgctcgtcgacgggcgacgcatccagcagctgctcctccactgcgccgccgcgctcgagtccaacgacgtgacgctggcgcagcaggccatgtgggtgctcaacaacatcgcctcctcgcagggggaccccagccagcggctcacgtcgtggctgctccgcgcgctcgtcgcccgcgcgtgccgtctctgcgcggcggcgccggcgggcgccgccgtggagtttctggagagaggccgggcaccgccgtgggggagggccatgtcggtgacggagctcgccgactacgtcgacctcaccccgtggcaccggttcggcttcacggcgtccaacgccgccatcctccgcgccgtggccggcgcatccgccgtgcactggccgacgctcatcgacgtgctgtccaagcggcccggtggcgcgccggcgatccggatcaccgtgccgtccgtgcgccccgccgtcccgccgcttctcgccgtgtcgagctcggagctcggagcccggctcgccatcttcgccaagtccaaaggcgtgcagctggagttcaacgtcgtcgagagcgcgacgacgacgtctccgaagaagacgtcgacgacgctgtgccaagaactcgcgtccgtgctgtccgacccgccgtcgctggggctaagggacggcgaggcggtcgtcgtgaactgccagagctggctccggcacgtcgcgccggacacgagggacctcttcctcgacacggtccgggcgctgaacccctgcctgctcaccgtcaccgacgaggacgccgacctgggctccccgagcctcgcgtcgcgcatggcgggctgcttcgacttccactggatcctgctcgacgcgctcgacatgtcggcgcccaaggacagcccgcggcggctggagcaggaggcggccgtcgggcggaagatcgagagcgtcatcggcgaggaagacggcgccgagcgctcggagcccggcgcgaggctcgccgagaggatgagccggaaagggttcgccggcgtcgtgttcgacgaggaggcggcggcggaggtgcgacgattgctgagcgagcacgccacggggtggggcgtgaagcgggaagacgacatgctggtgctgacgtggaaggggcacgccgccgtgttcaccggcgcttggacgcccaactag

SEQ ID NO: 12836 - DNA, 611 bp, Oryza sativa
  Clone ID: TFbOSC422742j.C1.o1.fg
acacgctgggattgccgttcgagttctgcccggtggctgacaaggccgggaatctggacccggagaagctgggcgtcacgcgccgcgaggccgtcgccgtccactggctgcgccactccctctacgatgtcaccggctccgactccaacacgctctggctcatccagaggttggcgccaaaggttgtaacaatggtggagcaggatctgagccactcaggctccttcctggcacgttttgtggaggccatccactactattcggcactgttcgactcgcttgatgcgagttacagcgaggatagcccggagcggcatgtcgtggagcaacaactcttgtcgcgggagatccgcaatgtgctagccgtgggcggtccagcacgcaccggcgatgttaagtttgggagctggcgcgaaaagcttgcgcagtcgggcttccgtgtgtcgtcgcttgctggaagcgctgctgctcaggctgcactgctgcttgggatgttcccttccgatggatacacgcttattgaggagaatggcgctctgaagctcggatggaaggatctgtgccttctcactgcctctgcttggcgcccaattcaggcttcgggacgttag

SEQ ID NO: 12837 - DNA, 377 bp, Oryza sativa
  Clone ID: TFbOSC401329j.C1.o97.gp
cggccgcccgtgccagccgagggtgaggcacccgtcggcctcctcgacgctgtgcccctcgccggagaacagcccgaccagcatcctcgcctgccgcagcgcgttcgaaccgagcggcacggcgctcaggccggcgcgcgtgagcctgtcccgccaccgagacagcggctcgtgccgttccctccgggcggcgccctccccgcacacgatgtcgcagatctccctctggaggtacgcctccgccatcgcgttgcccgcgccgccgctggcgctcgccgcgtccagcgagtcgaacaccgcggagtagtagaacagcgcctccgtgaacctgtcgaggaagcccgtcttgttgtggtcggcctcttgctcgatgaccg

SEQ ID NO: 12838 - DNA, 2130 bp, Oryza sativa
  Clone ID: TFbOSC410945j.C1.o6.fg
atgagggcggcgctgttcggtgccgagaggagcggggtagtggaccacggcggcggcgataaggaggagctgttttggccggcggggaagggggggctggtggtggtggagccgaggtcggtgctggactgcacgcgcagcccgagcccgccgtattccacgtcgacgctgtcgtcgtccctgggcggcggctcggcggactcgaccggtgtggcggcggtttcggagagcagcaccgccgccgccggagccaccaaatggggagccccaggcgagcatggtggcggcgggaaggaggagtggggcggcgggtgcgagttgcccccgatacctggagcactggatgtggggctcgtcgggggcgagggctgggacgccacggccacgctcggcaacgcagccgggccggaccagtcgttcttgaactggatcattggggccgccggcgacctggagcagcctggtccgccgcttccagtgctccagcagccgcttattgacaatgcggggttcgggatcccggccgtggacaccatgggcttctctctggatcaccccctcagcggcgtcgcctccgacctctcgtcctccggtgcgcacactgccaccggcggtggcggcaaggcctcattagggttcggtctcttctcgccggaggccacctccctcgagcagccgccgccttcgatgctgtttcacgaaggtatcgacacgaagccccctcttctgggtgcgcagccgcaatttctcctgaaccactaccaaccccagccacccaaccccgccgcagccttgttcatgcctctcccgcccttccccgagcacaatcaccagtcgccgcatctccagccaccgctcaaacgccaccacgccattccagatgacctctacctcgcccgtaaccagcagcagtcatccgcggtggcgccaggtctcgcctattcaccaccgctacatggcccggctccgttccagctccatccttcgccgccaccgattcgcggggcaatgaagtcgacggcggcggaggcggcgcagcagcagctgctggacgagttggcagcggcggcaaaggcaaccgaggctggcaattccgttggcgcgcgagagatattggcgcggctcaatcaacagcttccccaacttgggaagcccttcctccgctccgcctcctacctcaaggaggccctcctcctcgcactcgccgacagccaccatggctcctccggcgtcacctcgccgctcgacgttgccctcaagcttgcagcatacaagtctttctctgacctgtcacctgtgctccagttcactaactttaccgcaacacaggcgcttcttgatgagattggtggcatggcaacttcctgcatccatgtcattgactttgatctcggtgttggtggtcagtgggcttccttcttgcaggagcttgcccaccgccggggagctggaggtatggccttgccgttgttgaagctcacggctttcatgtcgactgcttctcaccatccactggagctgcaccttacccaggataacctctctcagtttgccgcagagctcagaattcctttcgaattcaatgccgtcagtcttgatgcattcaatcctgcggaactcatttcttcctctggtgatgaagttgttgctgttagcctccctgttggctgctctgctcgtgcaccaccgctgccagcgattcttcggttggtgaaacagctttgtcctaaggttgtcgtggctattgatcatggaggtgatcgtgcagaccttccattctcgcagcatttcctgaattgtttccagtcctgtgtgttcctccttgactcgcttgatgctgctggtattgatgctgattctgcctgcaagatcgagaggttcctaattcaaccaagagttgaggatgcagtgattgggcggcacaaggcgcagaaagctatagcatggaggagcgtttttgcagcaactgggtttaagcccgttcagctcagcaacctcgccgaggcacaggcagactgcctcctgaagcgggtgcaggtccgaggattccatgtggagaaacgcggagctgctcttacgctctactggcagcgtggggagcttgtatccatatcatcttggcggtgctga

SEQ ID NO: 12839 - DNA, 535 bp, Oryza sativa
  Clone ID: TFbOSC16404j.C1.o6.gp
tagcccagtcaaaatccaatatcttctattgcccagaaataggtcaaaattcattgaaataggaatcagacataactaatggagtggtacctccacagaagaaatcagctgagttagtcatatttacagtttgctagtttggttcccatgctgaaagagcaaagatgatacgccccttccaaccttgcagcatccatttgttatcttcgtcaactaggaaatccctgtggtaggatttcttcaccttgtatcttgccttcttcaccgtctcttggttcagtggtagctgcttgaagcctgccctgatgttcctcacctgccattgcttgtacgtctctggtctttctactctctcagtgccctcacaagcaaccacattaagagcttcccggccgaagagatctctttctatcagcagcctgttttcgtcgacccgtgaagcagttgtttcaagcatatcaaaaagtgaagagtagtagaacaaagcctccttgaatcgtgtcacgaagaagggcgcattgtaggtgccattgac

SEQ ID NO: 12840 - DNA, 1782 bp, Oryza sativa
  Clone ID: TFbOSC416395j.C1.o2.fg
atggtccgcaagcgccccgcctccgacatggacctgccaccgccgcgccgccatgtcaccggcgacctgtccgatgtcacggccgccgcggcgccgtcgtctgccagcgcgcagctccccgcgctgcccacgcagctcccggcgttccaccacacggacatggacctcgccgcgcccgcgccgccgccgccgcagcagcaggtggcggcgggtgagggtgggccgcctagtacggcttgggtggatggtatcatccgtgacatcatcgccagcagcggcgccgcggtctccgtcgcgcagctcatccacaacgtgcgtgagatcatccgaccttgtaaccccgacctcgcgtccatcctcgagctccgcctccgctctctcctcacctccgaccctgcgccgccgccgccgccgccgccgtcgcatcctgctctcctccctcccgacgccacggcgccaccgccaccccccacgtcggtcgccgcgcttcctccccctccgccgccgcagcccgacaagcggcgccgcgagcctcagtgtcaggagcaggagcccaaccagccgcagtcgccgaagccccccaccgcggaggaaaccgccgccgctgccgcggccgccaaggagcggaaggaggagcagcggcggaagcagcgcgacgaggagggcctccacctgctgacgctgctgctccagtgcgcggagtcggtgaacgcggacaacctcgacgaggcgcaccgcgcgctgctggagatcgcggagcttgccacgccgttcggcacatccacgcagcgcgtcgccgcctacttcgcggaggccatgtcggcgcggctggtgagctcgtgcctggggctgtacgcgccgctccccaacccgtccccggcggcggcgcgtctccacgggcgcgtcgccgcggcgttccaggtgttcaacggcatcagcccgttcgtgaagttctcgcacttcacggcgaaccaggcgatccaggaggcgttcgagagggaggagagggtgcacatcatcgacctggacatcatgcaggggctccaatggccggggctgttccacatcctggcgtcgaggccgggggggccgccgagggtgaggctgaccgggctgggggcgtccatggaggcgctggaggcgacggggaagaggctatcggacttcgcggacacgctgggattgccattcgagttctgcccggtggctgacaaggccgggaatcttgacccggagaagctaggcgtcacgcgccgcgaggccgtcgccgtccactggctgcgccactccctctacgatgtcaccggctccgactccaacacgctctggctcatccagaggttggcgccaaaggttgtaacaatggtggagcaggatctgagccactcaggctccttcctggcacgttttgtggaggccatccactactattcggcactgttcgactcgcttgatgcgagttacagcgaggatagcccggagcggcatgtcgtggagcaacaactcttgtcacgggagatccgcaatgtgctagccgtgggcggtccagcacgcaccggcgatgttaagtttgggagctggcgcgagaagcttgcgcagtcgggcttccgtgtgtcgtcgcttgctggaagtgccgctgctcaggccgtgctgctgcttgggatgttcccttccgatgggtacacgctcattgaggagaatggcgccctgaagcttggatggaaggatctgtgccttctcactgcctctgcttggcgcccaattcaggcttcgggacgttag

SEQ ID NO: 12841 - DNA, 1650 bp, Oryza sativa
  Clone ID: TFbOSC403595j.C1.o11.fg
atggccggtatcgcggctctagccaactgccaaagtgatgagaggagttcgtcttgcggcgctgcgttgctggagttcatggggccagccgcgccgccgtccgaagccgccgcggcggccgacgatgtggtgctcccgtacatctcgcgtattctcatggaggaggacatcgacgacgacatgttcttctgcctgtaccccgaccaccccgctctcctcgaggcgcagcagccgttcgcccagatcctctcctcctcctccagcatcgccggtgaggtgaacagtgcacccatggaggattctgctgccttgatgatgcaggggagcggcaatggtaggggacggaagggtagtaagcatggcggggacgagctggaggccgaggtgggcagggcgagcaaactgatggccacgccggaggaggaggaggacgacgacgatggcgtcggcgagatgttggagaagatgatgctcaacggggacgaggacgaggcattccacggggagacgaacgcgccgcgcgtccccgcggagaagaagtgcgggaaggcggcgcggcggaggaggaggcaggccaaaggggaggtggtggacctgcgcgagctgctcatgtcgtgcgcgcaggcggtggcatcgggcaaccgccggagcgccggcgaactcctggagcagatcaagcggcactcgtcgccgacaggggacgccaccgagcggctggcgcattacttcgccgatggcctggaggcgcgtctggccggcgcggcgagcctggagcgccggctggtcgcgtccgcggaggagcgcgcgtcggccatggagttgctggaggcgtaccaggtgttcatggcggcgtgctgcttcaagtgggtggcgttcacgttcgccaacatggccatcctccgcgcggcggaagggaggaacaggctgcacatcgtggactacggtggtcagtaccacggcctccagtggccatccttgctgcagcggctggcggagagggaaggcgggccgccggagttccgcgccgtggcggcggcgaggtgggagacggtcaccgccgaggacgtcgtcggcgtcgaccccgacgacgaggcggcggtcgtcgtgaacgacgtgctcagcctgggcaccctgatggacgagagcggcgtgttcgacgacccgagcccgcgggacacggtcctgggcagcatccgcgacatgcgcccggcggtgttcgtccaggccgtggtgaacggcgcccacggcgcgcccttcttcccgacgaggttccgggaggcgctcttcttcttctcggcgctgttcgacatgctgggcgcgacgacgccggaggaggggagccacctgcgggtggtgctggagagggacgtgctgaggcgggcggcggtgggggtgatcgcgggggaaggggcggagcgggtggagcggccggagacgtacaggcggtggcaggcgaggaatcggcgggcggggctgaggcaggcggcggtggagggcgacgtggtggaggcggtgaggagaagggtgaggaggaggcatcacgaggagttcgtgatcgaggaggatgcagggtggttgctgcaggggtggaaggggcgcatcctgtacgctcactcggcgtgggtcgtggcagaggatggtgcgcactag

SEQ ID NO: 12842 - DNA, 784 bp, Oryza sativa
  Clone ID: TFbOSC422742j.C1.o1.gp
acaatctaattgaactcactaaccaccagatatgatcattttgtgatcatatgaatttcatgtcagtaaggatccttttgcgtgttcccccaaaacaatgtcagcaaggattaagcactacaaaattgcaaaataaactaaattggacagaatggttaactggagcatgaacagaataaaagctaaagctaagttgcacattagtaactaccactgtgtggagatctgaaaattagtgatcagaatttttttttatttttcttttctcagaattgaccaaattgagcagctaaaagaagcaaaaggactaggtaattgcacctaagtaagatcaagtgatacttcagctctataaattccccctcaatactaacgtcccgaagcctgaattgggcgccaagcagaggcagtgagaaggcacagatccttccatccgagcttcagagcgccattctcctcaataagcgtgtatccatcggaagggaacatcccaagcagcagtgcagcctgagcagcagcgcttccagcaagcgacgacacacggaagcccgactgcgcaagcttttcgcgccagctcccaaacttaacatcgccggtgcgtgctggaccgcccacggctagcacattgcggatctcccgcgacaagagttgttgctccacgacatgccgctccgggctatcctcgctgtaactcgcatcaagcgagtcgaacagtgccgaatagtagtggatggcctccacaaaacgtgccaggaaggagcctgagtggctcagatcctgctcc

SEQ ID NO: 12843 - DNA, 3157 bp, Oryza sativa
  Clone ID: TFbOSC20530j.C1.o1.np
cacgagatttgcatgaagggggtgaagcagctgagcctcaagtccaagagcagcagcagcaagaaggcgcgggggagacgcactgtgatccacaccgagccggtggacctgcacaacctgctgctccactgcgcgcaggcggtggccacggacgaccgccggagcgcgcacgagctgctgaggcagatcaagcagcactcgtcggcgtggggagacgccggacagaggctggcgcactgcttcgcgcaagggctggaggcccggctcgccggcacggggagccaggtgtaccagtcgctcatgtcgcagcgcacctccgtggtcgacttcctcaaggcgtaccggctgtacatggaagcctgctgctgcaagaaggtggccttcgtcttctccaacaagaccatctacgacgccgtcgccgggaggcgcaagctgcatatcgtcgactacggcctcagctacgggttccagtggcctgggttgctgcgcgagctcgcggcacggagaggcggcccaccggaggtgaggatcaccggcattgacctacctcagccgggattccgccctgaccaacacatcgaggagaccgggcggcggctgagcaggtacgccgacgagctcggcgtgccgttcaagttccacggcatcgcggcgacgaagaaggagagcgtgaggcgggaggagctgggcgaggcggaggaagacgaggtggtggtggtgatcagcctgtgccatttcaggaacgtgatggacgagagcctgcaggaggacagcagcaggagccccagggacgaggtgctggggaacatccgcaggatgcgccccgacgtgttcatccatggcatcatgaacggagcctacggcgcgacctacttcctgacacgcttccgggaggctctctactactacgcggcgcagttcgacctgctggacgcgacggtggggcgggagagccacgagcggatgctggtggagcgggacatcttcgggcgggcggctctgaacgtgatcgcctgcgagggcgcggagcgggtggagcggccggagatgtacaagcagtggcaggcgaggaaccagcgcgcggggctgaggcagctgccgctgaatccgcaggttgtgaggctggtgctggacaaggtgagggacaagtaccacaaggacttcgtggtggacgaggatcaacgctggttgctgcacaggtggaagggccgcgtgctctacgccttgtccacttgggttgcccaacactagctcttaggcgaattaattttgaaaaatatattgtctattcttttttctcagaaatactcaggatacaatttttttggcacaaatataaactcatgatatgacgagcaagagcaaaggctaccaccattgaatgattatcagcatggccaacccagaggatttcttttgggaggccctcctcaaggagaacgaagcaccatccccatcacctgtcttctttgaactccccccaacacccctcgccaacagtgatggcagtacagatccctcgtcattgttggacaaccaacttctctcctacgtcactagtatgctcatggaggatgagatgggttcttctgctgctgtcaccaacttgcagtgtgtcaacaggggcagcacagaggaggccaacaatatgttgccgggcagtgaagtggttagggcgttcttgaagggcatggaagaggccagcaagttgctgcctagaaacaacagcttcagaatgctggagacggtggatcaagtatcaagtcatggtcattgtaggggaggaaagaagaaaaaccatgacagggatgagcagcagctggaggaggaactggggaggagcagtaaattagctgccatgacgaatgcagggacggaggaggctggtgctcgcgagttgctggacgaactgatgctgcactcgcacgagacatgcatcaaagacatggagaagctgcgcatcgacatggacaatgaggcagataagaccatcaaaaagaagggcaagaaaggcagtagtagcaaggtggtggacttacggatgctgctgatccagtgtgcacaggccatggcgacagacaaccagcaatctgcaggcgagctgctgaagaagatcaagcagcacgctttggcaacaggcgacgccatgcagcgagtggctcactacttcgccaaggggcttgaggcacggctagctggcagagggaagcatctgtatcagaatcagatgcgcatgtcgttggtggagtacctcaaggtgtacaagctctacatggcagcctgctgcttcacgaaggtggcactcatgtttgccgccatgacaatcatgcaagctgtgcaagggaagaagaggctgcacatagttgattacggcccgcgctgtgggctgcactggccagacctgctccgccggctgggaagcagggaagacgggccgccggaggtgaggatcaccatcgttgacatcccccagccggcgtttcgtccatttcagcgtattgaggaggcagggcattgcctgagcagctgtgccaatgagttccgcgtgccattcagattccaagctgttgtagcagcaaagtgggagacggttggtgccgaggacctgcacatcgagcctgatgaggtgcttgtggtgaatgacctctggagtttcagtgctctgatggacgagagtatcttctgcgatgggccaaaccccagggatgttgccctccgtaacatcagcaagatgcagccagacgtgttcatccaaggcatcatcaatggtggctatggtgcctccttcctgtcacgctttcgtggagcgctcttgtattactcggctctgtttgacatgctggacgccaccaccccaagggagagtgggctgcggctggcgctggagcagaacgttctggggccttatgccctcaacgccatcgcctgtgagggtgcagacctggtggagcgccctgagaagtacagacagtggcaggccaggaaccaccgtgcaggcatgcagcagctgaaactgagaccagatatcgttgatacaatcagggaagaggtgaacaagtaccaccataaggactttctgctgggagaggacgggcagtggctgctgcagggatggatggggcgagtcctctttgctcactccgcatgggtgccacaa

SEQ ID NO: 12844 - DNA, 2835 bp, Oryza sativa
  Clone ID: TFbOSC400622j.C1.o58.fg
atgccctttggtgggagcgcgcgagaggggcacgcggggacactgctgcaacaccacctcatacacggcgttggcctcgccgcggccggcaagctcgtctcctcctcctccgccgccgccgccgccgccggagcaggtgggttctgggagccaaggtcggtgctcgaccaccgccacagcccgagccccagcccgcctacctcggcttccacgctgtcgtcgcctctcgccgacgtggcggccctcgccggcgccaacgccaagaacgtctccgtctccccgccgccgccgggatggggaacgggaggaggaggtggtgggggggaggaggtggtggcggcgaaggaggagtgggtgcaccagctcacgccgcttgatatggggctcggcgccggcgaagggtgggatgccgccgggaacgtgctgtccgacgcggcggcggcggcgacgtcggggatggcgccggacaacacgttcctccgctggatcattggcggcggcgaggacgcgtccgccgcgatggcaggggtcatggacccgccggtgctcgagctcgaccatggcggcggcggcggcggcgccgcgcccgccgcgttcgggccgttcgcgccgccgccggccatggaggacacgaagcccgtggtgccgttcgcggcggggcaccccccgccgaacttcctcctccaacaccaccaccaccacccgcagccgcacgcggcgttcttcggcgcccaccacccgtcgttcgacgcggcgccgccgccttccaagcggcaccacccgatggccgccgcgcctgcgccgaagctgcctccgttcccggcgggcgggttcgtccccgccctgaagccgaaggcggaggcggcgaacgacgaggccgccgctgcggtcgaacagctagccgaggcggcgaagctggccgaggccggcgacgccttcggcgcccgcgagatattggcgcggctcaattaccggctccccgccgcccccacggccgggacgccactgctccgctcagccttctacttcaaggaggctctgcgcctaacgctctcccccaccggcgacgccccagcgccatcggcgtcgacgccgtacgacgtggtcgtcaagctcggcgcctacaaggccttctcggaggtgtccccggtgctccagttcgcgcacctcacctgcgtccaggcggtgctcgacgagctcggcggcgccggatgcatccacgtgctggacttcgacatcggcatgggcgagcagtgggcgtcgctgatgcaggagctcgcgcagctccgcccggccgccgcgctcaaggtgaccgcattggtgtccccggcgtcgcaccacccgctcgagctgcagctcatccacgagaacctctccggcttcgccgccgagctcggcgtcttcttccacttcaccgtcttcaacatcgacaccctggaccccgccgagctcctcgccaacgccaccgcgggcgacgccgtggccgtgcacctccccgtcggccccgcccacgccgccgcgacgccggccgtgctccgcctcgtgaagcgcctcggcgccaaggtggtggtctccgtcgaccgcggctgcgaccgctccgacctccccttcgcggcgcacctcttccactccttccactccgccgtctacctcctcgagtccatcgacgccgtgggcacggacccggacaccgcgtccaagatcgagcggtacctcatccaccccgccatcgagcagtgcgtcgtggccagccaccgcgccgcctccgccatggacaaggcgccgccgccgccgtggcgcgcggcgttcgcggcggcggggttcgcgccggtgcaggcgacgacgttcgcggagtcgcaggcggagtcgctgctgagcaagcttggctctgcttctgcttctgcttgtgcagatgcagagtgccatgtcgcaatggtgttgtactgccctcttatcaaagaaagagagagaaaacgatggaatgtacacctggttattgtattagttgaactaaacacaccccaagctgaaaagaaccaaagggaagtaggaggatatgggggagagaaaaataaaatcctgtcagaatataatctgctgcctctgcctgtgctggagatgcaaaggaaggggggcaatcatggtgtaaagcgtccatgctttactgaaatggcggcaaagcatcttagggtaaggacaggcacatcaagaacagcagcagcaacattggatgggtacaccactttaacctgggactcagctccagaatggccatggcaccgcatgcacaaaccggataggttgagatgggctcactggagagtcactggagagccacagtgtgcagcaggagcagtagcaataggtcaggcaagtggccacactggagtacgggacactgcaggagcaaactggcaagagacctgcatagtagttacagagatggatgttaagcttgctgataaattcagaaaaaagtggtaccacagttcaaaacttcaaaaaagaaggtgcactgttggtttaattaagcaggacttgaaagttcaaaaccagggaggggaatcagaagccagtagacacaaaggcctccagatctcattcagacaggttcagatttcattgcggaagccaaataggaaatgcaagcatagtggccagactgtaaagttgatcaatgagaattgctattacctctccactaaaagaaacaacttaaagataaaagaggtcaactacatatgctatatttatgctgaagaattgcatccactcaaagtcatgttcagaaatacacaagcaaagatatgccaaatagatgtccaaaaatcctag

SEQ ID NO: 12845 - DNA, 1635 bp, Oryza sativa
  Clone ID: TFbOSC400135j.C1.o1.fg
atggctgatactccaacttcccgaatgattcatcccttcagcaatataccgagccaaaacctgaagcagttccagtattctgataatccacagcacccttgccacccttatagggcaccttcagacacccacgttgtgccacatcattatggcctaaagtcacattcaccggatgctggttatgaaagccaggctactcctaacaagtacacattggactcctctgaaggtgctggttgtatgagacatgattctccttccagtcaaagtttcacaaccagaagtggtagccctctatctcaggaagacagccactctgactcgactgatggatctcctgtaggcgcctcctgtgtcactgaggatcctaatgatctgaagcaaaaactgaaggatctcgaggccgttatgcttgggccagactcggaaatagtcaacagccttgagaattcggtggcaaaccaactttccttggagccggagaagtgggtgcgcatgatgggcattcctagaggcaacttgaaagagctactgattgcctgtgctagagctgtggaagagaagaatagctttgctattgatatgatgattccagagctgagaaaaatagtttcggtatctggtgagccacttgagaggttgggagcctacatggtagaagggcttgttgccaggcttgcctcctctggcatttcaatctacaaagctttgaaatgcaaggaaccaaagagctctgaccttctgtcttacatgcacttcctgtatgaggcctgtccctacttcaagtttgggtatatgtcggcaaatggtgctattgcagaggctgtcaagggagaagacaggattcatatcatcgacttccatatctctcaaggggctcagtggatctctctccttcaggcccttgcagccaggcctggtggaccaccaactgtaaggatcactggtattgatgactcagtgtcagcttacgcacgaggcggcgggctagagctggtcggaaggaggctgtcgcacatcgccagcctgtgcaaggtgccctttgaattccacccacttgctatctccggcagcaaggtggaggcagcacatctcggagtcatccccggggaagccctcgccgtgaacttcaccctggagctgcaccacattccagacgagtcggtgagcacggcgaaccaccgtgaccgcctcctaaggatggtgaagagcctgtcgccgaaggtactcaccctggtggagatggagtccaacacgaacacggcgccattcccgcagaggttcgcggagacgctggactactacaccgccatcttcgagtccatcgacctgacgctgccgagggacgacagggagaggatcaacatggagcagcactgcctcgcgagggagatcgtcaacctcatcgcgtgcgagggggaggagagggcggagcggtacgagcccttcggcaagtggaaggcgcgcctcaccatggccgggttcaggccgtcgccgctcagctcgctggtgaacgccaccatcaggacgctgctgcagagctactcggacaactacaagctcgccgagagggatggggcgctctacctcgggtggaagagcaggcccctggtggtctcgtcggcgtggcactag

SEQ ID NO: 12846 - DNA, 2253 bp, Oryza sativa
  Clone ID: TFbOSC401488j.C1.o12.fg
atgtccgcctcgcagaatttgcatcgtctccctgagttctgtgtgatccctgcaacagcatgctcgagggagccaggacttcctaggatcgtcataagatcaaatatgggctccgatgacaataaaagatttgatgattttcatgtcatcacaaacggaccaggaagtgatgcctattctaatgaggaatccatcaatctagattcctatattgcaccaagcacatccttctgtagcaaaatctacaacccccaattatacgtggagaaaggaaatgggacaacagattggtgccaaactagtggaggagactatcctgagaaaagcagcataaattcagatataactctcagctacatagataagatactgatgcaggaggacattgatgacagaggcaatgaagatactgctcttcaagctatggaggagcccttctatgaacttcttggagaaaagtatccggcattccctcagcaacaaccactttgtgtatgtgatcacctgcagaacctcagtgccaacactgacaagtctaatggtcacgcatgcaatacctggtctgtcactagaatgacaaacattagctcaagtatgaattccaatggcaactttcaagggtttcagtttccatggagtttgtcttccattactagagagacagaacagttcactcatcactcaaatagaatggttgttggtctaaaagtggatggcctttccatttccgaaaagcctagccaggacaattgttcacttcaaattgatgcgcattacatgaggaagcatccattgtttgaggttcatgatagaaaaagttatccgtgtattgaagatcttgatttgttagaaggaaggagcaacaagcagtatgctatttactatgatgaaccgattcgggatgagatgtttgacaacgttctactatgttctgatcataagcctctagatgaaggtgttagtttgagcagagccatgacaaacaattcaagcaagtcttcacaaattggacaaggaaaaacatcagctcggcgaaagacaacaggcaaaaggatacaaaagagagatgttgtggatctaagaaccctccttatcaattgtgcacaagcagtatctgtgagcaaccatagcctagctagtgacatactgaagataataagacaccatgcttcacctaccggggatgattcccaaaggctagcactttgcctagcgtattgccttgatgtacgattaacgggaactggaagtcagatataccacaagttcatcaccaaaaggaggaatgtaaaggatattctaaaggtccacattatagattttggcatttgctttggtttccaatggccatcactatttgaagaacttgcaaaaatagaagatggaccacctaagcttcggattactggtatagaattacctgagtcaggcttccgaccatatgctagaagtaataatattgggctgcgattagctgattatgctaaaacatttaacataccctttgaatatcagcatatatcatcaaataaatgggaagccctctctcctgaagattttaatattgagaaagatgaagttctcatagtcaattgcatttacagaataaaggatcttggtgatgagacaatatcaattaacagtgcaaggagtagggtgctcaatacaattagaatgatgaagcccaaagtttttgtccaaggagtgttgaatggatcttatggtgtccccttctttttaacacgtttcaaagaggtcatgtaccactacaattcattatttgatatgcttgataaaaatattccacgagataatgagacaagaatgataatagagagagatatctatcaatatattatgctaaatgtcattgcatgtgaaggaccagagaggattgagaggccagagagttacaagaagtggaaggtaagaaaccttaaggcaggactggtgcagcttccattgaatccagccatcgtcagagaaacacaagatatgagttcagacaaggctagtataagattatgtttagtatgttacggcaacatatacgattcctaccacgtatcaggtgatactcgtgaggtatcatgtgatacctatcaggtatcagatgacttctaccacgtatcaggtgatactcgtgagatatcatgtgatacctatcaggtattagacgatttctaccacgtatcgggtgatacttacgagatatcagatgatacctaccggatatcaggtgattcctactag

SEQ ID NO: 12847 - DNA, 1482 bp, Oryza sativa
  Clone ID: TFbOSC410358j.C1.o2.fg
atgcaagattctctaggcttgatgcagtttcttgatcatcaccagtatctatacagcagcagtagcagcaacctgccactgcagcagcctttgttgtcccatcaccaccgatttcttgaagccaatgagggttgcgccggcgaggacgactcgccggagttcgtcgagccgccggcggcggcggcggcggccgggacgttcgagcaacggccggagttaggagcgtgcaaggaggtgtactccgaggaaggcggcgcggcggaggagaggacgggcgtggcgatggcgggggccgacgtcgaacaggtggcggtggaggatgaggaggaggctcacggcgtgcggatgatcgcgctgctgatggagtgcgcggcggcgatgtcggtgggcaacctcgcgggcgccaacggggcgctgctcgagctgtcgcagatggcctcgccgtacgcggcgtcgtgcggcgagcggctcgtggcctacttcgccagggccatggcggcgcggctggtggggtcgtgggtcggcgtcgtggcgcccatggcgccgccgccgtcgtgcggggccatcaacgccgcgttccgggcgctgtacaacgtcgcgccgttcgcgcggctcgcctacctggcgtgcaaccaggccatcctcgaggcgttccacggcaagcgcctcgtccacattgtcgacctcgacgtcgtccccggcggcgcgctgcagtggctctcgctcctcccggcactggcggcgcggccgggaggcccgccggtgatccgcgtcaccggcttcggcatgtcggcgtcggtgctgcacgacaccggcaaccagctcgccgggctggcgaggaagctgtgcatgtttttcgagttctacgccgtcgcgaagcgaccgggagacgccgacgcggtcgccgacatgcccggaaggaggccgggggaggcggtggccgtgcactggctgcgccacgccatgtacgacgcggccggcgacgacggcgcctccatgcggctggtgcggtggctggagccggcggcggtgacgctcgtggagcaggagagagcacacggcggcggcggcggccacgggcgcttcctggacaggttcgtctccgcgctgcaccactactcggcggtgttcgacgccatgggcgcgtcgcggccggacggcgaggacgcgagcaggcatctggcggagcacggcgtgctcggcagggagatcgcgaacgtgctcgccgtcggcgggccggcgcggagcagcggccgggaggggcccgggagctggcgggaggtgctcgcccggcacgggttcgcgcacgccggcggcggcggcggcgggcgcgcgcagctggtggccgcggcgtgtccgggcgggctgggctacacggtggcgggagaccacgacggcacggtgcggctggggtggaagggcacgccgctctacgcggtgtccgcgtggacgtggtgctccccgcctcacgcgcgtgcttaa

SEQ ID NO: 12848 - DNA, 706 bp, Oryza sativa
  Clone ID: TFbOSC422725j.C1.o1.gp
cgtgttggagtcggagccggtgacatcgtagagggagtggcgcagccagtggacggcgacggcctcgcggcgcgtgacgcccagcttctccgggtccagattcccggccttgtcagccaccgggcagaactcgaacggcaatcccagcgtgtccgcgaagtccgacagcctcttccccgtcgcctccagcgcctccatggacgcccccagcccggtcagcctcaccctcggcggcccccccggccgcgacgccaggatgtggaacagccccggccattggagcccctgcatgatgtccaggtcgatgatgtgcaccctctcctccctctcgaacgcctcctggatcgcctggttcgccgtgaagtgcgagaacttcacgaacgggctgatcccgttgaacacctggaacgccgccgccacgcgcccgtggacccgcgcgcccgccggggacgggctcgggagcggcgcgtacagccccaggcacgagctcaccagccgcgccgacatggcctccgcgaagtaggccgccacgcgctgcgtcgaggtgccgaacggcgtggcgagctccgcgatctccagcagcgcgcggtgcgcctcgtccaggttgtccgcgttcaccgactccgcgcactggagcagcagcgtcagcaagtggaggccctcctcgtcgcgctgcttccgccgctgctcctccttacgctccttg

SEQ ID NO: 12849 - DNA, 2961 bp, Oryza sativa
  Clone ID: TFbOSC16404j.C1.o7.gm
atggagagcgagctaggagcgctgtcgcacgtgcggcaggcagcgggcgcgcccgccgaggcggccgcatccgaggcgactacgtcctcgcccaccatcgggatcatccaccagatcttgaacctgaacagggacaaccacttccaccccctgcgcacccaacaagagaacgaacccatcacaaaatcagcaccaccggcggcggcgcacatcgcagtctctcctatgggattgcctgttatggagcatcttggaagctcaagcattgtgcgtgggagaggcaagaacaagaggatttggacgtactttgaggatgaggagctgatcaaggcattgttcgagattgctttggatccaagctggaaatcagaagggggtttcaaaaatggatactgccaagttctagagaacgtgcttgctaagaagttgccaagttctggccttactgctgttccgcacatagagtcgagagtaagacactttaggaccaagtttggcgcaattgaagtgatgctaaccaaaagtggcttttcttgggatgacaatagaaagatgatacaatgtgagaaacaacaatacgatgatcattgcaggaaaaacaatgaggcaaagggtctatatggtgtagcattccctcactatgatacactagctgcaatttatggtaaagacattgctactggagaaggtgcagagggtcttggtgaggctgttgctaatatggagaaagaaattgttcaagatattcaagatgaagaagatgaggaggatgaagagagagtgtctagagaaacgcctcggcggagcatcgattcagctgcagctcgacggagcatcgattcagctgcagctcgacggagcatcgattcagccacacctcgacggagcattgattcaactgcttcaagctctaagaagaggaagaaagacagcaacaaactgaaaaataccttgtcaagtgacccttttatggatgtctttgccaatgttcaaggtgatctgagggatgttacaaagcatgtgggagcaatggtggcatctatgcaacgtgaagctgagatccaagagaaggcaatggctgaggaggacccactacaaaaaattcagaacgaagctattcttgagtgtcaaaagattggattgactggtactgaagttgtcaatgctgcagctgcttttgtaaaagtgccggctcaaatgagtatgcttctcgctcttccagagtctctcaggagggagtacgtactgaaaatacttgctgaggatctgtctgaatccgccgacgatgcggtcctagcatacatcaatcagtttcttcttgaagatgaggaagatgaatcttgtcctggcaccatcacatcggtggaggactctgccctcctcgccgtcgagaagccattcgttgacatcctcactgctagccaagaggcctgtcaagagaattcttggatagattcttgttgtgatttcacggggaatggaggattgcttgatacgttcacaaccacacatgccgcttgccagccagcgccttgtgaatttgagaaggagaagggggagtgtgctgttcataaaggccggaagaacccgcatgatgattgcctattgttcgaggaagagagcaggaggagcaagcagttggcagtgtctgaggaggagactgtcagagagatgtttgacaaggtgcttctgtgtaatggcgaatgcgagctccgggcaccactgccagctgaagcacggaactgcggggtgtacgtgaaaggatctggaaataagagaggccgaaagaaaggaaaatctggagcatctgcagaggatgatgcggttgatctcactaccctactcattcattgtgcccaggccgctgcaatcgatgatcaccggaactccaatgagttgctgaaacaaattaggcagcgttcttctgcatatggagatgccggtcagaggttagcacattgttttgctaatgcgttggaggctcggctagctggcactggcagcaacatttaccgttcacttgctgccaagcgaacttctgtttatgacatattgaatgcattcaagctgtatgttacagcatgcccgttcaagaaaatatcgaacttcttctcgatcgaagccatcttgaacgcatccaagggtatgacaaggttgcacattgttgactatggtatacagtatggattccagtggccaatcttcttccagcggatctcgaagagacctggtggccctccaagtgttcgaatcaccggtgttgacttaccacagccgggattccgccctgcacaactcattgaggcgacgggccgtcggttgcatgactatgcccgtatgttcaatgttccatttgaataccatgctattgctgccaagtgggacactatccgtgtcgaagatcttaagatagacaaagacaaggatgaacttcttgttgttaactgccttttccggatgagaaacatgatggacgaaatggtgacagatgacagcccaagaatgcaggttctgaagacaataagaaagatgaatccaaatttgttcatccatggcgttgtcaatggcacctacaatgcgcccttcttcgtgacacgattcaaggaggctttgttctactactcttcactttttgatatgcttgaaacaactgcttcacgggtcgacgaaaacaggctgctgatagaaagagatctcttcggccgggaagctcttaatgtggttgcttgtgagggcactgagagagtagaaagaccagagacgtacaagcaatggcaggtgaggaacatcagggcaggcttcaagcagctaccactgaaccaagagacggtgaagaaggcaagatacaaggtgaagaaatcctaccacagggatttcctagttgacgaagataacaaatggatgctgcaaggttggaaggggcgtatcatctttgctctttcagcatgggaaccaaactag

SEQ ID NO: 12850 - DNA, 3432 bp, Oryza sativa
  Clone ID: TFbOSC400939j.C1.o12.gm
atggagagcgagctaggagcgctgtcgcacgtgcggcaggcagcgggcgcgcccgccgaggcggccgcatccgaggcgactacgtcctcgcccaccatcgggatcatccaccagatcttgaacctgaacagggacaaccacttccaccccctgcgcacccaacaagagaacgaacccatcacaaaatcagcaccaccggcggcggcgcacatcgcagtctctcctatgggattgcctgatcgagcgccgccgcagcttctcctccacatcgcgcgcgtcgccatcgccgccccctctccctgtgcgcgtcgccggcgcctcctcctcaccctgtgcgcatcgccggcgcagccccctcgccccgcgcgtgtccccgcgcctccccatcgtcccgcgtgtcgccggcgccgtcccctcaccccccgcgcatcgccgacgccgccgtcttgcgctcctccaccaccgccgtcttccgatgtggatcttgaccggaagaactccgggaacaagggcgaggctgtgaagcagggggctggtgccatcaaccacatcggacttccgtcgttgctgtcatctatcaatcacctcgccgttatggagcatcttggaagctcaagcattgtgcgtgggagaggcaagaacaagaggatttggacgtactttgaggatgaggagctgatcaaggcattgttcgagattgctttggatccaagctggaaatcagaagggggtttcaaaaatggatactgccaagttctagagaacgtgcttgctaagaagttgccaagttctggccttactgctgttccgcacatagagtcgagaaaaaacaatgaggcaaagggtctatatggtgtagcattccctcactatgatacactagctgcaatttatggtaaagacattgctactggagaaggtgcagagggtcttggtgaggctgttgctaatatggagaaagaaattgttcaagatattcaagatgaagaagatgaggaggatgaagagagagtgtctagagaaacgcctcggcggagcatcgattcagctgcagctcgacggagcatcgattcagctgcagctcgacggagcatcgattcagccacacctcgacggagcattgattcaactgcttcaagctctaagaagaggaagaaagacagcaacaaactgaaaaataccttgtcaagtgacccttttatggatgtctttgccaatgttcaaggtgatctgagggatgttacaaagcatgtgggagcaatggtggcatctatgcaacgtgaagctgagatccaagagaaggcaatggctgaggaggacccactacaaaaaattcagaacgaagctattcttgagtgtcaaaagattggattgactggtactgaagttgtcaatgctgcagctgcttttgtaaaagtgccggctcaaatgagtatgcttctcgctcttccagagtctctcaggagggagtacgtactgaaaatacttgctgggtggatcttgttcgaagattcaagagtcatgttggattctggttcttatgatgatgttgactatggggatttgttctccatccccaatccacctgcgcctcacttgctcaatttccccctccagttcttcccttccaacggattcatcagttctgctgatgattcccatagatcaccagctggtatgtttggctcgaccccaagccccacatcaaccacaaccgagttggaaaattcagaggatctgtctgaatccgccgacgatgcggtcctagcatacatcaatcagtttcttcttgaagatgaggaagatgaatcttgtcctggcaccatcacatcggtggaggactctgccctcctcgccgtcgagaagccattcgttgacatcctcactgctagccaagaggcctgtcaagagaattcttggatagattcttgttgtgatttcacggggaatggaggattgcttgatacgttcacaaccacacatgccgcttgccagccagcgccttgtgaatttgagaaggagaagggggagtgtgctgttcataaaggccggaagaacccgcatgatgattgcctattgttcgaggaagagagcaggaggagcaagcagttggcagtgtctgaggaggagactgtcagagagatgtttgacaaggtgcttctgtgtaatggcgaatgcgagctccgggcaccactgccagctgaagcacggaactgcggggtgtacgtgaaaggatctggaaataagagaggccgaaagaaaggaaaatctggagcatctgcagaggatgatgcggttgatctcactaccctactcattcattgtgcccaggccgctgcaatcgatgatcaccggaactccaatgagttgctgaaacaaattaggcagcgttcttctgcatatggagatgccggtcagaggttagcacattgttttgctaatgcgttggaggctcggctagctggcactggcagcaacatttaccgttcacttgctgccaagcgaacttctgtttatgacatattgaatgcattcaagctgtatgttacagcatgcccgttcaagaaaatatcgaacttcttctcgatcgaagccatcttgaacgcatccaagggtatgacaaggttgcacattgttgactatggtatacagtatggattccagtggccaatcttcttccagcggatctcgaagagacctggtggccctccaagtgttcgaatcaccggtgttgacttaccacagccgggattccgccctgcacaactcattgaggcgacgggccgtcggttgcatgactatgcccgtatgttcaatgttccatttgaataccatgctattgctgccaagtgggacactatccgtgtcgaagatcttaagatagacaaagacaaggatgaacttcttgttgttaactgccttttccggatgagaaacatgatggacgaaatggtgacagatgacagcccaagaatgcaggttctgaagacaataagaaagatgaatccaaatttgttcatccatggcgttgtcaatggcacctacaatgcgcccttcttcgtgacacgattcaaggaggctttgttctactactcttcactttttgatatgcttgaaacaactgcttcacgggtcgacgaaaacaggctgctgatagaaagagatctcttcggccgggaagctcttaatgtggttgcttgtgagggcactgagagagtagaaagaccagagacgtacaagcaatggcaggtgaggaacatcagggcaggcttcaagcagctaccactgaaccaagagacggtgaagaaggcaagatacaaggtgaagaaatcctaccacagggatttcctagttgacgaagataacaaatggatgctgcaaggttggaaggggcgtatcatctttgctctttcagcatgggaaccaaactag

SEQ ID NO: 12851 - DNA, 1144 bp, Oryza sativa
  Clone ID: TFbOSC101577j.C1.o27.gp
gcctaaaattctttttttttwaagaaaaaaaagtacacatccacatatatccccaacaaaacagatcgaaatgttgtaaacctataaatgaaataaaaagttactaaaacagagactactgaaactaaaaaggcactactgattttatctttaaaagctgatagtgctggaggaatcattgaaagagatcatcacggtccttcactaggtcaggccgcgatttccataaccctggtgggttatactccgtatagaacgaattttacacaatcgagaaggtttggcatctgcaaaatttaataccatctgtttgtcgcagaaatttactaacactagatgtttcgacatgtatttgtaacaaacctatggtacattttttatcatggcatcaaactgcttagaaaccacataattgagcattgcctgatcaatcagttggtcctaaacagcattttatgcacaaatctaggcgattgagatgctattcatttaagcaaaaaaaaaaaaagtaaccactgtgtgtgaataattcagaagataccgctagtcatgctgtctcttatagcataaagtatgcacagaaaatctatatttatgaatataccattatcgagatactattatttggaaaaggtaaagcagtcaaaattttacctggttttgcatgagaacaaaatgagaaagcaacaatcggcttctgttcaatctttcactgtagtatttccatagaaatccatcttgaaatgaagtggaaggcccaagctttcactgtgagcaaaacagaaatttaccacttcttcgaattttcagcaatcagaaagtgagcaggcaaccaggcacagctcacagaccataccctaattgttattaggcttccatgtagatatggcatagattatccttcctttccacccttgaaggagccattcactgtcttcatcaatgacaaagtctttgtgatagatgtctttcactttgtccttggctttcagcacaatgtcttggtttaatggagactggacaaatccagctctcagattcctcacttgccactgtttgtatgtctccggtctctcgaccctgtctgagccttcacatgcaatcacattgagtgcttcccggccaaatagatctctctcaatta

SEQ ID NO: 12852 - DNA, 2148 bp, Oryza sativa
  Clone ID: TFbOSC410945j.C1.o7.fg
atgagggcggcgctgttcggtgccgagaggagcggggtagtggacctcggcggcatcggcggcggtaacagggggctgttttggccggcggggaaggggggcctggtggtggtggagccgaggtcggtgctggactgcacgcgcagcccgagcccgcgcaattccacctcgacgctgtcgtcgtcccagggcggcggcggggcggactcgaccggtgtggcggcggtttcggagagcagcgccgccgccgccgaagccaccaaatggggagcccccggggaacacgggggcggcggtggcggcggtggcggcggtgggaaggaggactggagcagcggctgtgagttgcccccgataccggggaccctggatgtggggctcgtcggaggagagggctgggacaccatgctcggcaacgccgccgccgccgcagccgggcaggatcagtcgttcttgaactggatcattggggccgccggcgacctggagcagcccgggccgccgcttcttgacaatgcgggattcgggatcccggccgtcgacccgctgggcttctctctggaccactccctcagcggcgtcgcctccgacctgtcgtcctccggtgcgcacaccgcaaccggcggcgcgggtggcggcaaggcttccctaggattcggtctcttctcgccggaagccacctctctcgagcagccgccgccgccgatgctgttccacgaaggtatcgacacgaagccccctcttctgggcgcgcagccgccgggcctcctcaaccactatcaccaccagccgccgaatcccgccgcaaccttgttcatgcctcacccatccttccccgaacacaatcaccagtcgccactcctccagccaccgcccaaacgccaccactccatgcctgatgacatctacctcgcccgtaaccagctaccgcctgcggcggcggcggcgcagggtctcccgttttcaccactacatgcctcggttccgttccagctccagccttcgccgccaccgattcgcggggcgatgaagacgacggctgcggaggccgcgcagcagcagttgctggacgaactggcagcggcggcaaaggcaaccgaggctggcaattccgtcggcgcgcgcgagatattggcgcggctcaatcaacagctcccccctcttgggaagcccttcctccgctccgcctcctacctcagggaggccctcctcctcgcactcgctgacagccaccatggcgtctccagcgtcaccacgccgctcgacgttgccctcaagctcgcggcctacaagtcgttctccgacctgtcgcccgtgctgcagtttgcaaacttcacggcaactcaggcacttcttgatgaaattggtggcaccgcaacttcctgcatacatgtcattgacttcgatctcggtgttggcggtcagtgggcttccttcttgcaggagcttgcgcaccgccgtgctgctggaggtgtgaccttgccattgttgaagctaacagctttcgtgtcgactgcttcccaccatccattggagctgcaccttacccaggataacctttctcagtttgccgcagaccttggaattccttttgagttcaatgccgtcagtcttgatgcattcaatcctggggagcttatttcttcaactggtgatgaagttgtggctgttagcctccctgttggttgctccgctcgtgcaccaccgctgccagcaatccttcgtttggtgaagcagcttagtccgaagattgtggtggctattgaccatggagctgatcgtgcagacctttcattctcgcagcacttcctgaattgtttccagtcttgcgtgttcctccttgactcacttgatgctgctggtattgatgctgattctgcctgcaagattgagaggtttctgattcagcctagagttcatgatatggtgcttggacggcacaaggtacacaaagcaatagcatggaggagtgtttttgcagcagctgggtttaagcctgttccacccagcaaccttgccgaggcacaggcagactgcctcctgaagcgagtgcaggtccgaggattccatgtggagaagtgcggagctgctctcacgctctactggcagcgtggtgagcttgtctccatatcatcatggcggtgctga

SEQ ID NO: 12853 - DNA, 1683 bp, Oryza sativa
  Clone ID: TFbOSC17536j.C1.o2.fg
atggtagcgcaagccgccaccgccgccgccaccaccaccgccgctgccaccaccgccgccgtgccgatgacgaatttccagctcttcgggtccatggtgccggttccggtggcgtccatggcgacggctactgctccggcagctgtggcagcagccgataatggtggccatggatcgtcgtcggcgtcacagaacgcctctggctcaggcgaaggacaaggcggcagcatgtccttgtccttgcaactgaggccgctcggctcaacgccgacggcggctgtggctgtctcggtgccacccatggctgcggcgccgatgatggctggtccagcagcagcagcgccagcgccggcgccgccgttggcgacgatggccgttgcccagaacgcctcgctcgcggcggtggcgagcgcgctggcggcgcacaggaggaaccaggccacgcaccgctccgccgcgctgcacggccacctccggcgctgcgccgaggcgctggccgcgtcgcggccggcggacgcggacgccgagctcgccagcatcgctcgcatggcgtcctcggacggcgacgccgtgcagcgcgtggccgcggcgttcgccgaggcgatggcccgggtggtgatccggccctggaggggcgtgtccgccgcgctcttcccctccgacgccggcgccgccggcgacgccctcaccgcgtgggaggccgagttcgcgcggcagagcttcctcaacctgtgcccgctgctccacctcgccgccgtcgccgtgaacgagatcatcctcgagacgacgaggaacgacaagttcatccacatcgtcgacctcggcggcatccaccacgcccactgggtggagctcctccagggcctcgccacgcgccgcgccgcggtccgcccatgcctccgcctcaccatcgtccacgagcacaagcacttcctcggccaggcggcgcaggtcctcgccgccgagtccgaccgccacggcgtgccgctcgacctccacatcgtcgagtccagcgtcgaggcgctcaagctggacgccctcggggtgaggagcgaccacgccgtggtcatcgtctccacgctccagctccaccgcctcgtcggcgccggcatcctcagcaccacggcgccgccgtcgccggcggcggcggcggcggccagcatgatcacctccccgctgccgccggcgaacatgtcgtcgaaggtggacaggctcctccgcggcttccacctgctgtcgccgagggccatcatcctgaccgagaacgaggccaaccacttcgtgccgtcgttcacggaccgcttcgcctcggcgctgccctactacgagcagctcttcgccgccatggaggaggcgggcgccgccacggtggagcggaaggcggcggagaggtacctcctcagggaggagatcaaggacgttattgcatgtgatcacgacgggccgcgctgggcgcggcacgagacgctggggaggtgggtcgtccggatgggcgccgccgggttcgcgctcgcgccggcgatcaccgtggtgacggcggcggggcgggtgagggcggtggcggcgcggcttcccggaggaggggatgagaggaggtatggggtgacggagggcggcgggtggctcatcctcaacagggaggagaagccaatgttctgcgtctctgcgtggaggaggcagtga

SEQ ID NO: 12854 - DNA, 352 bp, Oryza sativa
  Clone ID: TFbOSC34032j.C1.o48.np
atgcctctatactttatttacatgcaagattcaacacacacaagtacacaactactcaaggtagtagccagaaggccaacacatcttacacgtgtaagaatagaacaaaacggggtgcagagcggtgtgcacgtagcaggacgccctgcatacgtgtgcgtgattgggtggcgcaaccgaaaacgacctgatccaatgcaaacgcaacgtagcaatcacgattgcccccacggaatcgcacatcatcactagccggataattactttcgtttacggcagtatcaacactcgcacccacttatgtgccgctgaattatacatgggacccactgctcgtggggcctacacagtg

SEQ ID NO: 12855 - DNA, 828 bp, Oryza sativa
  Clone ID: TFbOSC400032j.C1.o8.fg
atggagatggacaaattcagctcgtcgtatcagccgtcgtggccaccagcgcaggccaccgtcgacgtcgtcgggtcggtggagacgccggcgcgccgggcgttccagcgcgtcgcgtcgttcttcgtgcaggagctcctggaccggcgagcatccgccggcgctgggccctgcgagcacggcgttctgcatcccgcagtcgtcgtgcgcgaggcgtacgcggaggggttagggatgtacctcgagttcagaggaatcaaccgtggcctcgagagcctccacatcgacgacctcggcgtcgacgccgacgaggccgtcgccatcaacagtgtcctggagctccactccgtggtgaaggagagccgcggggcgctcaactcggtgctccagaccatccgcaagctgtcgcccagggcgttcgtgctcgtcgagcaggacgccggccacaacgcgccattcttcctcggccggttcatggaggcgctgcactactacgccgcgctgttcgacgcgctcgacgcggcgctcccgcgctacgacgcgcggcgggcgcgcgtcgagcagttccacttcggcgcggagatccgcaacgtggtcgggtgcgagggcgcggcgcgcgtggagcggcacgagcgcgcggaccagtggcgccgccgcatgagccgcgcggggttccagtcggtgccgatcaagatggcggccaaggcgcgggagtggctggacgagaacgccggtggcgacgggtacacggtggcggacgagaaggtctgcctggttcttggctggaaggggaagccggtcatcgccgcctcgtgctggaaatgctag

SEQ ID NO: 12856 - DNA, 1023 bp, Oryza sativa
  Clone ID: TFbOSC272j.C1.o1.gp
tcatgatggtcgaggcaggtgtgatcagcatcgccatgctgagacggatacaagctcgccacgctgccaatagagtgcaaggcctgctccacgcttctccacatggaagcctcggacctgcacccgcttcaagaggcagtcagcctgtgcctccgcaaggttgctgagtggttgaggtgcaaaccctgctgatgttagcactgtccgccaagcgatcgctttgtcagctctacgccgcccaagaactgcatcctccactctgggctgaatcagaaacctctcgatcttactgacagcatccgcatcagtgccagcagcatcaagtgattcaagaagacatagacaagactgtaagcaattcaagaagtgttgggaaaatgggaggtcgctccgatcactgccatagtcaatagcaaccacaatcttaggagcaagctgtttcaccaactgaagcatagctgggagtggagtgcgtgctgagcaaccaactgggaggcttactgcaacaacctcatcagctgtaggagcaatgagttccataggatcaaatgcgtcgagattaatagcattgaactcaaatggaataccaagatcagcagcaaactgtgagaggttatcctgagtaagatgcagctcaagcgggtggtgggaggcggctgagacgaaggctgtgagcttcaacatcggcaaggacacaccgccagagccacagcggtgagcaagctcctgcaagaacgaagcccactggccgccgacaccgaggtcgaaatcaatgacgcggatacaagacgcggttgtgctggcgatctcatccagaagcgcctgagttaccgtgaagttggcaaactggagcacgggggagaggtcggagaaggatttgtaagcggtgagcttcagggcgacgtcgagcggagacgtgagacgggtggcggcgtggtggccgtcggcgagcgcgaggaggagggcgtcctttaggtaggaggcggagcggaggaaaggcttcccaattgggggaagctgctg

SEQ ID NO: 12857 - DNA, 488 bp, Oryza sativa
  Clone ID: TFbOSC401887j.C1.o14.gp
gccatgcggagacggagaagagggcgcgatcttgccagcagaggaagaagttgcccttctcctcccggaccttgaagccgtcgcagccgaggccctgcgccacccgccgcgcctggagcagcgcgtagtagctgagcgggacgcggccgaagccggcgccctccagccgccgcgcccaccggttccagccgctcgtgccgctcccgccgctcgccgccgtcgcacgccacgatgttcttgatctcctccccgagcagccaccgttccacgcgcgcgcgctccaccgacccgcgcgccgcccccacctccaggcagtcgaacagcgccgcgtagtagttgagcgcctccacgaacctctccgtcagccccgccgcgttgtggctcgcctcctgctccgccaccaccatcaccttcggcgacagcccccacagcgcgcccaggaacgcgtccgcgcgcgacgtcgacggcgacagcccggactccgggct

SEQ ID NO: 12858 - DNA, 1272 bp, Oryza sativa
  Clone ID: TFbOSC400659j.C1.o9.fg
atgctcggctcatcaccagctcgcgatcgaggcggcggcgacgacgccgaggcctccgagcagccgcagccgcagccgcagccgccattgtcgccgcgcgcggggggcggcgaggcgagggggctcgtgctcgcgtgcgccgacctcgtccaccggggggacctcgacggggcgcgccgcgtcgccgaagccgtgctcgccgccgccgacccacgcggcgaggctggcgaccgcctcgcccaccacttcgcccgcgcgctcctcgctctccgcggaggaggcaagggtggtcatggcggcggcggcggtggcgtggtgccgtcgtcggcggcgtacctggcgtacatcaagatcgcgccgttcctgcggttcgcgcacctgacggcgaaccaggcgatcctggaggcggcggcggcggacgccggcggcgcgcaccggcgcgtgctgcacatcgtcgacctcgacgcggcgcacggcgtgcagtggccgccgctcctgcaggccatcgccgaccgcgccgaccccgccgtcggcccgccgcccgaggtgaggctcaccggcgccggcaccgaccgcgacgtgctcctccgcaccggcgaccgcctccgcgccttctcgagctccctcaacctccccttccgcttccaccccctcatactcccctgcaccgccgagctcgccgccgacccgaccgccgccctggagttgcacccggacgagacgctggccgtcaactgcgtgctgttccttcacaagctcggcggcgacggtgagctcgccgccttcctcaggtgggtcaagtccatgaaccccgccgtggtgaccatcgccgagagagaaggagtcctcggaggtgacgtcgacgacgacaacgtcccggacgagctgccgcggcgggtggcggcggcgatggactactactcgtcggtgttcgacgcgctggaggccacggtgccgccggcgagcgcggaccggctggcggtggagcaggagatcctcagccgggagatcgacgcggcggtggcggcgcccggcgccggcggcggcgggcgcgctcgcgacttcgacgcgtgggcgtccgccgcgcgcgccgcgggcctcgcgccgcgaccgctgagcgcgttcgctgcgtcgcaggcgcggctgctgctgcggctgcactacccgtcggaggggtacaaggccgacgacgacggcggccgcggcgcctgcttcctccggtggcagcagcggccgctcatgtcggtgtcgtcgtggcagccgcagccatag

SEQ ID NO: 12859 - DNA, 1812 bp, Oryza sativa
  Clone ID: TFbOSC900388j.C1.o10.fg
atggataccctcttcaggttggttagcctccaccaccatcaccaccaccagcacgcggcctcaccgtcgccgccggaccagccgcacaagtcgtacccctcctcgcgagggagcaccagctccccctcctcccaccacacccacaaccacacctactaccaccactcccactcccactacaacaataatagcaacaccaactactattaccagggtggtggaggcggcggcggagggtactactacgcggaggagcagcagccggcggcgtacctagaagaatgcggcaacggccaccagttttacatggatgaagacttctcctcctcgtcttcctcccgccagttccactcgggaacgggcgcgccgtcgtcggcgccggtgcctcctcctccgtcggcgacgacgtcgtccgcgggcgggcacgggctgtttgaggcggcggacttctcgttcccgcaggttgatatcagcctcgacttcggcggctctccggccgttccgtcgtcgtccggtgctggcgccggcgccggggcagcgccgtcgtcgtcggggaggtgggcggcgcagctgctgatggagtgcgcgcgcgcggtggcggggcgcgacagccagcgcgtgcagcagctcatgtggatgctcaacgagctggcctcgccgtacggcgacgtcgaccagaagctggcctcctacttcctgcagggcctcttcgcgcggctcaccacctccggcccgcgcacgctgcggacgctcgccaccgcgtcggaccggaacgcgtcgttcgactccacgcgccgcacggcgctcaagttccaggagctcagcccgtggacgccgttcgggcacgtcgccgccaacggcgccatactcgagtcgttcctggaggccgcggcggcgggcgccgccgcctcctcctcctcgtcgtcttcatcgtcgacgccgccgacgcggctgcacatcctcgacctgagcaacacgttctgcacgcagtggccgaccctcctggaggcgctggccacccggtcctcggacgacacgccgcacctgtccatcaccaccgtcgtgcccacggcggcgccgtcggcggccgcgcagcgcgtgatgcgggagatcgggcagcgcctcgagaagttcgcgcggctgatgggcgtcccgttcagcttccgcgccgtgcaccactcgggggacctggccgacctcgacctcgccgcgctggacctccgcgagggcggcgccaccgccgcgctcgccgtcaactgcgtaaacgcgctgcgcggggtcgcgcgggggcgcgacgcgttcgtggcgtcgctccggcgcctggagccgcgcgtggtcaccgtcgtggaggaggaggccgacctggcggcgccggaggcggacgcgtcgtcggaggccgacaccgacgccgcgttcgtcaaggtgttcggcgagggcctccgcttcttctcggcgtacatggactcgctggaggagagcttccccaagacaagcaacgagaggctgtcactggagagggcggtcggccgtgccatcgtcgacctcgtgtcatgcccggcctcccagtccgccgagcgccgggagaccgccgcgtcgtgggcgcggcgcatgcggtcggcggggttctcgccggcggcattcagcgaggacgtcgccgacgacgtgcggtcgcttctccggcggtacaaggagggctggtcgatgcgggacgccggcggtgccacggacgacgccgccggcgccgctgctgccggagcgttccttgcgtggaaggagcagcctgtcgtgtgggcgagcgcgtggaagccatga

SEQ ID NO: 12860 - DNA, 342 bp, Oryza sativa
  Clone ID: TFbOSC401583j.C1.o68.gp
gaaataagctgacctgaagaggaagtatagtgtcagcagcaaagagcgtcacctttgccagcttaacatcattatgggagctcaagacacactggacaaaaaggttaggctcgcagctgtggtttataaaccttgcaaagttgccaatagagccagcatcaatgcaatactctggtgcaggtggatctgaatcattctccgcatgaagagacggcagatgcatgtcagagccagcccttttctgcagaaataaaggtagctggtagtcaggaaattgtgcaaagcagcatttattgatatctcaacatgaatgaaaacataagtatttacagtacttcactt

SEQ ID NO: 12861 - DNA, 1201 bp, Oryza sativa
  Clone ID: TFbOSC21512j.C1.o1.fg
atgacctttgaagcacttaggcgtagacatctgcaactggatgaaatacaagagactagcaaacgggctgacctgaaggctggcgccatcatgatggcaagcaatatcagggctaatgtgggaaaaagggtaggacttgttcctggagttgaaataggggatattttctatttccggatggagctatgtatcatcgggttgcatgctcctagtatgggtggcattgattatatgagtgctaaatttggaagcgatgaggattctgtggcaatatgtattgttgcagcaggtggctatgagaatgtggatgatgacacagatacactggtgtacagtggttcaggtggcaatagtaggaacagtgaggagaggcatgatcaaaagcttgagagaggtaaccttgctctggagaggagcctgcataggaagaacgagatcagggttgtgcggggcttcagggatccattttgcctgactggaaaaatctacatatatgatggcctctataagattcaggagtcctggaaggagagaacaaagtctggtatcaattgcttcaagtacaaactgctgcgtgagcctggacagcctgatggagctgcattgtggaagatgactcaaggatggatagacaatccagcaagcagaggcagggttatattacctgatctatcatctgcggctgaagctctcccagtttgccttgtcaatgaggtagaccatgagaaaggacctgggcatttcacctatgccagtcaagtcaaatacttgaggcccctcagttctatgaaacccttacagggttgcggatgccagagtgtttgcctgcctggtgatcccaactgtgcttgtggacaacataacggaggtgacttaccttacagctcatcaggacttttggcgtgccgcaagccaataatttatgaatgcggtgatgcttgccattgtactacgaattgccggaacagagtgacccaaaaaggggtcagatttcactttgaggtcttccggactgcaaatcgaggctggggtcttcgctgctgggatcccattcgtgctggtgcatttatctgtgagtatactggtgaggtcattgatgagctcaaagttaatctggatgacagtgaagatgattacatttttcagactgtatgtcctggtgagaagacattaaaattcaactttggtcctgaattgattg

SEQ ID NO: 12862 - DNA, 1146 bp, Oryza sativa
  Clone ID: TFbOSC401607j.C1.o14.fg
atggaaagtaaccaacacaaagcatcagatccacaggattctatggttcatttagatctggatgaagataagataatggtgacatcagcattaccatgtccttcaatgtccgtgggaaaatcggttatgaggaagaggggaagaccaagcaggcatgcacgaggaacttcgttgtcttctgttaccccagaagataatcctagggaagctgttgatgatatactcatgacatttggtggactacatcggaggatcatgcagttgatagatgtgaaaatggcttcaaaacagcttgtcttccaagcattgaacctcatgagaaaagttggatatcatgttaacaaggacaagagggttggagaggtcccaggagttaaaattggtgacatattctactctagaattgagatgctcttggtagggctacatagtaacatcaatagaggaattgaattcatgtctggtgcttttattaataaggaagataagatagctacatgcattgtgtcatctggaatgtatgagaatggtgatgatgacccatatactttggtatataatggccaaggcaaagtccaccataagcttgagagagaaatagctcgtgtttgtgttgtaaacaacattgatagtgaggatgctcctaacaactttacctattcaactaaacttgataatgggaatcatatggtttcagcaaacaagatgtgtgtctgcaaatgcacaagctcatgccttggtgaagacaattgctcttgtttgaaaacaaatggcagctatttaccttacaactcttcaggaatacttgtttgtcgaaagactatgatatatgagtgcaatgattcatgtgcttgcacaattaattgctcgaaccgagtggtacagaggggttcctatctacactttgaagtgttcaagacgatggatcgaggttggggccttcgcagttgggatcccattccggcgggtgcatttgtatgtgaatatgttggtgtagttattgacaaagatagcttagttgaagaagatgaatacatatttgaggttactagaccagagcataatttaaaatggaactatttaccagaattgataggtgaaccttctttctatgacatgaatgatacattcaagaagttgtgttaa

SEQ ID NO: 12863 - DNA, 1611 bp, Oryza sativa
  Clone ID: TFbOSC401896j.C1.o25.fg
atggcgacgcccggcctcgacgacgactcgctgcagcagctgcgcagccgcgcgacgcagctgctgctcaaggagaactggacggagtacatcgccgtgtgctccctcatcatcgaggcgttcgacgccgccgccgcctgcaaagaccgccgcgtcctctgctccaccctcgcccaccgcgccgacgcccgcgcccgcctcggcgacgcccccggcgcgctcgccgactgcgacgccgcgctggcggccgacccggcgcaccccggggcgttgctgtccaagggcgccgtcctgcgcggcctcggccggtactcgcgcgccgccgagtgcttccgcgcggcgctcgccgtgagcggcaccgacgaggtccgggagatggtcgagcagtgtaagcgcctggacgcgcaggcgaggagcggcgcggtggatctgtcggagtgggtgctcgccgggttctccgggaagtgcccagacctcgcggagcacgtcggggcggtggaggtgcgccggtccgcgcacggcggccgaggggtgttcgcggtgaagaacatcgaggcgggagctaacctggtgatctccaaggcggtggcgatcggaaggggagtaattccggacgccgccgatagcggcgagaagatggtggtgtggaaggacctcgtcgacaaggtgctcgacgccgccgagaagtgcccgaggacggcatctctcatctacactctctccaccggcgaggagccagaagacgagctccccatcccggacatggcacatttcaagcaagaaacggaggagctcgatgacggcacggccatggcgccgaaggcatctcttgatgtggacaagatcttgaaagtgctcgacgtcaattgcttgaccgaggacgcagcgccatccgccaatctgctcggcagcaatggcgtcgtcaactgcggcgtcgggctgtggatcttgccggcgttcatcaaccactcgtgccaccccaacgcccggcgcacccacgtcggcgaccacgccattgtccacgcgtcaagggacatcaaagccggggaggagatcacattcgcctacttcgacgtgctcaccccggcgagcaagcgcagggaggcagcgagagcgtggggcctcgaatgccaatgcgatcggtgcaggttcgaagccagcgacgccattgttgggcaagaactcacaaaacttgagaacgaattggtcaatggccgaggaggagacatgggagcactggtggtgaggctggaggagaggatgagaaagtccatggtgaaggagaggaggaaggcgttcttgcgcgcgtcgttctggagcgcgtactccgcgctgttcgactccgacaagctggtgaggaagtgggggaggcgcgtccccggtgaggccgccgtcgcagagagcgtcgccggcgcaatcggcgggaacgagagcgtgctgagggcaatgctgaggggtgccgacaatggcaacggctgcggcaatcggctcgaggtggaagacaaggtggtgaggattgggagggctacctatggcagggtagtgaagaggcaggcaatgagagctctcttcagacttacattggatgctgacagtaacaaaagcctgtag

SEQ ID NO: 12864 - DNA, 1230 bp, Oryza sativa
  Clone ID: TFbOSC9931j.C1.o1.fg
atggcgggccctcccggcccggcaccgggcacctcctcctcctcctcctccctgcccagccgccgccgccgccgcccccctccgcgcctcggccgacgccgcggcggcgatgatcaacagcccccgcatcctccaaaggcctcgtcggaggctctcccctgcgcggcctccccgcccgcgcggtgccgcggcggtgatcaccagcccccgcatcctcccgaggccgcgttagaggctctccgcggcgcggcctcccctcccgcgcggcgccgcggcggtgatctacatccctcgcatcctcccgaggccgcgtcggaggctctccgcggcgcggcctcccctcccgagcggcgccgcggcggtgatcgacagccctcgcatcctaccgaggccgcgtcggaggctccctccggctcggcctccccgcccgcgcggcgccgcggcggcgatcaacagcctccgcccgctgtggcggtggcggtgactagtgaaggcggcgtgggtccccgccgctcgttccgcatcagcctgcggcaccgcgtgcgtgtggtcccgtgggtgaagccacccgtggcgaggaagcccaaggaccccgcgaagcccccgcgcccgtcgatcgaggcgctcgcggcggaatgggcgaaggagaaggcagcttccggggcccccgaggaggagtgcgtcctgcctttcctccagaaagatgcgcctaagaagctcgacattgtaaaagttcttggactagatggatttggatatatggatacagtgatattgagcttgaagagttacaggaaaaacattcccattacagtaggaaatttcgtgattgtgatgcaaagctgcataaggcttgttctgaaaaaggtgatggatgctgtcctcgacatgatgcaggtccaacagatggaagccttccggcgcttacccctcccacacactttccaagagttcaacattgaccctataaagaaagaggaattggacaatgggacagaaccacctccatataaaattaagataattcctacaggtctctattggttagctgctctcgggcttgtcactgctcagatgagtgcactaacaaaccatttcgccgacagaaaaagattgagatcgttaagtggaatacttctgcagacacaatattgtggatggggatctagagcactggaagccattgagaaagatgattttgtcatagaatttgttggagaagaacaatag

SEQ ID NO: 12865 - DNA, 1182 bp, Oryza sativa
  Clone ID: TFbOSC8416j.C1.o1.fg
gtcctaaaaaaagggcaattcaaccttgtagcaaggtgaacacgggggaaggatcttcagtcattgatgtagcatcatccactatgggtgaggtcaaaatgtcactgaaatgcagtgttgacccaaagttccgcatgccttccttagaagcagttttcaagatggtggaggataaatatcttcactcatacaagattctgcctcctgagttttccattggtagcctcatgaatgagatatgccaatgtgttgtacaactgggtagtgatcatattgcagaacataatacagaatcagatgttgctggcaatgggagatgctcacaaaatgagccaatgacaggtagcattccatttgtgaagccaatagcatgcgaggatggtggaaataggaaatgtaaatctgcaggagaatcatttattgtggaagactcagaaaattcaagtgttgctaaacagcagactcatttggcacttgccaacttgaagcctatccatgatgtaactgatatatccaagggagaagagagagtgaggatatcggtggccaatgaatttgcaagtgagaaatgtcctccttccttttattatatacgaggaaaccttgttttccaaaatgcttatgtcaacatctccgttgcaagaattggtgatgaagattgttgtgctgattgctttggcaactgcttgtctgcacctataccatgtgcttgcacaagagaaaccgggggcgaatatgtgtatacaccagaaggtctggttaggacaccattccttgatgaatgtgtttctatgaatcgtttcccagaaaaatgtcacaagttcttctgtaaatcatcctgcccactcgagagatctaggaatgaagcttcaccagagccttgcagaggacatcttgctaggaaatttatcaaggaatgctggagtaaatgtggttgtaacatgcaatgtggtaaccgtgtggttcaacgtggcatcacatgcaatctgcaggtatttttcacaggagaagggaagggttggggtcttcgcactcttgatgaactgccaaaaggagcctttgtttgtgaatatgttggggaagtactaactagtacagaactgcatgaaaggacacttcaaaacatgaacaatggtaggcatacctaccctgttctcttggatgctgattggggttctgaag

SEQ ID NO: 12866 - DNA, 1128 bp, Oryza sativa
  Clone ID: TFbOSC900167j.C1.o2.fg
atggcgtcgtgggaggagcagctgcgggacgagctcgccgsccgagacctcgccgtcgcctccgtccccggraagggccgcggcctcttcgccgcacgcagcttcttcccaggagaagtcgttatttcgcaagagccttacgcttctacaccaaacaagatttctgtgggctccaactgcgacaattgtttcgcctccagaaacctgaggaagtgctccgtttgtcgagttgcttggtactgtgggagtgcgtgtcagagagaagaatggaagcttcatcaacttgaatgtcgagcaatcgccgcgcttacagaggatagaaagaagatgcttactcccacaattcgtttgatggtgcggcttgtacttagaagaaaactgcaggatgacaagatggccaatcttgtccaactgattcttccttcattcgagcttgatcttaaggaaattacacataccttttccaagtttgcctgcaacgctcataccatatgtgatcctgaactgaggccccttgggactggactataccctgttttatctattattaaccacagttgtgtaccaaatgcagttttgatatttgaaggtcggacagcatatgttcgtgcattgcaacctataagtaaaaatgaggaggattctgaggaagatgcgctccttgagggatacagatgcaatgaccaaaagtgtgatggatttcttctgcctaatgcagtagataacagtgaggtaggttctatgtacaagaccattgaagagctagagcggaagctttaccatcctttgtcaatcactttgcttcacacacgggaaacactcttgaagatatatatggagttacaagattggcagactgcattgatgtattgcagattgacaattccagtttatgaaagaatttacccaccttttcacccaatgattggattacagttctatacttgcggaaagcttgaatggttgcttgagtacacagaggatgctctgatgtctttaaccagggcagcagatatacttcgcataacgcatgggactaaatccgagttcatgaaggaacttttgggcaagctagaagaagtaagggctgaagcttcttttaggctctcggctggagatgaacaataa

SEQ ID NO: 12867 - DNA, 1689 bp, Oryza sativa
  Clone ID: TFbOSC400525j.C1.o32.gm
atggcggaggaggcgaagaatctggagacggcccgggccgaccgctccgtgtggctcatgaagtgcccgaccgtcgtctcccgcgcctggcaggaggccgccaccgccgccgcctcctcctcctcctcctcggacgccgccgctggcgccaactccaactccaacgcgaaccctaaccccgtcgtcgccaagttcaagatggagatggctcaaacaggcaatggcaatacaccaaagagttactccttgaacatgttcaaggattttgtgccaatgtgtgtcttttctgaatccaaccaagcaacgcccggcgccgtcggcgagttggccgagctggtcttgccgtggctgccgccgcaagacctcgccgctgcggcctccgccagccgcgccctgcgtgcggccgcttccagcgtcagcgccggccgcgccgccgacgcggcgcacgggctggagcctcaccccatccccttcgacaacctcgtcgacggcaagccctacgcctacttcctctacacccccttctccctcaccccgtcctccgcctccgcctcaccccgccgcgcccagccgtgggggcgcacgtgggcacgaccgccaggccccacatggcctcgctccgacctaggcgggttcccctcgtccgggtgcgcgtgcgctcagggggcgtgcggcggcgcgcgggggtgcccgtgcgctgacccggaggctgaggcggtcggcttggggtcggaggcggggatggggagcctcagggagtgcggcgacgggtgcgcgtgcgggccctcgtgcgggaaccggcggacccagctcggcgtcacggtgcggctgcgcgtcgtgcgccaccgggagaaagggtgggggctgcacgccgccgaggtccttcgccgcgggcagttcgtttgcgagtatgctggtgagcttttgacaactgaagaagcaaggaggcggcaggggctatatgatgagcttgcctctgtcgcgcagccacccggcagcagcaagcgccggggcgccgtggagcggccagctagcggcgcgggcctgcaggcggaggaggcgtcgtcggcggggcccggggcgccgtgcggggcgtgcaagttcctgcggcgccggtgcgtcccggggtgcgtgttcgcgccgcacttcagcggatgcggcggcagcggggtgggggcgggcgtaggagggagagggagggagcgcggcgcggcggagttcgccgccgtgcacagggtgttcggcgccagcaacgtggcgaagctgctgtcccgggtgcccgccgcgctgcgccgggaagcggcgcgcacggtctgctacgaggcccaggcccgcatcgccgaccccgtctacggcagcgtcggcaccatcctcgcgctccagcaccagctctccgtcctggagtctcagctcttcaacctgcgggtggccttggcgagcgcgcaccccgacacgccgccgcagcacttcgtcgtgctgcagccggcgcactccgcggcgtccacgctgaaccaggtggtggtgaactacgacgacctcccgcacgccgtggatttcatggacgcggagcccgccgcgctgaggggactagagtctctccagctctcgcagccactgcagcgggaggaagacgagggccaccgagacatgaacctcttctcggacagtgtaggacaacggcagctgtaa

SEQ ID NO: 12868 - DNA, 687 bp, Oryza sativa
  Clone ID: TFbOSC400536j.C1.o9.gp
ttaaaaaatgtatatatcatgttttcatcatcataaataagcaaactaacacaaagtttattcaactaatggttttgaatagttctttccagtgatgcagtattgatgcgccccttttgctacctagcaaagttcttcattcatgccaatcctagaacaaactcatcaattgcaccctagttaccccaaaatgagagcactatgggtacccaaaaagagatacctgctcacctacaaaatatccaaaaagacgagccaactgtctgtggggccatttgcagcttcctaacgttgcctcagcccgccaaaaccagttaccagccattgatccctcctcccccctcatggaccctagtccaagccatagtcgatggacagatcccgcattggagggatggtctccatggcaaacaccatcatgtgagggtaggattcatcctcattgccacggattacatattgaaggaacacattcggactgcagctgtggctaatgtagcaagccacgttcctcctctgtgacacgtcgagtcggtagcgcgcccctgcaaatagggggaaatggggtaccctgtccgggtaaaccacggatgcatctccccactccctccatctctcggggaacttggtcgggtcgatgatggagctcccgtcctccatcggaggcagaggggcgtcacctgagtg

SEQ ID NO: 12869 - DNA, 1596 bp, Oryza sativa
  Clone ID: TFbOSC900282j.C1.o4.fg
atggcagtttccgttttcaacacaaggaggcgtacttcccttgtttccgccttcatagatcgaacacgtatgttcatatccacacctctcccccaagtacgagacaaggtctcgagaacaaaaccccccaaaccccacggcggcggcggcgagcggcggcggaagaagcagccgcaagaggcagcagctcgcgccggcggcggcatgggtgggagcagcgcaagcccgtgtgacctggacagggatttcgcgccccaaatcgcccagctcctcgccacccctcctctccaacccgcgcaggaatactacaatgggctcatacagtccaggaaacatgatggtataagagtgaacttcagcagcaagcatgggaaaggtgtttgtgcgaacaaggagtttgcagaaggggaccttattctgaaggatcaaatattggttggtgctcagcacagtcttaacaagattgattgcgctgtgtgcagttattgctttcgcttcattggttctatagagttccagattggacgaagattgtattggcaaagcgttggttcaagcagtgactgcactaataggaggcattgccatgagagtgatgtgggatcgagtgccagttcttctggtgcaacaaaggaaaacagtagtactttgccagaagaggtcttaggatcacttattactggtgacatgtcactgcctttcacagaccattttagtttgcctcaagttgttccttgtcgtggatgtgaggaagaacgctactgcagccaatcatgtgctgattccgactgggaaacttatcactctttgctgtgtactggatctaagactgaaccatcccagagatctgctcttcagaaattcatagaacatgcaaatgggtccaatgatatttttcttgttgctgccaaggctatcactttcactctgctgaggtacaagaaactcaaaacgcagcctgaatttcaaaataacacagatgaatcaaacttttctttgcttatggaagcatggaaaccactttcgatgggctacaaaaagaggtggtgggactctgttgctttgcctgaggatgttgattcctgtgatgaagatacatttaggcagcaaattagggatctagcacttacgatcattatcttctgtgtttcgcagtcattgcagcttctcaaggatgctatttttgattctgatggtttggttgttgcgtctccagtggaagactatttcatacatattgatgatcttccagatgatgagaagtgcaacatatcccaggaggaagctgaaaaggttacaaggccatttctagatgctttaggtgaagactatgcagctccttgtgaggggacggcattctttcctttgcaaagctgtatgaatcattcatgttgtccaaatgctaaagcatataaaagggatgaggatactgatggtaatgcagtgataattgctctggagcctatcaagaaggacgatgagattaccatatcctacatcgatgaggatgtctcctacgaggagaggcaggcggagcttgcagattatggattcatctgtacgtgccctaggtgccaagaagaaaagcccaactga

SEQ ID NO: 12870 - DNA, 1392 bp, Oryza sativa
  Clone ID: TFbOSC406486j.C1.o10.fg
atgggtgggagcagcgcaagcccgtgtgacctggacagggagttcgcgccccaaatcgcccagctcctcgccacccctcctctccaacccgcgcaggaatactacaatgggctcatacagtccaggaaacatgatggtataagagtgaacttcagcagcaagcatgggaaaggtgtttgtgcgaacaaggagtttgcagaaggggaccttattctgaaggatcaaatattggttggtgctcagcacagtcttaacaagattgattgcgctgtgtgcagttattgctttcgcttcattggttctatagagttccagattggacgaagattgtattggcaaagcgttggttcaagcagtgactgcactaataggaggcattgccatgagagtgatttgggatcgagtgccagttcttctggtgcaacaaaggaaaacagtagtactttgccagaagaggtcttaggatcacttattactggtgacatgtcactgcctttcacagaccattttagtttgcctcaagttgttccttgtcgtggatgtgaggaagaacgctactgcagccaatcatgtgctgattccgactgggaaacttatcactctttgctgtgtactggatctaagactgaaccatcccagagatctgctcttcagaaattcatagaacatgcaaatgggtccaatgatatttttcttgttgctgccaaggctatcactttcactctgctgaggtacaagaaactcaaaacgcagcctgaatttcaaaataacacagatgaatcaaacttttctttgcttatggaagcatggaaaccactttcgatgggctacaaaaagaggtggtgggactctgttgctttgcctgaggatgttgattcctgtgatgaagatacatttaggcagcaaattagggatctagcacttacgatcattatcttctgtgtttcgcagtcattgcagcttctcaaggatgctatttttgattctgatggtttggttgttccgtctccagtggaagactatttcatacatattgatgatcttccagatgatgagaagtgcaacatatcccaggaggaagctgaaaaggttacaaggccatttctagatgctttaggtgaagactatgcagctccttgtgaggggacggcattctttcctttgcaaagctgtatgaatcattcatgttgtccaaatgctaaagcatataaaagggatgaggatactgatggtaatgcagtgataattgctctggagcctatcaagaaggacgatgagattaccatatcctacatcgatgaggatgtctcctacgaggagaggcaggcggagcttgcagattatggattcatctgtacgtgccctaggtgccaagaagaaaagcccaactga

SEQ ID NO: 12871 - DNA, 2307 bp, Oryza sativa
  Clone ID: TFbOSC401001j.C1.o46.fg
atggccctgcaacttatgatggacaactacctcttgtgttctgccatgaagggaagattgtctgtttactctgatagtcagctgatactagtgaagatgaaccgggaatcaaatttcatgcctactcctgatcaggatgttctggaagtcaagcccctgaggactttggctccaatgttccctgcaccattggggatcgatgtgcttaaccggttgacagccccaccgttggtatttgtcgcaccagctgggcagtttcctgggggttttggatctttgaacattcctgcggtcagatcgtttgccgctttcggtggtcaggatgctagtggaggcaagactgctggtggtggtgatcaggatgctagtggaggcaagactgccgctggcggtgatcaggatgctggtagaggcgagactgctgcttttggtggtcaggaaactgtcagaggtgaatttgttgcaaatgggactccaaatgtaggtgctagtgcaactgggccaattgacgccactcctatctcagcttgcaaatcaacacaaccaagtgtgatatcactggatgatgatgacaatgatgatgatgagccttacggtggtaaccaaacatcagcatctggacggaagatcaagaggccatcccatctcaaaggatataatgtaagtgatggtttgggcaccgacagctccaacggaacaaagaaacgccctaagacctctaataggaaggctgctactgacaatgagatttccttgatgcctccatccagcgatcccagggaggttgtggaagtgcttctcatgaccttcgaggcactgcggcgtaggcatcttcaattggatgagacacaagagactagcaaacgtgcagacctgaaggctggtgccatcatgttggccagtaatctgagggctaacattgggaagaggattggagctgtccctggagttgaagtaggggatattttctacttcaggatggagctatgcattatcggcttgcatgcacctagcatgggtggaattgattatatgaataagtttggtgatgaggatgactctgtagcaatatgtattgttgctgcaggtgtttatgagaatgatgatgatgatacagatacactggtctacagtggttctggaggtataagcaggaacagtgaggagaagcaggaccagaagcttgagaggggtaaccttgctcttgagaggagcctgtccagaaagaacgtgatccgggttgtacgtggttacaaggatccagcttgcttgactgggaaagtttatatctatgatggtctttataagattcatgagtcctggaaagaaagaacaaagactgggatcaattgtttcaagtacaagttgcagcgagagccaggacagcctgatgcagttgcaatctggaagatgtgccagagatgggtagaaaatccagctgctagaggcaaagttttgcaccctgatctatcatcaggtgctgaaaatctcccagtgtgtcttatcaatgatgttaacagtgagaaaggaccagggcacttcaactatattactcaggtcaagtacttgaagccactccgctctatgaagccatttcagggttgcagatgcactagtgtttgtctgcctggtgataccagttgtgattgtgcacagcataatggaggtgacttaccgtacagttcatccggattgcttgtatgtcgcaagcttatggtatatgaatgtggtgaatcttgccgatgttcaatcaactgtcgtaatagggtagcccaaaagggagtaaggatccaccttgaggtcttcaggacaacaaatcgaggctggggtcttcgttcatgggatcctatacgggctgggtcatttatttgtgagtatgttggtgaggttgttgatgatactaaagttaatttggatggtgaagatgattatctttttcgaactgtctgtcctggcgagaagacattaaaatggaattatgggcctgaattgataggggaacacagcataaatatttcagctgatacttttgagccgctgcccatcaagataagtgcaatgaaaatgggaaatgttgcacgtttcatgaaccatagttgcaaccctaacaccttctggcaaccagttcaatttgaccatggagaggatggttatccacacatcatgttcttcgcactgaagcatattcctcccatgacagaactgacttatgactatggcgacatcggatgtgaatctaggggtgtaggttctagagctaagaactgcctttgtggatcctcaaattgccggggcttttttagctga

SEQ ID NO: 12872 - DNA, 1504 bp, Oryza sativa
  Clone ID: TFbOSC401179j.C1.o22.np
tctcctttcctcggatcaaccgccatcagcttctcctcagccttcttcgccttcccttctattggcttggcctcctgtggcacaaaatgcgcttcagcctcggccgcgcgctccacaacctcaccccacgttgggtccgacaagtccaacccatgtatcttgaacttgatctcccccttcctctgcggcaaggctgcgagcctgggcggcgggagcgcgacagggttagcggccgcctcggcctgggcgcgcatgtcgtcgaggccccgcgttcgaggagtacgttaaggagtggaaggcgaagaaggcggcgctcggcgtgccggccggacgctgcgagctgcctttcctaaccggcacgcctaaggcggttgaatgtcgattatgttctaagattattcatcctggagaagaaataaagtgttcggttagtagatgtggagaattgttccacctgacttgtgcagcagaagataccacaaatttcattgctgaaagcttcaaatgccctcaacatggctgtatggtctgtaagcaaaagatgtttttttggcgttgtggacggtgtacggttgcagcacatacaaaatgtgcaccatggccagtaattcatttaaaagatgaccaaggaagtgctatctgttggaggcatccctctgattggctccttcaaaatgaggtctatccttttacccttaagattgacgaagtattttgccgactacctgttccatatgttaatgaagacttcaagattgattcaaccatcagggatttcactgcagctgtctgcaaaccaccacactttacgtttatcagacgcaatgtatatttaatcaagaaaaaacgtcctgattctcgcgcggaagctgggtgcacaaactgcagtgctgattctacgtgcaaagatgactgcgaatgcaggggcctttacatgagttgttccaagaattgccactgctcagatatgtgtacgaacaagccattccgcaaggataaaaaaataaaagctgtcaagacaaaacgttgtggatggggtgctatttcattggagccattggaaaaaggtgattttataattgagtatgttggtgaagtcatcaatgatgcaacatgtgaacaaaggctttgggacatgaaacggcgaggtgataaaaatttctacatgtgtgaaatcagcaaagattttacaatagatgcaacatttaaaggaaacacatcacgttttctgaaccacagttgtgatcccaactgtaaattagaaaaatggcaagttgatggtgagacaagagttggtgttttcgcctctcgttccatccaagttggagaacacttaacttatgactacaggtttgtgcatttcggggagaaggttaaatgctattgcggggcacaaaattgtcaaggttacctgggcaaccaaataaagaatcctacgcagcgtgctctcgcaattgcagcattggagaacgagtggcttgaatctttgaagatacaacaggac

SEQ ID NO: 12873 - DNA, 1266 bp, Oryza sativa
  Clone ID: TFbOSC22139j.C1.o1.fg
atgttgaggtcccactctaaggcgagggcattgccattggatggcacggtggagcacctcggttgtgggcagggggtcgtcatcggcgctgcccgacagggagaggaccaggtggggttcctgcaagagctgaggtcaatgccgacaacggagagcatgacggtgcgcacagtgcggaggaagttgaggagcgccatggcatgggggatctctgagaaggcttctgggctgaggtcattgagctggacggggtggttgaggtcaccgaccaccgcgtcgagctccgcctgtcgtccccgccgcgaagatgtcctggtacacgagatcgccggtgagctccgccgtctcggcgaccacgctccgcatctcctccatgtcgttgtcgtcgccggtccaccgccggcccatcaccatgcgagggacgatgttgctggtgacacccatcagcgcggcgtcgacgtcgacgtgctcggcgtcggtggcactccagctgagcgagccgacgaggcgcgccacctcctcgcggcggacatggcggagccggaggaagagcgcatggagccgccgccgccgccgccgtacatccacatcgagaccaacgatttcttgcacaggaggcacaagaggcagaaagaggaggacatagctgtgtgtgagtgccagtataatctgctggatccggacagcgcgtgcggggatcggtgcttgaacgtcttgactagcacggagtgtacgcctggatactgcctctgcggtgtatactgcaagaaccagcgatttcaaaaaagccaatatgctgcgacaaggctggtaaaaactgaagggcgtggatggggccttttggctgatgagaatattatggtgactgaatttaccttgattttatggtctgctaatgttgttaaatatattcaagctggacaatttgttatggaatattgtggagaagtaatatcatggaaggaagccaagaggagatctcaagcatatgaaaaccagggtttaacggatgcctatattatctatctgaatgctgatgagtctatcgacgcaacaaagaaggggagcctggcaagattcatcaaccattcgtgccaaccaaactgtgagacaaggaaatggaatgttcttggggaagtaagagtgggaatttttgcgaaacaagatattccaatcggaacggaactatcctatgactacaactttgagtggtttggtggtgcaatggaggctacatacctgtgggaagatgatgatgacaggtag

SEQ ID NO: 12874 - DNA, 3462 bp, Oryza sativa
  Clone ID: TFbOSC401762j.C1.o10.fg
atgttgaggtcccactctaaggcgagggcattgccattggatggcacggtggagcacctcggttgtgggcagggggtcgtcatcggcgctgcccgacagggagaggaccaggtggggttcctgcaagagctgaggtcaatgccgacaacggagagcatgacggtgcgcacagtgcggaggaagttgaggagcgccatggcatgggggatctctgagaaggcttctgggctgaggtcattgagctggacggggtggttgaggtcaccgaccaccgcgtcgagctccgcctgtcgtccccgccgcgaagatgtcctggtacacgagatcgccggtgagctccgccgtctcggcgaccacgctccgcatctcctccatgtcgttgtcgtcgccggtccaccgccggcccatcaccatgcgagggacgatgttgctggtgacacccatcagcgcggcgtcgacgtcgacgtgctcggcgtcggtggcactccagctgagcgagccgacgaggcgcgccacctcctcgcggcggacatggcggagccggaggaagagcgcatggagccgccgccgccgccgccgtacatccacatcgagaccaacgatttcttgcacaggaggcacaagaggcagaaagaggaggacatagctgtgtgtgagtgccagtataatctgctggatccggacagcgcgtgcggggatcggtgcttgaacgtcttgactagcacggagtgtacgcctggatactgcctctgcggtgtatactgcaagaaccagcgatttcaaaaaagccaatatgctgcgacaaggctggtaaaaactgaagggcgtggatggggccttttggctgatgagaatattatggtgactgaatttaccttgattttatggtctgctaatgttgttaaatatattcaagctggacaatttgttatggaatattgtggagaagtaatatcatggaaggaagccaagaggagatctcaagcatatgaaaaccagggtttaacggatgcctatattatctatctgaatgctgatgagtctatcgacgcaacaaagaaggggagcctggcaagattcatcaaccattcgtgccaaccaaactgtgagacaaggaaatggaatgttcttggggaagtaagagtgggaatttttgcgaaacaagatattccaatcggaacggaactatcctatgactacaactttgagtggtttggtggtgcaatggtgaggtgcctttgtggagctggcagctgttctggatttcttggggctaaatcacgtggtttccaggaggctacatacctgtgggaagatgatgatgacaggttttctgttgagaatgttcccctttatgattctgctgatgatgaacctaccagcattccaaaggacatcttaataaaagatgagccaaatacacaggatggcaacaacaacacaatccaaaatactgggattcctattattgcaagttcaagtgaattcacaccgatgaatgttgaaccatcgattgcgagttcaaatgagttcacaccgatgaatgttgaaccattgaatgtgagctcaaatgaattgacaccaatgactattgaaccattgaatgctattccaatgggagttgattttactcagaatggatcaattgaatatggtgcgcaatgtgctgaagatgctctgcaaaactcaacgcgtggagttgcaaacctccagaatcaaagtgcgccccgggacaacaaccatacagagttggttgcggtgaaacgtagacccacacttcgtggtggaaaagctaaacgtggtatgcgcaagcaactgaatgttgtgggtatctgtgatcggttagcatcagaggtggcacgtgaagaaatattgtattgcgaggaaatgaagaatgaagctgctgctgaaattgacagcctgtacgacgagataaggccggcgatcgaagagcatgagagggatagtcaagacagcgtggccacaagccttgcagagaagtggattgaggctagctgctgcaagtacaaagctgattttgatctgtttccattgttcaggataagtcgagtcatgggaaaatccgagcatggcaatctactggtatctctcagtgatgggctgccccattatagtcttgcagcagcagttggcctggcaataggagttgctgggttgtgcaaggcgctgcatagcagcttggtgataccaccagtttctcagaagaagttactttcgaactcagatagactttattacactggaggcctgaaaaatcttggcaacaattgctttcttaatgttatcctgcaggcacttgctagctgtgacgggtttgtttcctctctagataatttgcttggaagtgaggatgtgctacctgaggaaaagtccgaaaaaatgcctcttatttttgctctaagttctcttataaaagtggaaaataaagtgttggttcctgtgaccctagtggtctcaggaattaccgagcagtggtggtctggtggaatcgttacatactgtaatactgtaaacacgctgtcattggacttcgaaaatttctactgcttgcctctctcacctgtggctactataaatggagatattatcaatggatgtagtttggtggattgccttgagcactttacggcgttggagcatcttgacaactatcgttgtgatcattgttggcacaatgttgctgccaaatatttgtctcttaaatccgaagttgatgaggaaaaaattaacaaactacacacctgtgtcgactatggcacttgcagttgcaggcatatatttaccccggaggaaatgacatgttcgatatcttctcaggcaacaaagcagctggctatcactcatttcccaaagatcttgtgcattcatttgctacgcgcttctgttggtctagatggtgaatttgttaagcgtgggggacacatttctttccctttacttcttgatctttcaccatttgctggtggtgcattaatccctggacagggacctaaaccttcagcaatgaacaagcaaagacatggccagcaaactctccatctgtggcgacagctgaatgcagagatgcctgtgaatatgttccccgctgccactgatggggactcatcaagtcatcattgtggtgatgaatcaataaacacacttggacgctcattttacgtgggaaatagggatgcagatagtaggttcttgtcttcatcatcattgacagacaagttatatggcctctcatctgtcgtggaacactacggcgtatgtggaggtgggcattatgcagcttaccggagagtaacgccaaattcggattctaatgaaccagtgcaatctcttgcaagttttagaaaggagtggctttacgtctcggatgatcatgtgtcccatgtttcagagtgtgaagttttggcagcggaggccaccctgcttttctacgaaaggctgtag

SEQ ID NO: 12875 - DNA, 2100 bp, Oryza sativa
  Clone ID: TFbOSC900423j.C1.o11.fg
atggccgatgatcagtcagttggtaggaggagaatttactacgacccaattgtcaatgaggctctgatctgcagtgaaagtgacgatgatgttccagagccagaggaagagaaacatgttttcacagaaggagaagatcagctaatatggtggaaggaaagatcagaagttctttttgagaaatatgagaagcagtctcaatcttcttacaagacagatttgcaactttttcttgacaagaccatggatgtggctttagattcttttgataatctcttctgtcggagatgtttggtttttgattgccgtctccatgggtgctcccagaacttggtattccctagcgagaagcaaccatatggtcatgaacttgatgaaaacaagagaccgtgtggcgatcagtgctaccttcgaaggagagaagtatatcaagatacgtgcaatgatgaccgaaatgcttgtacaacatataatatggattcaagatcttcctcactcaaagttagtgctaccatattgtctgaatcagaagattcaaacagagatgaagataacatcaaatccacttctattgttgaaaccagcagatcaaaaataactaattctgaatatgctgacaaaagtgtgacaccacctcctggagatgcttctgaaactgaaaatgtgtcccctgacatgcccctaagaactttaggcaggcgtaagatttcaaagcatgcctccaagtctaacgatcattcacctgataaaaggcagaagatatatagctcaccgtttccttttgcaatgagtgtactgaacaagcaatctgttccagaaattggtgagacatgtccagattccatagaatctgcagttgatcaacttccaagtctggatgaccctaacaagaaaatttctaccaaagatatgtgtgctggaagcacaactaacactactgaaaatacattacgagataataataataatttgttcatctccaacaaggagcactctatttctcattggagtgctttagagagagatttgtacttgaagggaattgagatatttgggaaaaacagttgtctcatagctagaaacctattgtctggcctgaagacctgcatggaagtggccagctacatgtacaacaatggtgcggcaatggcaaagagacctctatctggtaaatccattttaggtgactttgcagaggctgaacaaggttacatggagcaagatttggtggcaaggacaagaatctgtcgtcgtaagggccgagctcgaaagctcaaatacacttggaagtctgcagggcatccaactgtaagaaaaagaatcggtgatggaaagcaatggtacactcagtataacccatgtgggtgtcagcaaatgtgtggcaaagattgcgcctgtgtggaaaatggaacttgttgcgagaagtactgcgggtgctcaaagagctgcaaaaataggtttagaggatgtcattgcgcaaaaagtcaatgcagaagcagacagtgcccgtgttttgctgccagtcgtgaatgtgatccagatgtttgcagaaactgctgggtgagctgcggagatggctcactaggtgagccactggcaagaggtgatggctatcagtgtggaaacatgaaactcctcttaaaacaacaacaacgtatattgcttggaaaatctgatgttgcgggttggggtgcattcattaagaacccagtaaatagaaatgattaccttggtgaatacactggcgaattgatttctcatagagaagcagataagcgtggcaaaatatatgatcgagcaaattcatcgttcctatttgatttaaatgagcagtatgtactggatgcttatcgcaagggggataaactgaagtttgcaaatcactcgtcgaatcctaactgctatgcgaaggttatgttggtggctggcgatcatcgagttggtatctatgcaaaggaccgcattgaggctagcgaggaactcttttatgattaccgctatggacctgaccaagccccagcttgggctaggagaccggaagggtcaaaaaaggatgaagcatctgtctctcaccaccgagcgcacaaagttgctagatag

SEQ ID NO: 12876 - DNA, 6420 bp, Oryza sativa
  Clone ID: TFbOSC403850j.C1.o3.fg
atggaggagcctgacggggaagcgcgtgggcgggaggatcatgctgcggttgggcggttgggaggagaggagggtgctgttggcggcggtggcctggctttgctcgctgttcctgagattggcggtgagctcggtgatggtgggaaggtctgcggtggtcaggagaggcgcctgcccacagaggaagatggagtccgagataatggaggtggctccgctgcagaattggtggaatctgctgtgaatgtttctaccccttttgaaggaaggggtcagattggtggtgagaaggagtctagtatgcaggaggggtctatgaacatggcgggagagaagcatggcagttatcatgtggaatctgctgaacccagcaatttgcagacgtgtcatgcgcccaatggcggggtatcgaataagacattatttgctcccttcagcgaagttttctccagtgataacagccatatgcgttacttgctggacaaagcgacagaggggagcatttgtgagcatggtgatttggcggacagtaaagatgatttgggtggcgcaacggacgtaaagacaaacacagaagatttacagatggtttgcacgaaaccacattgtgatagcgagggtttgtcggatttgcataatgacagtgagcgatggccacaagtggttgatggggtgggatttacgataaagggtaataatgagctgaaacaagttgatttgataccaaaaattgaagctgaagtctctaggtcggtggaggatgattcaatcccttctttttctggtggtattgatgattctttacgcaaggcaggttgtgcgtgtgaaactctcaatgatatggggatgtctcatatggccaatggtgatttgtggtgcaatgttttatatgcccctcttagtgaaggatgccagtccaaggatgctcgacacatagcagtcatggggaacaaggtgacacaggggagtcaatgcgggcagggtgatttggcgtgtgatggaattgttttgcgaggtggggtagatgtagagaaaagtctagatgatttacagatgtgttccaaggaaccacaatgtgataacaagggctttccatatttgacagaatttggtgtccagcagccatcatatggcatgaatgtcatatgttcgaagacagatcctaaccatcagctggaaaaggatgaattgttgacaaatactagaggagagttctctagttctatccatgaggattcagttccttcaatttctgtgagctctgttgattttacttttgatggcaatgctggtcagattggtaaaacatctgagcatagagcaatcatggagaaagtgtcgcatggttcacagcgaggaggtgtactttcctgtgagagtaggtctttaaaggagtctcatgcagatgagaatcagagttccacattggaggttaagacatgtgaagagggcttacagacaggtcaagtggaaccatgccacagcatcgtagctttgtcggattcagggaagtatggcaccgacatattaccacgtggtggtgacggtctgagatcgatgactggtgctaaccatgagctggtaaaggatgattttcatccaaaaagtgatgtagtggtctcctgtccagtggatgaggcatcgattccctctaactataatagccccattgatgttcttttatacaaagaggatggtttagttggtgagatatctgaaaatagaattggtgtggagaaattggctcatgatttgctcggagaagttatgctttcatttgacagcaggcctcagactgaggcttctggagatgagaatcaacacttctggatggatgttccaaagggttcaactgcatctgtttgtgaagtagaaaatacaggcactagaagatcttgtgatccctgtgctgaaatagagtttccactccaacaaagtcgtgaaaagcatgtgatctctgaatcccccccagagagagatctgactagttcgtcccataacctaccttgtgaaaatgaaccttgttatagtggcagggaaacacccgccttctgcctaggccatcaagattctgctggtcttggactggaatcttcagactgtttggtacaagagctcaatacgtgtacttccactgatgacaaagcttgctctgttgattttgttgagaatggtaatggttctcataaccaaaaggaagtgccggtgattttcttcaggcggaggaatccagtaagagctgcctcttcaagaaattctaattttgagaagtgtgaccagataaacaaatcaggtaatagtacacgcaaatctaagaaggttgacagtgtaagctcattacttaaaagcaccatgattaagttcccaaacaaaaccacaaagggaagaagtggcatcaataggccattgaactcttctgcttggggcagcctacaaaagctaatggatggtttcaatcagaactgtggtccttcaacttctcgttctcatcaaacttgtttgggaaaagaaatatcaaatagaggatctagcgagaaaaaacagctatctattcggaaaattcgaacttcaagatgttcaaaatataaaaacacatcactttctgatattggatatttagcaggtgaattgaatggccaaccgacctgttcagtgaggattgatactaatgtttcttctgatgcattgttcaattctccgaatggtgctcacaaagctgcacagtgtgttgaaggtaatcatactctaaaattaacatctagcctgactgacacacaacagtttggcttggagaatgttactcaagaaacatgccctgggtacatccatggagagtgtggtacttcaacttctgaacgttctctaaataatatagttgggttttcaccagactctgttttggatatagcttctgttacatgtgaaagcaacacttctgcaacccttgatgttatagtgcatgaaaacccatcttgtcctggtggattgattggaggtggtcttcgtgcatctgctttatctacttctcactgtgaaaatcatcatgcttcatcattgatggatttggagcagcaggtcaaaactgtgagggagaacgacatgggagaggaagatgtcattccatcacatgccatgatgtacaatgatattggtgaaggaaagcaaactttagcgaagtccaatacgatgaggaaaggtagaaatgtgggaaagcaggaatgccgaaagaaagatggaaagaagggaaaaaacataaacaaaaatagaagttccaccaaaatttcatctagtgaagcttcaaaactcgtgtccttttctaatgattcaccttcacttgatccatctgagttgctgcttcatacgagacctccaaagtttggttcttgttctaaggtcgtaacttctgccatacatgatgttggtatgcatggatatgacaatatgcgtccttttggaattgacaatgatgacgaagggagtgcatttgacaatgtgaaatcactaaggcgcaagaaaaaggatagtcatggaggaaagaagggtaaggtgcgggatccacatgggaagggcagaagcaagaagaaaaatatagctgataacacctacggtgatcttattcctgctgctgaacttgtattcaagaactcttctgccgtatctgttgaattacctgcagttgttgcttgcaaaactgatggtgcatctgtaccaccagcacctgcttgggtttgttgtgatgattgcgaaaaatggcgctgcataccaactgaactggcagataaaatctcaaaagaaaatctcagatggacttgtaaggaaaacgaagataagacatttgccaattgctctataccacaagagaagacagatgatgagatcaatgcagagcttgggctttcagatgcttctgctgatgaagctaatggcgatggatcaaactcgaaagcttctggagaaccaaactttgcacttctcaggtcaaacttgtttctacatcgtaaccgcaggacacaatccattgatgagttccaaaggcgcacctatgcaaaacttggtaagttccatactggtaaaaagggctatggattgcaattgaaggaagatgtatctgaaggacgattcctcattgaatatgttggagagggaaacatgctctgtttaaatgttgattatgttggtttcacattcgttgtccttgatataacggcttatgaatcccgccaaaggtattatgcctctaaaggccagaagcatttctatttcatggcacttaatggtggtgaggtgatagatgcttgtactaaaggaaacttgggccggttcatcaatcatagctgcagtcctaattgccgtacagagaagttatattcttattttgagtccattaaattactttttccttgtgagcagtggatggtcaatggtgaagtctgcattggaatatttgctatgaggaacatcaagaagggtgaagaattgacgtttgattacaactatgttcgtgtatctggtgctgctcctcagaaatgcttttgcggtactgccaaatgccggggttacatcggtggtgacatatcaggtgctgatatgattactcaagatgatgctgaagcagggactttcgaacctatggctgttcaggaggatgctgaggaagtacttggtgcaaatggtttgtcctctcatggcacacatctagatattgtcgaccatgaagcttccactaaaacagaagattcaaatgattgcccatctgtgaacccaccagagttagaatctgagcaacaaacttcaggaaccttatttgacacaagtgagccagaaaattccttagaagcattgagcccacaggatgatgaagatgtcgtccgcacacctgtccatgtgtcccggacagttgagagtacgtcgcggcagtttccagaatatggtactcggtcatcagaaattttgcaaagggctccatgcacactggatggaccaaaggttccaagcacaacaaatggaattccgcctagttccgatttggggagccactgggtaccaggtttccacgctaataagaaaaccaatgtaaaacatcatttgattctgaatccatcatcagctcctattgacagtgagcacattttgggagggttacatatgactgttaatgatcgctacctgacatgcacagttgaaggaagattgaacagcttgcttgatgtaaatggaggtattagcaaacgaaaagacgcaacaaatggatacttgaagcttctccttgtgactgcagcggaaggtgacaatgctgggggcacgtctaaaagtgtaagggatctttcgttaattcttgatgcacttctgaaaacaagatccaattctgtcctgttggatatcatcaataagaatggactgcaaatgcttcacaatatattaaagcagaataaaagcgatttccataggatacctataataagaaagcttgtgaaggtacttgagtttctagcttccaagggcattctgacatctgaacatataaatggtggtcctcgatgtgctgggacagaaagcttcagggagtcgatgttgggcttgttaaggcataatgatatgcaggttcaacagattgctcggaactttcgtgatagatggatccaatgggcccctcgaaatatttcaagaaatgagccaacagaatattcacgtgcatccatatctgcacacgatattcatgtcatttcaacagctggtggatcttttccaacttcagccaacactatggattggaaatccatcagaagaaaacgcaagagccgttgggattaccaaccagatgaccactataaaatgggtggcctgaaaattcagaaagtttgtcctgtacaaagtgagtttcggactggctcggtgggaaataagttgcatggtaattggggaacgaacagctcccacaatgatgttcctgtggtgggaagttcagccgatggtgcagatgatgaagcacctcctggatttgagtctcagcaggaaagtcggcctggacaagcttgtttagaatcgggggtttctccaggattatacttggagagcattttggaaccccagaagttgaaggagggccatgtcgcaaaaactggaaagtcgcacctggtgtgcctttccagccctttccaccattgccgccctatccaagagggagtccttgtccttccactcagatgtctcagcatgaacacaacagtttgggacattgtggcagggctgcaaatagagacgggagaatacataggaattggagaaatggggcgagaacaaaatttccatacaatcatcaaggacggagatttcctaacaataatcaaagattttgaaagttgcctgctgcctccaacgtctcaggagcagggtgatccaggacctagaggcagggagtga

SEQ ID NO: 12877 - DNA, 2481 bp, Oryza sativa
  Clone ID: TFbOSC401237j.C1.o16.fg
atgaaaagaaagagtgttaatgagcggcctagaaattaccatgttaatgagaagggaatttatatcttttttgaggaaatcctatcctctacaaaccagatttatatgtttttgaacttgttcgtccattgtgaacaagggtcagcagtttccacatctcagctaaggactggaatggccaaacccaatggcaaagagaaaacgggtgacacgggattgtcgatggctcctccaaagatttccaaggatagatttgatgctgctatcagagccatggctgatattggtatcctaaaggaaactgctgcgcccgtgttgaataatctactaaacttattcgattacaactgggtgcatatagaagctgataattatctggctcttgctgatgctatattttgtgattcagatcccaaagaaggacagaaaaggcaagctaatgagacaaatcttgatgcagaccaatctaacaagaagcttaagacaaaaaagcgttctcaaaatcctacatccaagatgcatggcaatgacaatagagagtttgttgaagctccaccacagcagggacgaggcacactgtctgcccgaactgttaatgggaagaaagtcaccagggcccacttggagttgccttcttcacaattactgatcaaggaaccacatacatgccctagcattgcaaagaatacaacaattgttgaaaataattctgctgtattatgccatggtcaagaccttcaaacttttgaggtcccagtagcaactacttgtccgcaagttgtagcccccagtactcgcaaagatgcacgtaggacttctggtgctcgccatgatcagaagcatgaaggtgtatctggtgcgcatgaaaggaacagggctgttgcgtgtagcaaccaggaaattgtaagcagcaaggattctccatccaacattgaggtagttttgtcaaattatggagctgggaaactatcattcacatacaactcttccctggcaaaccgttctgattttcatctgcctgacattaaattaatttgcaagaaaatggaggctagatgccttaggaaatacaagagcctagaacccaatttctcttttaagaatcttattaaagatacttgccagtgtattgttgaatctagtggacctagacatgaaggcatcatacaaactgttcctgccctggacattctgtccaaaccttcagtgccgcaaatattgcagtcaaatcaagctaattccgcttttatgccacctaataatgtcatgagccttggtggtacttcttcctcttgcactgttgctggagttagccagaattctagtaatatgccggttgttccgcatcaactacatattggtgccaacagaccacctcatgatgtcaatgatatcacaaaaggtgaagaacgtttaaggattccaattattaatgaatatggcaatgggattcttcctcctccatttcactacataccacacaatatcacactccaagaagcctatgtaaacatctcccttgctagaatcggagatgacaattgctgttctgattgtttcagagattgtctggcacaatcacttccttgtgcgtgtgctgcagaaacaggaggagagtttgcttatacaacagatggccttcttaagggagcatttctagatagctgtatctcaatgattcgagaaccacttaaacatccccatttctactgcaagatttgcccaaacgaacgaatgaagatagaagtaaattctgattcatcaaacacagaaatgaatcctggtccttgtaaaggacaccttacaaggaaattcatcaaggagtgctggagaaaatgcggctgcactagaaattgtggaaaccgtgtggtgcagcgaggcatcacacgccatttacaggtgttcttaacccctgaaaaaaaaggatggggattgcgcagtactgagaaacttcctcgaggtgcttttgtttgtgagtatgttggtgaaatattaacgaacattgagttgtatgaccgtacaattcaaaagactggtaaagcaaagcacacatacccattgttacttgatgccgactggggtactgaaggtgttcttaaggatgaggaagccctttgtctagatgccacgttttatggtaacgtcgcaagatttataaaccacaggtgctttgatgctaatattataggaatacctgttgagatcgagacgcccgaccaccattattaccatctggcgttcttcacaacaaggataatagagccttttgaggaactcacatgggactatgggattgattttgatgatgtcgaccatcctgtgaaggcattcaaatgtcattgcggaagtgagttttgccgagacaaaacgcgcaatgagtggttctatgctgctgcactcgtctggttcatcaatgaaattgcattagctgacaaaagtttatatactgccacaggatctaaatcgagggcgcgggtttaa

SEQ ID NO: 12878 - DNA, 2526 bp, Oryza sativa
  Clone ID: TFbOSC401000j.C1.o1.fg
atggggatcccggaggtggtggtgccgccgagggcggccggcccgcggaggtacaaggggctcgtgccgtggcgcttccagccgggcttcgtcaggccgcctccggtcaagccccctgccgccgccgccgccgttgccggaggaggggtcgcgggcacgcccggcggcaagggtcgcgggttgggggcgtcgggggaaggcgtcgggtccagtggaggccggggagatcctcaatcgaggagatgcacccgcagcgcgagcgcgaagggctctggtgatgcgcggagcgtggaggagggcggtccccgtgttgccggagacgacggcggttcgggcaaatccggcgtcgcggcggagggctccggatttgagggtttgaggaatggcaggggcggtggcgttggaacggcagctgccgaagattgtggtttggagaagtccaaccccgatggcatcgtcggagatgctgatgtgcatcttgagagcggcagcgatgcaagagatggggaatgcgtttctgagggtttgaagaagccttgtgtaaataatagcaatggttcttctgccgcggattgcgcgccgaaggtgaaaaagggaaatgacagtggcaatggaggtgccgatgagtgtaatgctgcagccaaaagtagcaacttagcatgtcctggcaacaatggcgacgaaacgaatcgtaaggggcggaaggtagtacttccatggaggttccaggttgggttcaagcggtcgttctcgaaagctttctgctccgatagtgaatcttcagggccctctggtactcaattctacagagcccaagactcttcgacaccgtgcactccagcaacaagaagttctgtccggtgttatgcgagtgctcattctggtgttagagtctcggccatgcgtgatttctcagtgaaaggtgagaaggaaacatcaactccatataagaagagcaaaactggcatggatggtcctagtcaagggatgccaaagaatggagttgtcctcgctagggaaaacattatgggatctctgcagaattttcgcttaatttacagggaccttttggatgaagaagaagagaagtcgacagaagcagtgattagacctgatctacaagcttacagaattttcagggagcggttcatcacagactgcgatgagaagaaatatattggcaatgtgcctggaatcaaagttggtgatatcttccacttgagggtagagctttgtgttgttggtcttcatcgcccacaccgggtgggtgtagatcatatcaaacaggaggatgggacttgcatagctgttagcattgtatcatatgcacaatcttccgatattaagaataatttggatgtcttggtgtattctggagcaatgacagctatagccaatcagaagatagagggtaccaacttagcactcaagaagagtatggacactaacacaccagtccgtgttatccatggtttcgtcactcacctcaatggaaactgccagcgaaagaagatccctacttatatatatgggggtttatatatagtcgagaaatactggagggagaaagagggtaatgatcgttatgtttatatgttccgactgagaagaatggcaggtcagaaacacattgacatccaagacattctgaattcaggacaagctgaatcatatggtggtattatcataaaagatatatcccgaggattggagaagatccctgtatctgttgttaattcaatatctgatgagtacccaatgccctatcgctacattgcacacctgcagtacccccgtaactaccagccagcacctccagcaggctgtggttgtgttggtggatgctcagattctaaaaggtgtgcatgtgcagtgaaaaatggtggggagattcctttcaatgataaaggccgcatcttagaagcaaaacctcttgtttatgagtgtggaccttcatgcaagtgccctcctacatgtcataacagagttggtcaacatggccttaggtttcgtttgcaagtcttcaaaaccaaattgatgggctggggagtaagaactcttgacttcataccatctggaagctttgtatgtgaatacattggagaagtgttggaggatgaagaggcacagaaaaggtcgaccgatgaatacttattcgctattggtcataattattatgatgaagccctttgggagggcctatcaagatccataccctcacttcagaagggtcctgataaagatgaggaagctggctttgctgttgatgcttcaaagatgggcaactttgcaaaattcatcaaccatagttgcacccctaacctttatgcacaaaatgtcctatatgatcatgacgacaagagtgtacctcacattatgttctttgcctgtgaggacattccaccccgccaagaactttcataccactacaactatacaatagatcaggttcatgatgccaatggtaacatcaagaagaaaaaatgtctctgtggctctatagagtgtgatggttggttgtattag

SEQ ID NO: 12879 - DNA, 1521 bp, Oryza sativa
  Clone ID: TFbOSC409873j.C1.o16.gm
atggctggaactcggcagacaacttcagttccgatggataatgcagcagttgttgatgcaaaacccttgcgcacattgactcccatgttccctgcggcacttggtctgcacactttcactgctaaagaaaactcatcttcgattgtctgtattaccccgtttggaccatatgctgggggcactgaacaggcaatgcctgctagtattccaccaatgtttgcatcaccggctgcccctgcagaccccaaccagaggcagccatatgctgttcacttgaatggagctgctcctgctaacggtacagcaaacaacacaggggtcatccctgatttgcaaatagctgtggcaggtacagtggaatctgctaagaggaagaggggcagacccaagcgcgtgcaagattcttctgttccttcagctcatttggttccttcagctccaggaggtaacatcactgctgtccagacgcctccttcagcaaccacagatgaatctggtaagaagaagaggggacggcccaagcgggtacaagatgtacctgtcctgtcaactccttcagctcctcagacaccttctgctgtcaccttaccagaagatggtaagaggaagagagggcggccaaagcgtgtgcctgatggtgcactgattcctttaagtcactcagatgatcctagggaatctgttgataatgtactcatgatgtttgatgcactgcggcggaggctcatgcagttggatgaggtgaagcaaggagcaaagcagcaacataacttaaaggccgggagtatcatgatgagtgctgaacttcgtgcaaataagaacaagaggattggagaggttccaggtgtcgaggttggtgatatgttctacttcagaatagagatgtgtctggttggactgaatagtcagagcatgtctgggattgattacatgtctgctaagtttggtaatgaggaggatcctgtggctatcagtatcgtgtcagctggtgtgtatgagaataccgaagatgacccagatgtgctggtttacactggacagggcatgtctggaaaggatgaccaaaagcttgaaagaggtaatcttgcacttgaaaggagtttgcatagaggagaagttattgacagaaacagtatcattggagaagatgattacatctttgagacaccgtcttctgagcagaatttaagatggaactatgcaccagaattactgggtgaacccagtctttctgactcaattttgtatgatcatggtgacgagggatatccacatatcgcattctttgcaatcaagcatattcctccgatgacagagcttacatatgattatggtcagagccaggaccctgccgccctttatttgggcggcaagctgacgtggcacatgggcgcaggacggacgtttttgggggctatgaattttgcacgtggtccccttgccgtcttctgtctgggcggcaaggggcctccgtgcaaaatttgcaagggcggcaaggggcccagatgcaaaaagaactag

SEQ ID NO: 12880 - DNA, 1992 bp, Oryza sativa
  Clone ID: TFbOSC422929j.C1.o3.fg
atggagaactcggaagatgaagcagagagtgacaaactacccttagacttggagccattgcgctcattagcaccaaagtttcctactattttgggatatgatgtggaaactcaatcaactgatccactgttagtttatgccacaccatccataccttgctcctcatcagaacagcctcaagaagccccagcttcattttctctgcccttaccaaagtcacccgtccctataaaggctacacccatctcagcggcatttccaacaccgcaacatgaagatgaatcatcagatcaagattacaagcccttttgcaagaataaaaaaccagcgatgccgaagagagccaagaggccccagcaagctgagaaatccaatgatgctaacatcaagcgcagatcaataaggaggaacctggacaacgagttcaacttgtgctcatcctcatcagacaacccaaaggaatcggtggaaggaatcctgatgatgtttgattcacttcggcgccgtgtactgcaattggatgaaaaagaggatgcaagcaggcgggctgacctgaaagctggcactctcatgatgcagaacaacctcagaatcaacaatcataagatgatagggcatgtgcctggtgttgaagtcggtgacattttcttctttaggattgagatgtgcattgttggtttacatgcaccagccatgggtggcattgattacatctcttctaagaacaaagatgagactctggctgtctgcatcatttcatctggaggctatgagaatgacgatgatgacactgacattttggtgtacacaggacagggaggcaacagtcgtcacaaggagaagcacgatcagaagcttgagagaggtaaccttgctctcatgaacagcaagagcaagaagaatcagatcagggttgtgcgcagcgcacaagaccccttctgtaactcaggcaaaatatatatttatgatgggctttatcgtatcgaagacacttggacagacacggcaaagaacggatttaatgttttcaagtacaagctgagaagggacccaggacagcctgatggaatttcactttggaagatgactgagaagtggaaagcaaatcctgccacaagagaaaaggctatattgttggatttatcatcaaaggttgaacacctacctgtgtgccttgttaatgatgttgatgatgaaaaagggccaagtcacttcaattatgttgctggagtgaagtatttgagacctcttaggaagacaaaaccattacaatgttgcaaatgtcctagtgtctgcttgcctggtgaccctaattgttcgtgtgcgcaacagaatggtggtgatcttccttacagtgcaacgggattgctggcaaagcacactccgatggtttatgagtgctcctctaactgtcagtgttctcataattgtcgaaacaggatcacacagaagggtataaaactgaactttgaggttttctggactggagaccgtggctggggtctgcggtcgtgggatcctatccgtgctggcacattcatttgtgagtacgccggtgaagtcattgatgaaactaagatggacatagatgttgaggaagacaaatatacctttcgcgcttcatgtcccggcaataaggctttaagctggaatttgggagaagaattacttgaagaaaaaagtacggctgtgataaccaagaactttaagaaactaccaatcatcataagagcaaacaatgaagggaatgtggctcgttttctgaaccatagctgttctccaaatctcctttggcaagctgtacagtatgaccatggcgatgacagctacccacatatcatgttttttgcaatggaacatatccctcccatgactgaactgacttatgattatggtacaagaggtgctccccctggctttgagggaaaacccttcaaagcttgcaaactcaaatcatgcctctgtggctctaagcattgtcgaggatattaa

SEQ ID NO: 12881 - DNA, 2220 bp, Oryza sativa
  Clone ID: TFbOSC401693j.C1.o9.gm
atggagatggacacatcgccatcgtcttcggcgccgtcgtcgccggcggcgtcgtcggactccatcgacctcaacttcctgccgttcctcaagagggagcccaagtcggagccggcttcaccggagcgagggcctctgccgctggcggcagcggcaccgccgcctccacctccgccgccgcccccaccaccgccaccgcaggtgcaggcggcgacggtggcaactccggtgccggcgacgcccgacctctcggcggcggcggtgatgacgccgctgcagtcgctgccgccgaaccccgaggaggagacgctcctggcggagtactaccggctcgcgacgctatacctgtcgtcggcgggggcggccggcgtaatcgtgccggcggcggcgccggaggcctccgcgggggcggtggcgcagcccgggtcggggtccggcgcgaagaagcggcggccgcggtcgtcggagctggtgcgggtgtcctcgctgagcgtgcaggaccagatctacttccgggacctggtgcgccgggcgcgcatcacgttcgagtctctccgcgggatcctgctgcgggacgacgagcgcgcggaggtgctcggcctcacgggcgtccccgggttcggcgccgtcgaccgccgccgcgtccgcgccgacctgcgtgccgcggcgctgatgggggaccgagacctgtggctcaaccgcgaccgccgaatcgtggggccgatcccggggatctcggttggggacgccttcttcttccgcatggagctttgcgtgctagggctacacggccaggtgcaggctgggatcgactttgtcacggctgggcagtcttcctcaggggagcccatagccacatctatcatcgtgtccggtgggtatgaagacgatgacgatcgcggcgatgtacttgtgtacacaggacatggtggtcgtgaccccaacctccacaagcattgtgttgatcagaagcttgagggtggcaaccttgccctcgagcgtagcatggcctatggtattgagatccgcgtgatccgtgctgtcaagtccaagcgcagccccgtcggcaaggtatacttctatgatggcctctataaggttgttgactactggcttgaccgtgggaagtctggcttcggtgtttacaagtacaaaatgctgcgcatcgaggggcaggagtcgatgggctctgtaaattttcgactagccgaacagcttaaggtcaatgccctgactttccggccaacagggtatttgggctttgatatttccatgggtcgagagatcatgccggttgcactgtacaatgatgttgatgatgatcgtgacccacttttatttgagtatctggcgcggccaatatttccgtcctctgcagtccaagggaagtttgctgagggtggtggcgggtgtgagtgcactgagaattgctcaattggatgttactgtgcacagaggaatggcggtgagtttgcatatgacaagctcggtgctcttttacggggcaaaccactggtatatgagtgtgggccatattgccggtgcccacctagttgccccaacagggttagtcagaaggggcttaggaatcggcttgaggtattccggtcaagggagactgggtggggtgttcggtctttggatctcattaaggctggaaccttcatctgtgagtttagtgggatagtgctcactcatcaacagtcagagattatggctgcgaatggtgattgcttggtgcggccaagcaggttccctccaaggtggttagattggggtgatgtctctgatgtctatccagagtatgtggcaccaaacaatccagctgttcctgacttgaaattttcaattgatgtgtcaagggcaaggaatgtggcttgttatttcagccatagttgcagtccaaatgtgtttgtccagtttgtgctgtttgaccattacaacgcagcttatcctcacctcatgatctttgccatggagaacattccaccattgagggagctaagcattgactatggaatgattgatgaatggggcacggcaattcagagcaaggttgtcacgccaaggatgttggcatggcaaggctatgacgtagcacagtctttcagtgtgtcacgttccatcatgccagggcgaataacagaagcttgcatatgggatgatgtttcaagccttcccatgaggaaggcaaagtcacagctcattgtcatccactag

SEQ ID NO: 12882 - DNA, 1785 bp, Oryza sativa
  Clone ID: TFbOSC416986j.C1.o5.fg
atggcgtctccgccgccgccgcctcgcctcctcactcccaagcccgaccccgacgcccccctacccccgctcccttaccccgaccccaacctcgtccaaagcatgctcttctccgcccagtccccgcaggcgcagccgcaggcgccgccaccccacatccaaccccccgcctccgcctccgccgaggccccctccggcgacgagaagaataagaagaagaagaagcgggcccgcgcctcccaggagatggtgcgcatcaccaaccttagcatcgccgaccacctccactaccgctccctcgtccgccgcgcccgcctcaccttcgaggccctccgcgccatctaccaacgccaggacctcgccaccgccgggggaatccgcaaccgcttcgacctccgggcctccagcaagatgctctccaagggcctctggatgcaccgcgacatccgcaccgtcggctccatccccggcctcctcgtcggggactccttcttctaccgcgccgagctctgcgtcctcggcctccacaccgcccctcaggccggcatcggctacatccccgccagcatcgtcgaccagggccaccccgtcgccaccagcatcgtctcctccgggggatacctcgacgacgaggacagcggcgacgtcctcgtctactccggcagcggcggccgcctgcgcaaccgcctcgaccacagcgccgaccagacgctccagcgcggcaacctcgcgctccactacagctgccactacggcatcgaggtgcgcgtcatccgtggccacgcctgcgaccacagccccagcagcaaggtctacgtctacgacggcctctacagggttgtcacctccaccttcggccctggcaaatccggccgcgacgtctgcaagttcaagctcgtgcgcatccctggccaggacgacctcggcagcaaggcctggcataccgcagcggagctcaaggatgcactggattccaagatccgcccgcccaagtacatctcgctcgacattgccaagggcaaggaaccattccgcgtgcccctctataacaagctcgacgacgacaggtcacccctcttctacgactacattgcctgtcccgacttccccaccacccagcagctgctcaaacgccagacccagaggggctgccactgtgccgagctgtgcggctccaggtgcagctgtgagaggaagaacaggggggccgacggccctgtgtacacctccgatggcatccttctcaggggacgccccttggtgtacgagtgcggacccctgtgtggatgccccatgacctgtcccaacagagtcacacagcaagggatgaagcaccgcctcgaggtgttccgttccaaggagacaggctggggtgtcaggacgcttgacttgatacagccgggtgccttcatatgcgagtacgccggcgacgtgctctccttggacagccactcaggtgacgcccctctgcctccgatggaggacgggagctccatcatcgacccgaccaagttccccgagagatggagggagtggggagatgcatccgtggtttacccggacagggtaccccatttccccctatttgcaggggcgcgctaccgactcgacgtgtcacagaggaggaacgtggcttgctacattagccacagctgcagtccgaatgtgttccttcaatatgtaatccgtggcaatgaggatgaatcctaccctcacatgatggtgtttgccatggagaccatccctccaatgcgggatctgtccatcgactatggcttggactag

SEQ ID NO: 12883 - DNA, 1380 bp, Oryza sativa
  Clone ID: TFbOSC401218j.C1.o25.fg
atgggtgggagcagcgcaagcccgtgtgacctggacagggagttcgcgccccaaatcgcccagctcctcgccacccctcctctccaacccgcgcaggaatactacaatgggctcatacagtccaggaaacatgatggtataagagtgaacttcagcagcaagcatgggaaaggtgtttgtgcgaacaaggagtttgcagaaggggaccttattctgaaggatcaaatattggttggtgctcagcacagtcttaacaagattgattgcgctgtgtgcagttattgctttcgcttcattggttctatagagttccagattggacgaagattgtattggcaaagcgttggttcaagcagtgactgcactaataggaggcattgccatgagagtgatttgggatcgagtgccagttcttctggtgcaacaaaggaaaacagtagtactttgccagaagaggtcttaggatcacttattactggtgacatgtcactgcctttcacagaccattttagtttgcctcaagttgttccttgtcgtggatgtgaggaagaacgctactgcagccaatcatgtgctgattccgactgggaaacttatcactctttgctgtgtactggatctaagactgaaccatcccagagatctgctcttcagaaattcatagaacatgcaaatgggtccaatgatatttttcttgttgctgccaaggctatcactttcactctgctgaggtacaagaaactcaaaacgcagcctgaatttcaaaataacacagatgaatcaaacttttctttgcttatggaagcatggaaaccactttcgatgggctacaaaaagaggtggtgggactctgttgctttgcctgaggatgttgattcctgtgatgaagatacatttaggcagcaaattagggatctagcacttacgatcattatcttctgtgtttcgcagtcattgcagcttctcaaggatgctagtggtttggttgttccgtctccagtggaagactatttcatacatattgatgatcttccagatgatgagaagtgcaacatatcccaggaggaagctgaaaaggttacaaggccatttctagatgctttaggtgaagactatgcagctccttgtgaggggacggcattctttcctttgcaaagctgtatgaatcattcatgttgtccaaatgctaaagcatataaaagggatgaggatactgatggtaatgcagtgataattgctctggagcctatcaagaaggacgatgagattaccatatcctacatcgatgaggatgtctcctacgaggagaggcaggcggagcttgcagattatggattcatctgtacgtgccctaggtgccaagaagaaaagcccaactga

SEQ ID NO: 12884 - DNA, 2055 bp, Oryza sativa
  Clone ID: TFbOSC900416j.C1.o2.fg
atggagatggacacatcgccatcgtcttcggcgccgtcgtcgccggcggcgtcgtcggactccatcgacctcaacttcctgccgttcctcaagagggagcccaagtcggagccggcttcaccggagcgagggcctctgccgctgccggcagcggcaccgccgcctccacctccgccgccgcccccaccaccgccaccgcaggtgcaggcggcgacggtggcaactccggtgccggcgacgcccgacctctcggcggcggcggtgatgacgccgctgcagtcgctgccgccgaaccccgaggaggagacgctcctggcggagtactaccggctcgcgacgctatacctgtcgtcggcgggggcggccggcgtaatcgtgccggcggcggcgccggaggcctccgcgggggcggtggcgcagcccgggtcggggtccggcgcgaagaagcggcggccgcggtcgtcggagctggtgcgggtgtcctcgctgagcgtgcaggaccagatctacttccgggacctggtgcgccgggcgcgcatcacgttcgagtctctccgcgggatcctgctgcgggacgacgagcgcgcggaggtgctcggcctcacgggcgtccccgggttcggcgccgtcgaccgccgccgcgtccgcgccgacctgcgtgccgcggcgctgatgggggaccgagacctgtggctcaaccgcgaccgccgaatcgtggggccgatcccggggatctcggttggggacgccttcttcttccgcatggagctttgcgtgctagggctacacggccaggtgcaggctgggatcgactttgtcacggctgggcagtcttcctcaggggagcccatagccacatctatcatcgtgtccggtgggtatgaagacgatgacgatcgcggcgatgtacttgtgtacacaggacatggtggtcgtgaccccaacctccacaagcattgtgttgatcagaagcttgagggtggcaaccttgccctcgagcgtagcatggcctatggtattgagatccgcgtgatccgtgctgtcaagtccaagcgcagccccgtcggcaaggtatacttctatgatggcctctataaggttgttgactactggcttgaccgtgggaagtctggcttcggtgtttacaagtacaaaatgctgcgcatcgaggggcaggagtcgatgggctctgtaaattttcgactagccgaacagcttaaggtcaatgccctgactttccggccaacagggtatttgggctttgatatttccatgggtcgagagatcatgccggttgcactgtacaatgatgttgatgatgatcgtgacccacttttatttgagtatctggcgcggccaatatttccgtcctctgcagtccaagggaagtttgctgagggtggtggcgggtgtgagtgcactgagaattgctcaattggatgttactgtgcacagaggaatggcggtgagtttgcatatgacaagctcggtgctcttttacggggcaaaccactggtatatgagtgtgggccatattgccggtgcccacctagttgccccaacagggttagtcagaaggggcttaggaatcggcttgaggtattccggtcaagggagactgggtggggtgttcggtctttggatctcattaaggctggaaccttcatctgtgagtttagtgggatagtgctcactcatcaacagtcagagattatggctgcgaatggtgattgcttggtgcggccaagcaggttccctccaaggtggttagattggggtgatgtctctgatgtctatccagagtatgtggcaccaaacaatccagctgttcctgacttgaaattttcaattgatgtgtcaagggcaaggaatgtggcttgttatttcagccatagttgcagtccaaatgtgtttgtccagtttgtgctgtttgaccattacaacgcagcttatcctcacctcatgatctttgccatggagaacattccaccattgagggagctaagcattgactatggaatgattgatgaatgggtgggaaagttaaccatgtag

SEQ ID NO: 12885 - DNA, 379 bp, Oryza sativa
  Clone ID: TFbOSC9932j.C1.o1.np
gcgtcaaatatttagaaacggagggagtattttatttattttgtgcgcaacattattgatgatgagacttgtgaagaaaggcttgaggacatgagaaggcgtggagataagaatttctacatgtgtaaagtcaaaaaggactttgtaattgatgcaacattcaaaggaaatgattgccgcttttttaaccacagttgtgaacctaattgccagttacagaaatggttagtcaatggcaagacaaggctaggtgtgtttgcttcaaaagctatagaagtgggggaacccttgacctacgactacaggtacctacattatggtcctgaaatagaatgtttttgcggggctcaaaactgccaagggaatatgtctgtgagtg

SEQ ID NO: 12886 - DNA, 1572 bp, Oryza sativa
  Clone ID: TFbOSC401276j.C1.o12.fg
atggcgggccctcccggcccggcaccgggcacctcctcctcctcctcctccctgcccagccgccgccgccgccgcccccctccgcgcctcggccgacgccgcggcggcgatgatcaacagcccccgcatcctccaaaggcctcgtcggaggctctcccctgcgcggcctccccgcccgcgcggtgccgcggcggtgatcaccagcccccgcatcctcccgaggccgcgttagaggctctccgcggcgcggcctcccctcccgcgcggcgccgcggcggtgatctacatccctcgcatcctcccgaggccgcgtcggaggctctccgcggcgcggcctcccctcccgagcggcgccgcggcggtgatcgacagccctcgcatcctaccgaggccgcgtcggaggctccctccggctcggcctccccgcccgcgcggcgccgcggcggcgatcaacagcctccgcccgctgtggcggtggcggtgactagtgaaggcggcgtgggtccccgccgctcgttccgcatcagcctgcggcaccgcgtgcgtgtggtcccgtgggtgaagccacccgtggcgaggaagcccaaggaccccgcgaagcccccgcgcccgtcgatcgaggcgctcgcggcggaatgggcgaaggagaaggcagcttccggggcccccgaggaggagtgcgtcctgcctttcctccagaaagatgcgcctaagaagctcgacattgtaaaagttcttggactagatggatttggatatatggatacagtgatattgagcttgaagagttacaggaaaaacattcccattacagtaggaaatttcgtgattgtgatgcaaagctgcataaggcttgttctgaaaaaggtgatggatgctgtcctcgacatgatgcaggtccaacagatggaagccttccggcgcttacccctcccacacactttccaagagttcaacattgaccctataaagaaagaggaattggacaatgggacagaaccacctccatataaaattaagataattcctacaggtctctattggttagctgctctcgggcttgtcactgctcagatgagtgcactaacaaaccatttcgccgacagaaaaagattgagatcgttaagtggaatacttctgcagacacaatattgtggatggggatctagagcactggaagccattgagaaagatgattttgtcatagaatttgttggagaagttattgatgatgagacttgtgaagaaaggcttgaggacatgagaaggcgtggagataagaatttctacatgtgtaaagtcaaaaaggactttgtaattgatgcaacattcaaaggaaatgattgccgcttttttaaccacagttgtgaacctaattgccagttacagaaatggcaagtcaatggcaagacaaggctaggtgtgtttgcttcaaaagctatagaagtgggggaacccttgacctacgactacagattcgagcaacattatggtcctgaaatagaatgtttttgcggggctcaaaactgccaagggaatatgtctactccatatatcctaaactttgagtga

SEQ ID NO: 12887 - DNA, 3477 bp, Oryza sativa
  Clone ID: TFbOSC421726j.C1.o17.fg
atgcagcctgaattagtccccgagtggaaaacttggaaacaggaagtcatgaaacagttcttttcatctcatccagttggcaatgctggcaactttgaacaacacaattgttatgatgatccaggtatggatcaacaagctcgtataaaacattccaaactcgaagtccgcagaggagaagctcatttttcacaagaggatgatgctaacctcaacacattaagtgaagacccaaacaaaagtaacctccccagtatctccatcattcatgaagctgtaggaccattagagtcaagagatcagaataaaactgctgccttccccagtacttctggtgtccaggacactggagaaccaaatagtgctttacacaatgtcagacatgaattggattcattcaagagttctcggcagtgttctgcatatatagaagcaaaaggaaggcaatgtggtaggtgggcaaacgatggtgatatttactgttgtgtgcatcaaagtatgcattttgctgaccattcgtctagggaagataagtcacttactgttgaaactccactgtgtggggggatgactaatcttggtagaaagtgcaagcatcgagcccagcatggttttatcttttgtaaaaagcaccgcttccaaacaaatccagatgcaatgagctcagatagtttgttaagttcgtctgagggccgtaagtgggaagagtcacagaaaagcgtggagaagatgtcttcctcaaatgcaacttgtagtgtaggctcagagcaggcaaataatttccaggttgctgtgcacatgaaagtgacaccaaccatggctgttgagacaactagtgataaagttaacgtgtcagagaacgctgatctctgctaccccatgtcaacttccatggaaaactctaacttagatgcttctatttgcattggaattcgctctcatgacaatattgctgaatgccaggattatgccgtacgacacacactttactgtgagaggcacataccgaagttccttaaacgtgccagaaatggaaaaagtcgactcatctctaaagatgtctttatcaatcttttgaagtgttgcacgtcaaggaaagaaaaactgtgcttacatcaggcatgtgagtttctttattggttcttgagaaacaatctttctcaccaacgcccgggtcttggtagtgaccatatgccccagatattagctgaagtgtcaaaaaatcctgatgttggagaatttttgttaaaactgatctctagtgagagagaaaagctttcacatgtttggggctttggtacagatagctctaatcaaatgcattctgagaaccaagatggatcagtgatggtgttacgtgaagatgggacacatccttcacctggtctgaagtgcaaaatatgttctcaggagttctctgatgatcaaggacttggattacactggacagaggttcacaaaaaagaagtgcggtggcttttcagaggctattcttgtgctgtatgcatggactcatttaccaacagaagagttctcgaaaggcacgtgcaggaaaaacatggcgctcagtatctccaatattcgacactcttacgttgtatatcgtgcaacagcaactttttgaacacagatcttttatggcagcacattgtttcagatcattctcgagatttcagccttctggatcatgtccctcgacgacctaggggtcaatctatcaaaagaacagaaagggcaagtgatgagctcctttatgataaccataaccttggtaaggatgatggtttacagaagttcacctgcagattatgtgggatgatgtttgatcttttgccagatcttggccaccaccatcaagttgctcatacaaactcaggtacagtcagtgatatcccttcaggacgtgaaaagtatcagtttaaccgtggtcggcactattattcagccttcaagaaaagtttaagaccatccggctcattgaagaagaggactagttctggagttgagaaacattttaaggctcaaagcttggatctatctatggatacatcacacattgtggaatctgagaccaccacccttggtaggttactggatttccaatgctcagacgtggcattgactttattttcaaagattcaaaagacaagaccccacccaagcaaccttgatattctgtctattgcccgttctgtttgctgtaagacaagccttcgtgctgcattgaaagctaaatatggaatcttgcctgataacatatttgtgaaagctgcaaagctttgtagtgatgttggcatccaaattgattggcatcaagaagaattcttttgccctaaaggttgcaagtccaggtctagttctaattccttgctccctttacagcctacccaagttgattttgtgatgagtcctccaattggtgatgagatatggggcatggatgaataccactatgttcttgattcagagcactttggttggaatcttaagaatgagatggttattgtttgtgaagatgttagctttggcagggagaaagttccagttgtctgtgccattgatgtagatgcaaaagaatttccatatatgaaacctggagaaattttgcaaagtgaaaattctctgccctggcaaggtttccactacgtcacaaagcgtttgatggattcatctcttgttgattcagagaacactatggttgggtgtgcttgttctcatgcccattgcagtcctgaggaatgtgatcatgtgagcctctttgatagtatctatgagaacctagtggatctccatggtgtacctatgcgtggtagatttgcatatgatgaaaatagcaaagttattttgcaggaaggatatcctatatatgagtgcaattcatcatgcacttgtgatgcctcctgtcagaataaagtactgcagagaggactgctggtaaagttggaagtcttcagaactgagaataagggttgggctgttagagccgcagaacctattccacagggcacatttgtatgtgagtacattggagaggttttgaagatgaaggatgatggggccataagacatgtagaaaggctagaaatctattggaatttctccggtgcattccataaactgataagaaaattattggatctcagggaggcaaaaagtggtagcagctacttgtttgaaatcacttctcagattgacagggaaagagttcagactacagggactactgcatacgtgattgatgccacaagatatggcaacgtatcccgttttattaatcatagctgttccccaaatctcagtacgcgtttagtttcggtggagagcaaagactgtcagcttgcgcacattggtttgtttgcaaaccaggatatcttgatgggagaagaattggcctatgactatggacaaaaattgctacctggtgatggatgcccctgccattgtggtgctaagaattgccgaggacgtgtgtattga

SEQ ID NO: 12888 - DNA, 2091 bp, Oryza sativa
  Clone ID: TFbOSC401583j.C1.o35.fg
atggaggtctcgccggtgccgaagccgccactggaggcggcgcttgcgctgcgccgcagcgttcggtgcttgaacaggacgcgccgtcccacttacgtggagcaggaggagcccaaggagagtgctggccggcggcgcggcggcaagaggaagcgggaagaggagaagaaggagccggtggcgcagcacgccatgaagccggtcaggatgggcgatgcagcctcggagaggaagccctcctcggaggggaagccgatgcccgcaattgcggcggagccggtttcttgtgccgggttcgcacgacctgctgccgaggatgatgtccttggcaacgggaagagtgcgaaactgcgggtgaaggaaaccttgagggcattcaccagccattaccttcaccttgtccaggaacgtatgttatctgacaatgcacttgtggaatttcaggaggagcagaaaagagcacaagcggtgttacaggaaggccagaagcgtccatcaaagcggcctgacttgaaagccattacaaagatgcaagaaagcaatgccgtgctttatccagagaagataataggggaactacctggtgttgatgttggggatcaattttattctcgtgccgagatggttgttttgggcattcatagtcattggctgaatggcattgattatatgggaatgaaatatcagggaaaggaggagtatgcaaacctaactttcccactggcaacttgtattgtcatgtcgggaatatatgaagatgatcttgataaggcagatgaaattatttatactggtcaaggaggaaatgatttactcggtaatcatcgccaaattggctctcaacaactgcaacgtggaaatttggcattgaagaacagtaaggataatggcaatcccataagagttatccgaggacatatatcaaagaatagctacactgggaaggtctacacctatgatgggctgtacaaggttgtagatgactgggtgcagaatggagtacaagggcacgttgttttcaaatataaattaaagcggcttgagggacagccatcactgacaacttctgagatagattactatgtttggtcatgctttgtttatagtgtgccattcttagtgacgctgatatcatgttgtatgacctgtgccttgctactttctaggttggtttgtgatgacatatctggtgggcaggagaatcttcctattcctgctactaatttggttgatgacccacctgttcctccaactggttttgtgtactccaaatctctaaaaattccaaagggcatcaagattccatcttattgtaatggctgtgactgtgaaggagattgcgcaaacaacaaaaactgctcatgcgcgcagcgcaatggttctgatttaccttatgtatcacacaagaacattggcaggttggtggagcccaaagctattgtatttgaatgtggtgctaattgcagctgcaacaacaactgtgtaaatagaacatctcagaaaggtctgcagtatcgcttggaggtatttaagacagcttcaaaaggctggggtgtcaggacttgggatactatcctccctggggctcccatctgtgagtacactggtgtgctgaggaggactgaagaagtagatggtttgctgcagaacaattacatatttgatattgattgtcttcaaactatgaagggtctggatggaagagagaaaagggctggctctgacatgcatctgccgtctcttcatgcggagaatgattcagatccacctgcaccagagtattgcattgatgctggctctattggcaactttgcaaggtttataaaccacagctgcgagcctaacctttttgtccagtgtgtcttgagctcccataatgatgttaagctggcaaaggtgacgctctttgctgctgacactatacttcctcttcaggagctttcatatgattatggctatgtcttggacagtgttgttgggcctgatggaaatattgtcagctgccttgcttctgtggtgcaccgtactgccggaagcgactttattagatctgcacctgtttgcatctatttggaatatgaaccactctaa

SEQ ID NO: 12889 - DNA, 3879 bp, Oryza sativa
  Clone ID: TFbOSC400435j.C1.o7.fg
atgagcgggctggatctccgggagatgttaagcagcgctgcgcggcggcatacgtggaggagaagcggatggggggcggagtggggcggcggcgacgacgctcgctcggccgcgcttccggctcgctgtcctcctccccctcctcctcgtcgtcccgcggctgcgggtgggcgtggcgacgaggggagcggtggagtgcgggggcgcggggaggaggggacgagtcgtggtggaagcggagcgaggcgcgaggacgcggcggggaccgggaggaatgcggtggccgtcgtcgccggtggctcggccacgtccggcgcggagcgggttgctgcgcgagcggaggacgggcggcgatcgatggacgggccgacgctggaactctccgagatgatgctccacgcggcgcagccatggagaagccgatgcacgcagcgtgacgttcgcccgggcgcggttcctcctcgtcccgtcgctgcggatgggcgaggcgagggcaccagtacagtgcgagggcgcgtgctggaggggacgactcgtggtggaggcagaggaggtggaatggagcgtgagcgcgaggtggtggcgccggcgagaaatgcggtggccgtcgccggtgatttggccacgcacggcggcgagcgggttgctggccccttggtggcgaaggagaagagaaatggcggcggtgagttggggacgaagagggggctagagaagcgggccccgcttccgccgcccaagcgcagggtggtgtccgctaagcgccagtttccaccagatttcggtagggactctgctgttccactcggccgcggccggggccgtggtggtggtgttcgtccgtcggatggggcgcctgcccgtgctgttctgggtgagaaggtggcgtctgcgggtaatggtgattcaatggcgaatgtgcatcatcatgctgtgatggacacggtcttgatgaaatcttcacatgcttcggatgagaatctggttgctttcaaagttggttcaccagagaatggtgcagaaggggcagcaaggggaaagggagcacacaatggtgaattgctgggaaagagggaagtgttggctcaagctgtgaatttgcttcccatgaggaggactgtatctgcgacgcaccgcttcactgctgggtgtgggagggacgctgcagctccacttgctcgcagagaagagggtaaggtgggttcaggtttggaagtcatgcctgttgatgttggtgggggtgtgtcaaaggaggtgatggctacggatggcagtaaacattcggttaaccagtgtacggcgaacattgttggagctgtcggtgttttggatggaacagtacagtaccaggaattggaggagggtgaggtggctgatgaggcatactgtgatgtagagtcacaaaaagttgttggttgtgattcttttgatgattctgcaggtgaaagacatgagggtgttgttcctgtaacgtttgctgttactgaagttttgacaagtcacgcttatgatgagatgatgcaaattaaggcattgcaagaagggggcagtgatgctgcgcaggaaactgaacatgacttgccaatgggaggcaaatgtgaaactatcttacctgatgcttctcctaaatgttcgtttggtggtccttcaaatgaaattgtccacggcaagagagtgttggggagtcatggcatgaaaggggaagttcccagtcttgcaattgaagatcatggtggcattgctcaaattgaccaagaactggaggacgttgagatgactacaggggaataccgtgttcaggatgctcaaattgccacccatgttatcccacacgagtctacaactggtagacatgagggggggctttgtgcatctgcagctgctgaagatgttaaggtgatgaacaaatacaaagggaccttacccaaaggtgctgctaaatcatcgatgaatattgcaacaggagtatttggtgatggtatcatgagaagtaagatactatcaacagctagaaaagtagtcaagccacctgtcagagcaagccataagcctccattgaacactctgcatagacccttctccacaaatagtgcttcatttggtcataagaagttgaaggtaaaacgtccagatcaaagtaaagatattcctatgaagattgcctctacatctggattggcgggcaaggacaaccttatcgatgaaaaggctttgagcttggaagatgatgatattttgaaggcactagttgttcatgatggaaagcttgaggtgtatctcaatgttccctcatgcgttcagcttcataggcaacatggaagtgggaatgctgatgataggagcaaaatcaggatgttgtgcaggaggtttcagtttatatgcagggctctcttacatgccgtcgaacagggttcattgaagattcgaagagttgaccttgcagctgataaaatcatcaggaaattgccaggctttaccaaacctggacctactgtgggaaatgttaatggagtggaagttggtgacgaatttatgtacagagttgagctagcccttgttggtctccatcgcccataccagggaggaattgataccaccgattataatggagtgcttgttgcaataagcatcgtttgttctggaggttatcctgatgaattgtcaagctcaggtgaactaatatacactggttctggaggaaagcctgctggtaagaagaaagatgaggatcaaaagctagagagggggaaccttgccttgaagaattgcatcgagacaaagacacctgtccgagtgattcatggattcaaaggtcaaaatagagaggacaacagtcattcaagagctaaacaaatcctaacatttacttatgatgggttgtaccttgtggtggattgctggacagaaggactaaaaggttcaaggatcttcaaatacaaattacaaaggattcctggacaaccagaacttcctctgcacatagctaaagggctgagaaggtctctttcacgtccaggcctctgcatagctgatatatctcaagggaaagaaatggatcccatctgtgtgatcaatgatgttagtaatgtccatccaacatcttttcagtacatctctagaatcaagtacccgtcatggcttacaaaaagacatcctcagcatcatggttgcgattgctcagatggctgcatagattctactaagtgcttttgtgctgtgaagaatggaggaaaaatcccattcaactccaatggtgcaattgtccatgataaacccctcatttttgagtgtggtccatcctgtaggtgccattcttcatgccacaacagggtaagtcagaagggtatgaaaatccacctggaagttttcaggacagccaataaaggttggggtgtaagatccctaaggtccatctcttctggcagctttatatgtgagtatgttggtatcctgttgactgacaaggaagctgacaagagaacaaacgatgaatacttgtttgatataagccataattgtgatgatgaggattgctccaaggggaggccatcaactatttctagtctaaactcttctggtggttgctctcagaccatggaagatgtgtgcttcacgatagatgcgtctgagtacggaaatattggaagatttatcaaccatagttgctcacctaacctctatgcacaaaatgtgctttgggatcatgatgaccaaagggtgccccatatcatgttctttgctgcagagaacattcctccactccaagagctcacttatgactataactataaaataggtgaagtccgcgacctgaatggcagagtaaaagttaaagattgccattgtggttctccacagtgctgcggcaggctctattag

SEQ ID NO: 12890 - DNA, 2037 bp, Oryza sativa
  Clone ID: TFbOSC1067j.C1.o1.fg
atggatgcttcagcgctcagcaacccgcggctgcaggccatgctagaggaggagaagaggaaggcaatggcaaacgagttcgtggcgaagctgactgatgtttgctgggacaaatgcatcactgggagcattggaagcagcttcagcaacagcgaagcctcgtgtctgtccaactgcgcaaaacgctttctcgaactgaagatgctcaccatgcaacgacctcaagaagccccagcttcattttctctgcccttaccaaagtcaccagttcctataaaagctacaccaatctcagcggcatttccaacaccgcaacatgaagatgaatcatcagatcaagattacaagcccttttgcaggcagaaaaaaccaacgctgccaaagagagccaagaggccccagcaagctgagaaatctaatgatgccaacatcaagcgcagatcaataaggaggagcctggacaacgagttcaacttgtgttcatcctcatcagacaacccaaaggaatcggtggaaggaatcctgatgatgtttgattcccttcggcgccgtgtactgcagttggatgaaaaggaggatgcaagcaggcgggctgacctgaaagctggcaccctcatgatgcagaacaacctcagaatcaacaatcataagatgatagggcatgtgcctggtgttgaagtcggcgatatcttcttctttaggattgaaatgtgcatcattggtttgcatgcaccagccatgggtggcattgattacatctcttctaagaacaaagatgagactctggctgtctgcatcatttcatctggaggctatgagaatgacgatgatgacactgacattttggtctacacaggacagggaggcaatagtcgtcacaaggagaagcatgatcagaagcttgagagaggtaaccttgctctcatgaacagcaagatcaagaagaatcagatcagggttgtgcgcagcgcacaagaccccttttgtaactcaggcaaaatatatatttatgatgggctttatcgtatcgaagacacttggacagacacggcaaagaacggatttaatgttttcaagtacaagctgagaagggacccaggacagcctgatggaatttcactttggaagatgactgagaagtggaaagcaaatcctgccacaagagaaaaggctatattgttggatttatcatcaaaggttgaacacctacctgtgtgccttgttaatgatgttgatgatgaaaaagggccaagtcacttcaattatgttgctggagtgaagtatttgagacctcttaggaagacaaaaccattacaatgttgcaaatgtcctagtgtttgcttgcctggtgaccctaattgttcgtgtgcgcaacagaatggtggtgatcttccttacagcgcaacgggattgctggcaaagcacactccaatggtttatgagtgctcctctaactgtcagtgttctcataattgtcgaaacaggatcacacagaagggtataaaactgaactttgaggtattctggactggagaccgtggctggggcctgcggtcttgggatcctatccgtgctggcacattcatttgtgagtacgccggtgaagtcattgatgaaactaagatggacatagatgttgaggaagacaaatataccttttgcgcttcatgtcccggcgataaggctttaagctggaatttgggagcagaattacttgaagaaaaaagtacggctgtgacaaccaagaactttaagaagctaccaatcatcataagagcaaacaatgaagggaatgtggctcgttttctgaaccatagctgttctcctaatctcctttggcaagctgtacagtatgaccatggcgatgacagctacccccatatcatgttttttgcaatggaacatatccctcccatgactgaactgacttatgattatggtacaagaggtgctccccctggctttgagggaaaacccttcaaagcttgcaaactcaaatcatgcctctgtggctctaagcattgtcgaggatattaa

SEQ ID NO: 12891 - DNA, 1008 bp, Oryza sativa
  Clone ID: TFbOSC900159j.C1.o20.fg
atggtggtggattattggaaagaaggcccagagggctcgatggtctacaagtacaagttgcaaaggatcccaggtcaacccgagttagcattacacataatcaaggcaacgaggaagtccaaagttcgcgaaggtgtttgtgtgcctgatatatctcaaggaagggagaggattcccatacctgcgatcaacacaattgacgatacgcagccaacagcatttaagtacactacggaagtcatatatccacattcctatgcaaaagaacctctgaaaggctgtgattgcacgaatggttgctcagactctaatagatgtgcctgtgcagtgaagaatggaggtgaaatccctttcaattccaatggtgctattgttgaggcaaaacctctcgtatatgagtgtggcccatcatgcaggtgccctccaacatgccacaacagggtgagtcagcatggtatcaaaattccgctggaaatattcaagacggggaacaaaggttggggtgtaagatctctgagctctatctcttcaggcagtttcgtatgtgagtatgcaggtgaggtgctgcaagaaaatggagatgaacatgtagagactgatgagtacctttttgatattggtcatcactatcatgatgaagtttgggaggatcctaaatttgaaggcattttgggtctagaatcttctacgtccaagacaacggaggatactgaaggcagtaaaacaacggaggatactgaaggcagtactatcgatgcatcaaagtgcagcaatgttggaagattcatcaaccacagctgctcgcctaatctgtatgctcaaaatgttctctgggatcatgatgacatgaagaaaccgcacatcatgttctttgccaccgagaacataccgccgctgcaagagcttacttacgattacaattacggtaaagtcgaggataagaatggcaaggagaaggttaaaccttgcttctgtggttcgcctgattgctctcgcaggctgtactga

SEQ ID NO: 12892 - DNA, 3048 bp, Oryza sativa
  Clone ID: TFbOSC400961j.C1.o13.fg
atggagcccgggcaattgcccatggtggccaggcgctgcatccgccaccaacagtcgacgtcgcggctgatgagcgtggcgtggagcgcaatgcggccggctctccggcccatgagcttggtgaggccgacgccgttcactgcgccctcggtctccacgtgcccggtggcgatggcatgctgcgccgcgtccaccgccgtgtggaacccgaacgagccgccgctgctggacctcacggtggattgtcgccgcgccgcgcatcatgtcgtccccaccgccgttggggtgggacggaggaggagcagaggcggcgcagggggacgaggatgcaggaggtgggccagcgagggaggagcctggaagcttgttctgtccccgcagccgatgttttgcgaggaagggagcagtgaatcgggctatgttctatgtgttattgattcgctgaagaagaaaatcacatcggaccgctttgtttacatccagaaaagggtagaggagaatagcattaagcttagcccgattacactgcactctcacaatttgtcaaaaaataggcaaactagtacatccaacagtacagatttagtctcgaatttgctcacaaagaggaaagaagatgccctgtgtgctgtgaatagtcgtgagtcatctcctgatgaaagtgaaggtgccaattgccaagatgagtgttcatcgactgttattgtgggtggaaatctatccgcgaggaattctgtccgtccgattagactaccagaagtggcaacactccctccatatacaacttggatatttttggacaggaaccagcggatgcaagaagaccaatctgtacttggtcgtcgaaggatttactatgatacaaactgtggcgaagctttaatttgcagtgatagtgaagatgaagctgttgaggacgaggaagagaaaaaggagttcaaggattctgaagattgcataattcggatgaccattcaagaatgtggcatgtctgatgctgtgcttgaaactctagctcgagatatcgaaagggctcctgatgatataaaggccaggtatgagatcctacaaggggagaaacctgagggttcttccaagaaagtgtctgaacttaatgtcaaaatggaagacgtgtacggtgataaagatctggatgcagcattggattcctttgacaatctcttttgtcgccgatgtttggtttttgattgcaagctacatgggtgttctcaagatttagtatttccgactgaaaagcaggcaccattgtgcagctcggatgagggtacaccatgtggtattcactgttacaaactggtctctaaaccagatgctatcatggagattgattctcatttgcttgttgatgttgaggagccaacatcggacaatctaaaggatcagatagggtcaaataagaaaaagcttggttctagtgggcagaaaacaaaatctcaacaaagtgaaagttcttcaactgcaagggtttcctcagaaagcagtgagtctgaagtacaactgttaagcaataaatccccgcaacactctcctggcctctcaaaaaataagcttggcgcaaaaggtggaatcaagaaaagtactaacagaagaattgctgagagaattctaatgagtgtgaaaaaggggcaacaggaaatgtcaccggactctaattctattgttaatggatgccattggcctagggatatgaagcttagatctgatactaggagtggaattaaggattctgttgtatcctcacagtgtaattctccaagcacaaggagttttagaaagaagggcacacttcaaatggagaataactcatcttttgtggatgctcagagtgattcaatggaggatacaaataatgaacattcagcaacagatggttgtgatagttcaaggaaagaggaatgtgttgatgagagtatatgcaggcaagaagctcatggcaggtcctggaaagtgattgagcaagggcttctattgaaaggattagagatttttggaaagaacagttgtttaattgctcggaaccttctgggtgggatgaaaacatgcacagatgtttttcagtatatgaattacattgaaaacagcagtgcatctggagctcttagtggtgttgattctcttgttaaaggatatatgaagggtaatgaattacggacaagatcaagatttgtgagaaggcgaggaagggtccgccgtttgaagtacacctggaaaactgcaggctaccattttataaggaaaaggattacagaaaggaaggatcagccttgtcgacaatacactccttgtggttgccagtctgcatgtgggaagcaatgtccatgtctcacaaatggtacctgctgtgagaaatactgtgggtgcccgaaaatgtgcaagaatcgcttccgaggttgccattgcgcaaagagtcagtgtcgcagccggcagtgtccatgctttgctgctgacagggaatgtgatcctgatgtgtgtagaaactgctgggtagggtgcggtgatggtacattgggagtccctaaccaaagaggtgataattatgaatgccggaacatgaaactgctgcttaaacagcaacaaagggtcttacttgggagatctgatgtttctggctggggagctttcctcaagaatagtgttgggaagcacgagtatcttggcgagtacactggggagcttatctcccataaagaagctgacaagcgtggaaagatatatgaccgtgagaattcatcgttccttttcaacttgaacaatgagtacgttcttgatgcctacagaatgggcgacaagctgaagttcgccaaccattcccctgatccaaactgctacgccaaggtcatcatggtagcaggcgatcacagggtggggatcttcgccaaagagcggatcagcgcgggcgaggagctgttctacgactaccgctacgagcccgaccgggccccggcgtgggctcgcaagcccgaggggcccggtgccaaggacgacgcccagccttccaccgggagagcaaagaagctcgcccactga

SEQ ID NO: 12893 - DNA, 3582 bp, Oryza sativa
  Clone ID: TFbOSC417639j.C1.o16.fg
atgccgcactcgcgctccgattcggggtcgggttcccgcggcgctgacccttgccgtgggaggaagcgcgggaggctgttgatgctcgaggaggaggaggaggaggaggagtcggggatggaggggtgctcggcgccagcatgcggcgatgtgcggggggatttcgttggatggtgttcggaccggcatcaggtggcttcctgcagcggcgaccagacgcaaagcgccagcatgtttgccgcgatgcaggagaacgcctgctccatcgatagcaaaggtgtggtgtgtccgcagtccgggctagggtattcagctggccagaacgggacgcacggtggtggcgggtctatgctgcatcagaatttggaaggctgcatgtatatgaatcagcttgggcagatgtgcggcccttatccacctgaacaactgtacgatggattatccactggtttcttgcatcgagaccttgctatttatgccgtttttggtgggaaaatggccaaccctgtttccttaggttccctgaaacagtttctttcacaatggagttctgattctgtggtcgccacaagagacgaatcggtggagaataagaaaatggcccctgttaacaaattgattcttcctgataatctttcaagtgaagaatcatgttggatgtttgaggacgcagaaggccgcaggcatgggccacattctcttgctgaactttcttattggcatcacagtagctatctacatgacctttcaatgatttaccatgttgatagcaagtttggcccatttacacttgtatcactaattgattggtggagtggaggcacagagcattcagaatcttcagccaatgattctgggtcactgaacgctttaatggatgatgtagttgaagatatcagccatcagctgcatgctggaattatgaaatcagcccgcaaagtttttattgatgaaatatttagcagcgtacttccagaaatgattgcttgcaggaagacagagaagcaaatggctgcaaaacgtaagagccaagctgctaagactgacaatgtgagtaacaagaatgctttggtacttaagggcaagggtgatggaacatctactcgtccaaaaagcctaaactcgtataataataaagtaccggaagatccttctgtggctgttcaatcaactgcaatgcagtatgaatttgctgatatattatcggcagtttgggaaacaatttataacaaatccatgaagagtatctgggatgaagtactgtatgatcctgtcatggactactgtgatgcatggcttaaaagaaaaaatgagtcgaatcttctctctacagttgttcctggagcctctgataaccaaaagatgcaagacacagatgaaatgtcaccaaaggcaatttgtgattcagatgctcctgaaagtgacatggatttccctccaggatttggaccaaatcaggaatctgctgagcattcccactctgcgtgtgttgagtatgttactgaaaaaacagatgggaggtctggatcaagtatcacgttgttttctggccccttaggacgagttcaggaacgaattcgtacgcctgttcacgcaccagaaccatccagtcctcctggaatatctgtgcatgaaacgcccagtcctgctgaaatgcctcgagatgaaatttcggatatggctgaaatggctcgagatgaaatttcagatatggctgtagatacaataccctgccctgctgatatggcggcatctggaacatcaactgttcctgaagtgacaacagacaaactgatcattccttacgtggaacatcaatcgccctctgcatctcatgcaagtatatttgaaaagttggatgcacatgaagaagctgaattggatgacagttttgatgaggtgcctcctggaacagaggctggcttagcttcattggtgattatggagaaaaacaaataccagccctcaaaatcagtagactcagtgcttgacatttatagatatactagttgggcattcttcaggcaaatactgcatgagagtgtaatgaaagagtgggcatctctcttctcaggtgctctcagcaattgttttgactcatggtatgccaggaaaaatattgtggctaaaaccatggatgatacattgagacccaaagaatatacttactacaggaagaggaaactgaggaaaaactgtgaagcatcatcatcagaaaaaccaatggatgagcagctctccagacctcttcgtgatcttgttgaatgcaaggttaatatgaaaaatatccatcgatcaagcaaggctgggatttcgcagagagtttctgttgtggagaagccctccaaaaagcgtgccaaaccttcacataatgataatattaatctgaatatccagcaggacttgaaactcctttccgacaaggtgccaaagagaaacaggtcttcccatcctaccagtaagcctcttgttagtagcaaagtgcctactgaggatagaactacatcagcaatgcctgcaaagaaaagaaagcagaaaaacttggccactgagtccaacctgaagacaaaagcagtaattttatctccagaatcacatggttgtgaagcgcctactgagaaaagaactacagctataatgcctgtaaacaaaagaaagaaaaacttgtctggtgaatccaaactgaaggcaaaaccgttaacaagtccagaatcgtatgtttgtgaagctcctattgacaatagaactacatctacaatgcctgcgaagaaaagaaagcagaaaaacttgtccaatgagtccaacctgaagaaaaaaccgttggttttatgtcctgaatcatatggttgtgcaagagcttctgtgagtggatgggaatggcgtgattgggcacgcaatgccactccatcagaaagagctcaagtgagaggctaccgagtgaggagtattctctcagctccagaaaataatgtattgaaaagttcacaagttaagggctcatctgcaagaacaaaccgggttaagctacggaatctgttagcagccgctgaaggcactgacctactaaaaattatgcaatcgaagtcaaggaagaagcggctacgttttcaaaggagtaagatccatgaatggggtctggtggctcttgagtctattgatgcagaagattttgtaattgaatatgttggtgagctgatccgccgacaggtctcggacatacgcgaggatcaatacgagaaaagtggaattggaagcagttaccttttccgtttggacgatgactatgtggttgatgctactaagcgtggtgggttagcaagattcatcaaccattcttgtgatgtgccgcggatcaatgaattaggaagtaaagtttataagtcaggaggtaactgcaattgggtgctaccccagtatgtatgtgtcatgcgtgcttgtcgattgtactgggcagaagttcactgcagaaatgttcttggatttactgacaggatggttagatggactaattcgggctatccagaggaaggccaacaacattattacattgactggattgaggatatagagtttacacggtga

SEQ ID NO: 12894 - DNA, 1011 bp, Oryza sativa
  Clone ID: TFbOSC401117j.C1.o6.fg
atggctgatatttgcttagacaaagcttcaaggacaagaacaaattactatgaatcacgttcaaaggatgctgatgagattgatactggtgctgttaaagtttccgaagatttcattgtctctgatattgccattcatccaagacatgcgaagcaaatgagaccacatcagttggaaggattcagcttcctggtcaagaatctagtcggagacaaacctggaggttgcattctagctcatgctcctggttcagggaagacatttatgctcataagtttcattcaaagcttcttagcaaatgttttcaatgcactctacagcgaaccggtgatacaaggtagagttctcaataggaagggctggatctatgttggcgagcagggtgatgtcagaaaaaattacatatggtgtaaattaggtacttggaagagggagtttcagtggtggcaagtggaggacataccactatatgatttctattctgttaaggctgacaaaagagtagagcaactggaagtcctcaaatattgggaagcccagatgagcatactatttcttggatacaagcagttctcacgaatcatctgtggtgatggagatggaaacattgcagctgcgtgctgggacaggctgcttatggtacccaacctacttatactagacgagggtcatacaccaagaaatcgggagacagatgtactggcatcactaaaaagacaccacgcaaagtggtcctgtctgacgtataatgagtcaggtagcaatatcaggtatcagagtttaaaaggggttcatgacagtgcattcactgagtcagtggaagacaccctgctgaatgatgacaacttcactagaaaagcccatgttattagaagtcttagagaattaacaaaagatgtgcttcactattacaagggcgatatcttagatgaactatctggcctagtggattttagtgtgttcttgaaactcagtaacaagctgaaagaaattgttcactgttggaattaa

SEQ ID NO: 12895 - DNA, 2760 bp, Oryza sativa
  Clone ID: TFbOSC18752j.C1.o1.fg
atggcgtggacgtggcggccggaggacctgttcctagagacgctgaaggacagcctggcgcggcagcgagcttggcggcatcggggaattgcctggagatggcctggcatgcgcggccaaagtgggcgtggtgtagcgacggggcgaggaggcacgacatggcggttagatgatgatattgctagagattatgcggttggcgacgtgggcttggagggtgtggaggacatgcagctcgtcgtcctgcgcgtggccaaaggaggcgacggcggtggcgctgcagcggaagctgaggaggccgaggaagcccatccagccgactacaccgccggtacacaacactgcttgggtgcttttgaagtggtggcggtgactccagctctgacagacacgcggaatgtggatgcagtactcgcccgtctcccctccatcactgagggacattcccatctacaaaagcgtgctagggagcggtatgctgctcttagtgctggcgacaaggaagctaggcttcaaaagatgcgagagtactaccagcgaaaaaagagtattgatcctgtacctacccatgttattttgccagatgaaaagcagcttaaggttttgaatccatgcaagtttgttttaaatgttctgacgaagcgtgcgcgtggaaaacgatgggttttctccctcaatgtcaccggaacgaacacagataatgagaagtcgtatgagttggacacaacatattactgtaagggtatctacaatccgcggtggcggacgacaagcggcgcggggacgggcgcggtggcggagggcagcagcgcgcggggtcgccgagccgtctccgtcacagggtcatcgccggtcgtcgtcgccaactctgtctcctcccagcgaaacccgaaagcaagatttaggacctgcactggagttaagcagacctcccaggccagtgtgtgtttttttatcaacacatgggcctctcagcgaagaggccaagggtggaaggagaaaaatcaggtgcgggagccgtgtcctcaagccacgacgtcgcccaacgtgtcccctagctccgtggctcgacgaaaagcgactgaggagcggaggaagacgcgcccctctgctagggacggcaaactgatggactggcgacggctgtaccagctggaggcgctggagcgggcggtgcgggggaacaccctggcgttcctggagaccgggagcgggaagacgctcatcgcggtgatgctgctccgggcgtacgcgcaccgcgtgcggaggccggactcgcgccgcttcgccgtcttcctcgtccccaccgtcgtcctcgtgggccagcaggcgcgcgtcgtcgagcagcacaccgacctcgtcgtcaagcagttctgcggcgagatgggggtcgacttctgggacgccgccacctggcgatcccaactggaggacggcgaggtgctcgtcatgacgccgcagatcctgctcgacaacctccgccacagcttcttccgcctccaggacatcgcgctgctcatcttcgacgagtgtcaccacgccaggggcaatacgccgtacgcctgcattttcaaggaattttatcacccccagttgaattctagtgcgtcagaccctctgccaaggatatttgggatgtctgcttcgctcatttattcaaaagatttgaatccgcacaattattcaaagcaaatttctgagattgagaatctcatgaattccaaggtgtacactgttgatagtgaatcagctttgtcggagtacataccatttgcttctacaaaaatagtggactttgacgattccaacatttcatctgagctgcatgccaatattctcagttgtttgaatagattgaataaaaaggctgctgaggtacaatcatacgaggaaaacagcctatccttctggggtgaaacattggataaaaatgttgagggcttcattagaaactacagcgaagaagtacatagagaactttcatgtttcttgaagaatggtcatattggtgaaaaatttccagctgattctcaagatgggatattgacacccaaagttcattgccttattcgaactcttctgcagtacaggcatatgcaagacttaagatgcattgtgtttgttgagagagttatcacaagcatagtattagagcacctactttcatctattcatcaaatgtctgggtggaatgttaagcacatggcaggaagccgtcctggtttgctatctcagagcaggaaaaatcatacagaaattgttgaatcttttcgaaaaggaaaggtacatataattattgccacacaaattttggaggagggtttagatgtgccaagttgtaacttggtaattcgctttgatccatcagcaacaaaccagaggggggatgtggaagctcaaactaatgcagagaagtttctcgcaagtgggcaaataatgcgggaggaatctctgagattgggatcaatttcttgtcaaccacttgagaacaccttatattttaatcctctaccaagattcgatatagacaaggcatctggcacatgcactctgcatcttcctaagagcagtcctgtgcagacagttaatgtagaaggagaaggttctattctcaaggagacagtttgtcttaaggcctgccaagaactacatgccattggtgcactcacagattctcttttaccagaattagatgttccatgtgatgaagaacctgacatcggaaaacttgatgcatggtgggtaaggttatatctgaag

SEQ ID NO: 12896 - DNA, 2367 bp, Oryza sativa
  Clone ID: TFbOSC900120j.C1.o3.fg
atgggtggccccctcaccgccgccggaggtcgaggagatgggggcgccaaggcggtggaaccgctccggcctccgccgccgcccgacccgaagacaatggccagatggtaccagctggaggcgctggagcgggcggtgcgggggaacaccctggcgttcctggagaccgggagcgggaagacgctcatcgcggtgatgctgctccgggcgtacgcgcaccgcgtgcggaggccggactcgcgccgcttcgccgtcttcctcgtccccaccgtcgtcctcgtgggccagcaggcgcgcgtcgtcgagcagcacaccgacctcgtcgtcaagcagttctgcggcgagatgggggtcgacttctgggacgccgccacctggcgatcccaactggaggacggcgaggtgctcgtcatgacgccgcagatcctgctcgacaacctccgccacagcttcttccgcctccaggacatcgcgctgctcatcttcgacgagtgtcaccacgccaggggcaatacgccgtacgcctgcattttcaaggaattttatcacccccagttgaattctagtgcgtcagaccctctgccaaggatatttgggatgtctgcttcgctcatttattcaaaagatttgaatccgcacaattattcaaagcaaatttctgagattgagaatctcatgaattccaaggtgtacactgttgatagtgaatcagctttgtcggagtacataccatttgcttctacaaaaatagtggactttgacgattccaacatttcatctgagctgcatgccaatattctcagttgtttgaatagattgaataaaaaggctgctgaggtacaatcatacgaggaaaacagcctatccttctggggtgaaacattggataaaaatgttgagggcttcattagaaactacagcgaagaagtacatagagaactttcatgtttcttgaagaatggtcatattggtgaaaaatttccagctgattctcaagatgggatattgacacccaaagttcattgccttattcgaactcttctgcagtacaggcatatgcaagacttaagatgcattgtgtttgttgagagagttatcacaagcatagtattagagcacctactttcatctattcatcaaatgtctgggtggaatgttaagcacatggcaggaagccgtcctggtttgctatctcagagcaggaaaaatcatacagaaattgttgaatcttttcgaaaaggaaaggtacatataattattgccacacaaattttggaggagggtttagatgtgccaagttgtaacttggtaattcgctttgatccatcagcaacaaaccagaggggggatgtggaagctcaaactaatgcagagaagtttctcgcaagtgggcaaataatgcgggaggaatctctgagattgggatcaatttcttgtcaaccacttgagaacaccttatattttaatcctctaccaagattcgatatagacaaggcatctggcacatgcactctgcatcttcctaagagcagtcctgtgcagacagttaatgtagaaggagaaggttctattctcaaggagacagtttgtcttaaggcctgccaagaactacatgccattggtgcactcacagattctcttttaccagaattagatgttccatgtgatgaagaacctgacatcggtgggcaagacaatgctagtgttaccatgaaatatgttggcatcatccatctcaatcaagaacaggtaattattgctagaagatttcagacaactattctttcgtttcttattggtgatgaccatttggaggttagcaatggtattaaatacttccatgagatgcaagtgcctattggagtagtctatctacttctgcctttagtttctggcagaattgattggtgcagtatgaagttctcatcctcaccaatatatgaagctaacaacaaacatatgacacattgccattcttgtaaagatattgatttactgcagacaaaagatggtcctttctgcaggcatggtcttactttgacttttgaaaatcagccgctcttggctggcagtaaacatgtgaaagtgcggaacttcctccacaactgctactctaaaaaagaaaaagaacctggtgatagatatagtgttgagttgccacctgaactctgcagaattatcatgtcaccagtgtccgccaataatttgcacatcttctcatatgttccttccataatgttccgcatccagtgcatgcttctttctgtgaaattaaaggtccaattaggcccaacagtgcagcagtttgacgtaccggttttgaaggttgattttctcatcaatagtttcctatttatgaattattga

SEQ ID NO: 12897 - DNA, 3015 bp, Oryza sativa
  Clone ID: TFbOSC401693j.C1.o16.fg
atggccgctgccggcagggacccgccggcgacgccatcctccagaatgtattactgcaggcaaaggaaggcttcttctgaggtcaatgccaatgtgtttgtgcctgggggtcagaatggtatttcatttcctgcatcaaatagggctcatgattggggatatggcggtgttcgcgaagaatgggaagctagttatgctcgcaaactccagttgatcaattttctttcttcactgcatcaacgcactgcaaattctttgataaccactagaatggatgctaacatggacactcctttggagcaaaaacaaaaggacagctcagcaataatagttcttgattccgatgatgaggacgaagcagaaagatgtgaacagctcgcatctgagaacaataaacaacaggcaccatctggacccactagtccttgcacaacatggattgtatccagtgcgaaagaccaagtaaatggaaccttgcatgttgatggagtccaaagcactcaaattgttccatatggtcaaaatgcacctttaataaatcagtcccctttgcaaaccagctggcaaccatctatccaatatgaaagggttatattgcagagaagacctgaggagcaacgcgttcaagatcttgtggcagcaagccatgcagagaagatagcagaaacacaagttttccttactctgcctactcttcctaatgagagaaaacgaaggaaatcagaaccgaccaccctggtagatggagatggtggaactaacctagggaaaggaaaaaggaaaaatcatcaaaatcaagcagcagttgattcaatcttggatttgcaacaaactgttgttcctttgcaacaaaatgatgttccttcacaaagctacaggactatgatagaagaggagaaacctgtaaaagaaagtgatggtctcgaggatctttggaaagatttttcattggctgctgaatgtacaaagcttgatacaaatgaagacatgtccaatgaaaaagatgtggatgatgaaaacgagatggatgacgattgcaatcatgacattcggattcatgaagatctaggccatgtatgccgtatttgtggcatgattgttagaaaggctgaaacaataattgattatcagtggaaaaagaaaaacctgctatgggggatcttctctttactgaaatacttcctaaaatgggagagtgttttcattaccaactatattgatattgataccgctttggagtatatagcttcaaggacaagaacaaattactatgaatcacgttcaaaggatgctgatgatattgatactggtgctgttaaagtttctgaagatttcattgtctctgatattgccattcatccaagacatgcgaagcaaatgagaccacatcagttggaaggattcagcttcctggtcaagaatctagttggagacaaacctggaggttgtattctagctcatgctcctggttcagggaagacatttatgctcataagtttcattcaaagcttcttagcaaagtatccttctgcaaggcccctcgtagtgcttccgaaagggattttaggtacttggaagagggagtttcagcggtggcaagtggaggacataccactatatgatttctattctgttaaggctgataaaagaacagagcaactggaagtcctcaaatcttgggaagcccggatgagcatactatttcttggatacaagcagttctcacgaatcatctgtggtgatggagatggaaacattgcagctgcgtgccgggacaggctgcttatggtccccaacctacttatactagacgagggtcatacaccaagaaatcgggaaacagatgtactggcatcactaaaaagagtccaaacaccacgcaaagtggtcctgtctggtacacttttccagaatcatgtttcggaagtgtttaacatcttggacctcgtgcgccctaagtttctcaagatggaatcatcccgtcctatcgctagacgtataatgagtcaggtagcaatatcaggtatcaggagtttaaaaggggttcatgacagtgcattcactgagtcagtagaagacaccctgctgaatgatgacaacttcactagaaagtctcatgttattagaagtcttagagaattaacaaaagatgtgcttcactattacaagggtgatatcttagatgaactacctggcctagtggattttagtgtgttcttgaaactcagtaccaagcagaaagaaattgttcacaagatagaagcctatgaaaagttcaaaagaagtgcggtggggactgcattgtacattcatccctgcctgtcagaaatttcagagggtgatgctgcagatagggcgaccaacttgacagatgccactgttgacagcttgattgagtctatcatcattaaagatggggtgaaagccaagtttttctttaacattctgtctcttgctaactctgcaggagagaagttgcttgccttcagtcaatatatacttcccatgaaatttttggaaaggttgttggttaagaggctgggctggcatgtagggaaggagattttcatgatatctggtgatactagtgcagacgacagagaagtggcgatggatcagtttaacaactctgccgatgcaaaagttttgtttggttccatcaaggcctgtggagagggaatctcccttgttggtgcatcgagagtcatcattctagatgttcatttgaacccatctgtcacccgtcaagcaattggacgtgcattcaggcccggacagcagaagaaagtgtttgtgtacaggcttgttgctgctgattctccagaggtgaagttccatgaaactgcgttcaagaaagaagttataccaaagctatggtttgaatggagtgagctctgcactactgaagacttcaaactgaatcaagttgatattgatgactctgaagatgaactattggaggctaatgctattcgccaggatatcaaggctttgtatagaagggtgtggcagtag

SEQ ID NO: 12898 - DNA, 4374 bp, Oryza sativa
  Clone ID: TFbOSC23980j.C1.o3.fg
atggacccgcggcgccctccgtcgcgcgggggcgccgccgccaacggcggcgggctctcctactccaccctcttcaacctcgagcctttgctgaactttaaggtccccttgccggaagatcttgatcgctataggcgtagtagcccaaatgggagtatgagtagccaaggtcaagggtccttgtcagaccagtataatggaattaatgatgcttcccatgggctacatcggaagcgcaaaaggaatctggatggtgctagcgatgatgatgaggtagatgcctacagtaaccaaataactgaggagcactaccgtacaatgctgagtgaacacgttcagaagtacagaaggtcaaagtttaaggaggatgtttttagttctgatcctcctcaggtgatagttcctcagaaacacaaaaatggtagtgcaagagttacaaagtacagaagtgatacaaggaatgttgcaatgttgggtggggtagaagccacagctgagtataatgggacaaaatctactaatgcatatggtggtttcaataaggttgtagcttcactggattcttcctatttagatatgggagataatgtaagctacaaaatcccagaagggtatgataagttggcactatcccttaatctacctgttttttctgacatacgtgtcgaggaaactttcttgaatggcacactagatttacgcactctagcggcaatgctcagtacggaccaaaaatttgagacaaccaatcgtggtggattagctgaacctcagccacaatatgaatcactccaggaaagggtaaaggtgcagaaattttctcttcaagtaactgaggatcccttcgcaattccagaaggagcagctgggaggatacggagatttattatttcggaatccggcagtttgcatgttcattacgttaaagtcttggaaaaaggagatacatatgagattatcgagcgtagtttgccaaagaagcaaataataagaaaggatccttctgaaattgcaagagaagagtcagaaaagactattaaactttggcatgctattgctgttaaaggcattcctaggcaccacaggaatttcatggctttgctgaagaaacggcaagtagatgctaagcgtttttctgagaattgccaacgggaggtaaagttcaaagtaagcaggtcactgaaattgatgaggagtgccgccatacgtacacggaggctggctagggatatgttgatattttggaagcgagttgacaaggagcagtatgaattgaggaaaagagaagaaaaggaggcggctgaagctttgaagcgtgaagaggagctacgtgaagcaaaaagacagcaacagaggctcaactttctcctatcccaaactgagctttatagtcactttatgcagaataaggctggtgaatcagcaccatcagatgaggcatctgtccctgaagaggatgaggaagatcctgaggaagctgaattaaagagagaggccttgagagctgcgcaacatgctgtctcccaacagaaaaggatgacaaatgcgtttgatagtgaaactgggaggcttcgtcaatcatctgactctggtattccaactgatgatttagctagtatggagcctaacaagattgatctattacacccctcaacaatgcctgagaagtcgtctgtgcagacaccagaattgtttaaaggtgcactaaaagaatatcagttaaaaggtttacagtggttggttaattgctacgagcagggattaaatggtattcttgctgatgagatgggtcttggcaaaaccgtccaggctatggcattcttagcacatttggctgaggacaaaaacatatggggtccctttcttgttgtggctcccgcatctgttgtgaataattgggctgaagagatacttgtgaatgaagagaagcttttgagacgtgttaagtggcaatacatggttttggatgaggcccaggctattaaaagttcaagcagccagcgatggaagacattactgagttttaactgtcgaaatcgcttgcttctcactggaacacctatacagaacaacatggctgagttatgggcgcttcttcatttcatcatgcctactttgtttgacagccatgaacagtttaatgagtggttctcaaaaggaattgagggtcatgccgaacatggaggtgctctgaatgaacatcagcttagtcgactgcatgctattttaaagcccttcatgctccgtcgagttaagattgatgtcattgcagaaatgaccaaaaagaaagaagaaattgtgccctgcagattgagttctcgccagcaagtcttctatcaagccataaagaataaaatatctcttaacgagttgcttgatggaagtcgtggcaatctaaatgataagaaattacttagcctgatgaatattgtgatgcagctccggaaggtctgcaatcatccagagctgtttgagcgcaatgaggggagctcttacttttactttgctgacatcccgaactcacttctttctcctgcatttggggaattgcaagatgtgcattatgcagggaagaggaatccaataatgtttgagattccaaagttagtctacaaaggaatcgtctcgaacatggaaatgcctgtgcgtggttgtggatttctatatggatctttcaacaggatgtttaatatattttcgccaagctacatccatcaatcagcttttccagaagctatctcaccaaataatactgttctgttatctggtgcattcggttttacacgtttaataaatctctccccagttgaagcttctttcctggccacttgctcattattcaacagactagcattctcagcagtgcgatggaacaagaagtacaccgatgaacttgtggatgtattccttgactcagaaagtactgatcttgagtccactcataatgatttaacaacagttcgtgctgttgttcgcttgttgctttcacctacaaaagcagagtccagtttcctaagaacaaagattgagacaggcccgagtgatagcccatatgaagcactagtgctttctcaccatgaaaggcttgtgtctaacataagacttcttcgttcaacatatgcttttattccacctgctagagcaccaccgataaatgtctggtgcgcagaccgaaattttgcctacaagttaactgatgagatgcatgatccattggccaagaaactggttctgggatttgctcgaacttctgagttcaatggccctagagaaccaaccagccctcattctctgatagaagaattacatactgatttgccattccccgagccgatgctacaactgccatataggatatttgggtcatctccacctatgagtaactttgacccagctaaaatgcttacagattctgggaagctccaaaccttagatatactgctgcggcgcctccgagctgagaatcaccgtgtgctcttatttgctcagatgactaaaatgttagacattcttgaggactacatgaacttcagaaaattcaagtatttcagacttgatgggtcatcggcaatatctgatcgacgtgacatggtccgggacttccagaaccggaacgatatatttgttttcttgctaagcacaagagctgggggcctaggtattaatttgactgctgctgatacagttattttttatgaaattgattggaacccaacacaagaccagcaagcaatggatagaacacacagacttggtcagacaaaggaggtaacggtgtatagacttatatgcaaagatacaatagaagagaagatattgcagagggcaaagcagaaaaatgcagtgcaagagttggtcatgaaaggaaaacatgtccaggatgatcatctgatgagacaagaggatgttgtttcattacttattgatgacacacagatatcgcacaaattaaaagaaatatcaatgcaggcaaaggaccgactaaaaaagaggcgtacaaagggcatcaaggttgacaaagaaggagatttgatgcttgaagacttggatgatcaaacttcaggggctgcagaacatgataacacatcaagcaaaaagaagaaaagctcccaaaagaagcttccaaagttgcaggataatggtagtgtggacaagaatgcagaggctgaaggcggtgaagtggaggatgaagatagtattgcagctcctaggcctaaaagatcgaagagactgatgaagaacttgaacgaggacaaggaaccagaacaggaaccaacgactgatggtgacaatccggcagaagcagctgagaataacatatctcctgacgataatgatacagaagaggcaaaagatcggactccttcagcctaa

SEQ ID NO: 12899 - DNA, 679 bp, Oryza sativa
  Clone ID: TFbOSC420110j.C1.o1.np
tttctccgtatttaagctcatggactatgagcccgtgttaaaatgcctgaagaagttgcctggagttgctgtgcaagatataccttacaaaacaaggaatgttatcaagaatctccctaagttctttgccgaaagctgcgcttctgataaagaagttgacgggcttctcatgaagttgccacaacacttacgagatgcactcctaccctttcaacttgaaggtgtgaagtttgggcttcgaaggcatgggcgctgccttattgcagatgagatggggcttggtaagactctccaggcaattgcaatagcttgttgctacaaggatgagggcccagtgttaatagtgtgtccagctgttttgcgttatacatgggcagaggaattggaacgatgggatccttcatttctgccaaaagatattcatcttgtgtttggtcaccaagacagtcttgaacgtttaggagcttgcccaaaggcagtggtcatttcatatcagatgctaagccgtcttcgcaaaagcatgatgaataggagatgggcactgatgattatcgatgaatcacacaacatacgctgcacaaagaaaaaacacgaaaaaaatgagacacaggctgtactggaactagcgccaaatgtcagtcgcattgtgctgctctctgggacaccctctttgtcaagg

SEQ ID NO: 12900 - DNA, 5613 bp, Oryza sativa
  Clone ID: TFbOSC400505j.C1.o62.fg
atggacccccccgcccgcagccgcaggtgcactctcctcacgcgggccctcctcctcgccgtcgccgccctcgccctccgcctcatctacgccgccttcctcgccggcatggcgctctacccgcccctccccgccgccgccgtccttggctccaagacctacctccactccgccgtcgccacccccgacgcctggcgcacccgcgactggcggaaggccgtcgactaccacgccaccctcctcgccccccacctcgccgacggcatcctctccccgacctcccgcgccgtctgcctcggcgccgtgcaggaggccctcgccatgcgcgagctcggcgtctccaccgccgtcgccgtcgccaggaagcgctcccccccgctcgccgtcgccgggaacgaccgccgcctccccttccaggactcctccgtcgacttcgtcttcgccgcccgcgccctcgactcctccaagcgcccggctgacctcgccgccgagtccgcgcggatcttgaagccagatggacatctcgtcgtcctcactaccagcgccgccgacgcattcagcctccgcgcgctccaggcactcctcccctctctccgcttgctccgatctcgccagatcaaaggccccgacgactccaccctgcgggagctcgtcttccagaagatccaggactccactgacgatcctgtaaacaagtgcacaattggggatcacaagctccaactcctcacacatgcggagccactcatccaagaggagccgcgcaagccatggatcacgctaaagcggaacatcaagaacataaagtatctcccaactctcgcagacatcagcttcaagcgcaactatgtgtatgttgatgttggcgcccgtagctatggctccagtatcggcagctggttccggaagcactaccccaagcagaaccatacattccaggtgtttgccattgaggccgacccggccttccactctgagtacgccgcaaagaaggctgtcacgttgcttccatatgctgcttgggtcaagaatgagaccctcaattttgagatcaatgctgatcccgggaaggaggatgaggccaaggctaatggccgcggcatgggccgcatccgccccatggctggcaagaagatgtccggtgaggtgcggagtgtcccggcattcgactttgccgagtggctcaagcgcacggtgtcggagcaggactatgtggtgatgaagatggatgtggaggggacagaattcgacttgatcccaaggctgtttgatacaggcgcaatctgcttgatcgatgagctgttcctcgagtgccattacaaccgatggcagaaatgctgccctgatagagctgaagcatttgagatggcaaaaggggtctcatgcttctactggagtattcagtttccaaatttcaaagaccacctctgtttcagaaactgcagcaatgctagtagtacaaggcacttcagttacaggtctcttttgatccgaacagaaaagccagttactactagaaaccatgcatatgcagaagtagttgtatttgtcttggatcagaatcctatgtttttcctattcctccgttttttctaccctgcgattcaaaggggccctaactgctggtcatctgctaactccacagtgatgaggcaagcatttgaggtgttttatgatggatcatggcatggggtaaattgtataaggataaggaacggcaacctgtttgttaaatttatctactctggatcaacagtcgagcataatgttgatggggattgtctacgcttacggtcgagaagggcgacttgttctgattgttcaaatgttctcaagccaggtgttgatgtctgtgtgcagtcatctcatacacccgaagcaagttcacaaggaggaacaaacgcttctgtgttactgcgtcatgatgcaaggcttatcacaatcaagaagaatcatcaagaagataagtgtctctgcttgtttgttgttatactctacaagaaccagtgtcctggcaatgcagaaaaagtgataactgatagaagagcagaggtagtaaccataaacgatattttcctcctgcaaaagcttcaacctgaggtccatgaaggaagcatgaaatggagtttttcaaaggatcgcctctctcttaataaaggcaggctaataagtgctagattctcctcagaaattacacatctgatagtcttgtcgatcttgaggggaatggaattcaacatcaaattggtagaaggccagatcgtttatcaaataatcaaaggagatcaagcacaatggaatcttgattccatggccatccctccaggcttcgggaatacaatggagataatatcattccaattgcgtgatgaggccttgcgcccaacaatcacaaatatccctatcactcatgtgaaaaagaacaatatcacagaagacatgagattcactgtgaagagtgaaatggatagtgaactggatagggcattagatgttgagatcttgtatgagcatgtggatctgaggcgttcaaagcgcttgaagactcagccagatcgctttacaagttacgatacacctaggttccttagtggctacaagaagaaagaagcaagttcatcacccaccaagcatgtaaggggagctgtgcattgtgattcaccggtagacgattccaaaaaagaagtagaatcatgctgtgtagagattccagggaatgttacacagaagcaaacaggtgtacactctcccatggtcgatgaaaagtcaaactctccagaaggacagcataagaacacaactaagagaactacatgctctcttgtgaaggaaaaagcaagctctccagaaggacagcatgagaaaacaacaaagagaactacatgcgctttgcctgtgaaggaaaaagcaagctctccagaaggacagcataagaacacaataaagagaactacgtgctctttgcctgtgaaggaagagccaagctcagtggaaatagaggagaaaagctcaaaagagcaaagtgcaccggagtttcacattccacggacacctgcacagaataaagagaagcataatcgtcctcctttctcatgtaagccgaagctatttacttcatcaggcacccttggtgttaactgtgaaccagcattctgccaaaaggtgggcgggaaaagaaagaggcacatgtgcgagagagaatacaaacaaatgattgaccaatgcataggaaacattgagagtgaaatggagagggactctatgtttaacttcgatgccaatatgatgaattacgttcagcattcttatcgagaagaggattttacatggccaccttctgctgataaccaagaggtggaggaggatgagcttgaagaactgtggaaagaaatggattattcactgacgacattagcacttcttgagcaaaagcaggtgatggctcaaagtaggataaacatgctggtggataattttgatgggttgaggctggattgtttaactttgacggatgattacagatgctattatcaaaaaaaagaaaagtttgcagagtcaggatcagttaatgagagcaccgattattttggaaaagttggaggaataccatgccatcatgaatgcatactggatgaggagcttggactagcatgcagattatgcaatgttgtatgcactgaggcaaaggatatatttccagaaatgttcaatggaaatgactacaaggacagacctggatgcagcaatatttgccttgatgatgatatacttgatccttctcttcttgcaaacttggcaccagagttgtcagaattgaagaactcagggagcgtgtggagtgcaatatctgatcttgatccaaagctgcttcctcaccagagaaaagcactagattttctgtggaaaaatttggcggggtcgatacaggttgaaggaatggataactcaaatgtcagtacaggtggctgtgtgatagcacacactcctggatctgggaaaacactgctgcttatctcatttctggtgagttacatgaaagctcacccaagaagccggccattggtccttactccaaaagctgcaattcatacatggaagagagaatttgagaaatggggcatttcacttcctttacatgtgttccaccatgctaacagaagtggcaagccgttgggggcaatggattctaaactgcggtcgttattaaataattttcacagaccaacctggacaaatatgcgccttatggattctttggacaaactattcaagtggcatgcacatccaagcgtcctcctcatgacatactcatctttcttagggatgacgaaacaagactcaaaagtgcgaaaccgataccgagaatttatcgcagaggtcctgatgaacaaccctggactcttgattcttgacgaggggcacaacccaagaagcaacaagtccaagttgaggaagctgctgatgaaggtgaagactgagttcagaatcctcttatctggcacggccttccagaacaactttgaagagtacttcaacaccctatgtttggccagacctcggtttatcggtgatatcatgagtgaactagtgccagagaggaaaagagaaacagttggcaggagagccaaacatcaagaagcagtggcacgccgcgcctttgtggagaaagtgggccagaagattgagtctgacaacaaacatatcagaagtgatggtatcagtttgctaaacaagcttactcgtggattcatagattcattcgagggagcgaagctgatcaaccttccagggatacatgtgtataccgtgttcatgaagcccacggacattcaggaggagatgctggcaaaggtaacaatgcccaagctcgggtcgtcccggttccctctagaggttgagctgctcatcacgattggctccatccatccttggctcataaaaacgacgaaggccgtcagcaccttcttcagtccagccgaagtgaagaaggttgagaggtacaagcgagacttcgcggcggggtgcaaggccaaatttgtgatcgatctgctgcacaagtcgtcgttcagaggggagagggtgctgatattctgccacaacgtgtccccgatcacgttcctggtgaagctgatagagatggtgtttgggtggcggctcggggaggaggtgctggtgcttcagggtgatcaggagctgcctgtccggtccgatgtgatggacaagttcaacggcgacagcgcggggaagaggaaggtgctgatcgcgtcgacaacggcatgcgcggaggggatcagcttgacaggcgcgtcgaggctggtgatgctggactcggagtggaaccactccaagacgaggcaggcgatcgcgcgggcgttccggcgtgggcaggagaggacggtgtacgtctacctcctggtggcatctgggacatgggaggaggagaagtacaacagcaacaggaggaaagcttggatgtccaaaatggtgttcctgggacgctatgttgatgattcctcgcaaaaccgtgtcactgacatcgatgatgaggtcttgaaggagcttgccgatgaagatcacaccggcaccttccatatgattgtcaagcaagactga

SEQ ID NO: 12901 - DNA, 2406 bp, Oryza sativa
  Clone ID: TFbOSC400938j.C1.o6.fg
atgcctcgccgcggcgcgtcctccgcttccaccagccgcggccgccgccgcccccgcgaggaggaggaggaggaggatgaggaggaggtggtgggggatgtcgcctccgacgactccgccgactccgacttcgtcgccgacacggaggaggaagaggcggcggacgacgagtacgactacgcgtccgatgggaaggatggcgcggggcccgcggctgctgctgctgctgctcctgcggcggtggccccgccgcccccgcaaccgaagcggctgcaaggggggaggaagaagggggcgggtggccacgggaagctgcccctgccgtgggaggagtgggaggaggcgaacgagaagtggctcgacgagcgggaggcggcggccaagggggaggaacccccggacccggaggttccccccgccgtggccgcgggggtgcccacggcggagccggccccggaggtgctgctcccgctgctgcgcttccagaaggagtggctcgcgtgggcgctcgcgcaggaggcctccccctcgcgcggtggcatcctcgctgacgagatggggatggggaagaccatccagggcatctcgctcgtcatcaccgcgcgccgcctccgccccccggcaccgcctcctcgccgccgcgccgcgtcgtcatctcagggccagccgaagcgttgggtgggatgcacgctggtggtctgccccgtggtggccgtcatacagtgggcgcaggagatcgagcggcacacggccaaagacagcgtgcgcgtgctggtgtaccacggcggccggcggggtgctcagaagtatgatttcaacaagtacgacttcgtgatcaccacctactccaccatcgaggcggactaccggaagcacatcatgccacccaagactcggtgctgctactgtgataaattgttttaccccaacaagctgaaggtgcatttgaggtattactgtggtcctgatgctcagcgaaccgagaagcaggccaaacaggagagccggaaatggggtagcaaaaaggggacatcgaagaggagggtccaaaagaagaaaaatgatagtgatggtgaggattttgaggaacgtgatgggggatcggggagccaatcaaggggtcagtcacctctacactcagtgcggtgggagcgtattattttggatgaggctcacttcataaaagacagacgttgcaatacagccaaggctatttttgcattagaatcggaatacaagtgggctctgagtgggacacctttgcagaatcgtgttggagaactctactcgctgatccgttttttgcaaatatttccttactcgaactatttctgcaaggactgcaactgcgagatactagatacccttctaaagaaacaatgtgattgtggtcactcatctgtcaggcatttttgctggtggaacaaggtgaccttaaggagggactctttcgataaaaatgaaatggaattctacgaagctttatatactcagagtcgcacgcaatttgattcatatgttgatgctgggacgctgatgaacaactatgcacatatctttgacctcctaacaaggttgagacaggctgttgatcatccatatcttgtggcattttctaagacagcagaactcagtgacagaagtaaaaatgaaggaaatgagaacatggaaagccagtgtgtgccccttactgtcgacctaacaacacgaagttctggagaaaaggtcactccaaatttgaagggtggcaaacgctcaggaatattaagcagactacaaaaccttgcagattttaagacaagcacaaaaatcgatgccttgtttttggcctacatgtttttgttgattgagttacataatgatgttaatggtgatgttaatgatgaaaatactttggttaacctgagagaagagataagaaacatggttgagcatgatggttccgccaaagggattgtgttcagccagttcacatcattcttggatttgattgaattctccctgcagaagtctggtatcaagtgcgtgcaacttaatggcaaaatgaacattgttgagaaggggaaagctatagataccttcaccaatgatccagactgcaggatttttctgatgagcttgaaagctggaggagtagctctcaatctcactgtggcatcacatgttttcttgatggacccttggtggaatcctgcagtcgagagtcaggcccaggatcgaatccaccgaattgggcagttcaagccaatcagaagcatgaggtttgtgatcaaggacaccgttgaggagcgtatactgcagctgcaagagaagaagcgactggtgtttgaaggcaccgttggcgactcacctgaggccatgtccaagcttacagaggctgatctcaagttcttgttccagaactga

SEQ ID NO: 12902 - DNA, 3447 bp, Oryza sativa
  Clone ID: TFbOSC420824j.C1.o3.fg
atgtctggttctggcaacagtttagacactgttgccctcatcgtaggcggaggcagcgacagcagtggcatcgtgggaaggaaacgaaggcgttgcgatctgattcgtgaaaggtggtgttgtctttgtccggtgtggtgcaaagaagcacaggaggtggtggttcctgggaggggcaggaatggtgcaaggcagagagatgggggaggttgtgctcttggcactacagaagttctaggaagaatttgcaattcttctgtggagaaagcagaagaaagagaaacagtaattccggccattagcaacacggagaagatgggagaaaaacaacagaaatcaatccctagggacagaaaaagaaaaggcgagctagatccagcagcagattatgttaaggatctttgggatgctttctatgtgactgcggaaagcacacatctcgacacatcagaagtgaataataaaaaacagttggacaattgcaaccacgatattcatgtttatgaagatctgggccatgtatgccatgaatgtggtttggtcgtgaggaaagctgactcattatttcactatcagtggaaaaaggcttcaaggaaaagaacaaatgtgaatgaggtttgcttgaagaaggtaggctctgatgctattagtctctctgaagatttcatattttcagatattgccattcatccaagacatgccaagaatatccggcctcatcagttggaaggattcaaattcctggttaataacttggtcactgatgaacctggaggctgcattcttgttcatgccccaggttcaggggaaatatttatgcttatcagtttcattcaaggcttcatggcaagacatttcactgcaaggccccttgttgtgcttcctgaagggatattaggtacatggaagagagaattccagcagtggcaagtggaggacataccactgtatgatttcgattctattaaggctgacaatagagtagagcaactggaagtcctaaaatcttggagctctaagaggagcatactctttgttggatccaagcatttcacccaaattgtctgcgatgatagggatgaaaatgctgtagctgaatgcagggacacgcttcttatggtccccagcttgttgatacttgatgagggccatacacctagcattgatgagactgatatgctacaatctgcgcgcaaagtgcaaacgccatgcaaagtggtcatgtctggtacactcttccataatcatgtcaaggaagtgtttaacaccttggatcttgtacgcccaggttttctcaagacggagacattctggcccattgttacacgtatgatgggtcaactagaaatatcaagtgccaggagtataacagagatctctgagtcaatggaagataccctgctgaatgatgataacttcacaagaaaagttaatgttatcagaagtcttggagaactaaccaaagatgtgcttcactactgtaagggtgaggacttgaatgaatttcctgtcttactagacttcagtgtgttcttggaactcagtcccaagcagaaagacattctttgcaagttagaagaagaccatgggatgctcaaaacaagcgctgtaggggctgcactctatgttcacccttgcctttcagaaatttctgaagctaatgatgttgatagggatgacagagttgatagtttggtcaacagcatcaacctgggagatggggtgaaggccaggttttttctgaacatccttgcgcttgccaactctgcaggagagaaattagttgcttttagtcagtatacactccccatgaaatttttggaaaggctgctggttaaggagatgggctggcatgtagggaaggaaatttttgtgataaatggtgatactagcatggaagatggacaattggcaatggatcagttcaacggctctgccgatgcaaaagttctgtttggttccatcaaggcatttggggagggcatctcccttgtgggtgcatcaagaattgtcatcctagatgttcacctgaacccgtctgttacgcgccaagccatcgggagcacattcaggcctggacagaagaagaaagtgtttgtgtatagacttgtagctgctgattctccagaggagaaggcccatgaaactgcattcaacaaggaagtcataccaaagctatggttccaatggagcgggcgctgcacaactgaagacttcaagctgaatcaagtctgtatcgatggctccagagatgaattgttggagactgatgttattcgtcaggatatcaaggctttgtatcaaagtattgacatgggtttagtcagtgaagcaacagtttgttttaataatgtgtccagctcaggactcagtgtccatgatactggcggtaatgttataggccaaggtgaccaagattctgaaaaaaaccggtacttaagcattgcctctgaaactatgttagtccactttgttcatgtgttctccttcgtctgtgtccctgtaaatacaacatgttctctctcaatatgtagagaaatcttatggttcttgattggtacccgggaagtaccattttctagtgtaaaatttggtatttcctcgtggatgggaaaaatcacccttatacgtatctttcgtattttgtacgacgaaaaggggcagattgccttgcttgcaagcaagggcagcatcaaggataagcaagaagcttgcaaaagctggaggtatccaagtatccatccatggctaactgaagcagtggtactggcagtgacagctgcaacccctccccatctattggcagtcgcaggaccattacctcttccttctctctgctctgctgtgccttttgctctgctatactactttgggaagggaagaaaggtggtgcatacgcttaagaattggctgcaacaagtttctgttgaaaacaagatttgtggatggggatacaacactacagaagttctaggaagaatttgcaattgttccgtggagaaagcagaagaaagagaaacaataattttggccagtggcaacatggagaagatggaagaaaaacatcagaaatctgaccaggactttcatttcagtgatagcactatggccatccctagggagagaaaacaaaaaggagaggtagatccagcagcagattgtcttaaggatcgttggggtgctttctatgtggctgtggagagcacacagctcgacacatcggaagtgaataataaaaaacagttgaacaattacaaccacgatattcatgtttatgaagatttgggtcgtgtatgccatgaatgtggttcaggggaaatatttatgcttatcagtttcattcaaggcttcatgacaagacattccactgcaaggcccttagggacatggaagagggaattccagcagtggcaagtggagcattgtagtggatttatttacttgtag

SEQ ID NO: 12903 - DNA, 3369 bp, Oryza sativa
  Clone ID: TFbOSC404928j.C1.o12.fg
atggcgaagccggtgaagtacgacgaggaggaggaggaggtctcgtcctccggcgaggaggaggaggagcagtcggacggcgccgggtccggatctggcgaggaggaggatgaggaggaggaggaggcgcccgcggcggcggccggcgaggcggctggtggggaagaggaggaggtggatgaggaggagatcgaagccgtcaccaccggtgccggcgccgacgaggaagaggaggaaagcggtgcggccgccgccgcccccggggagggcgatgaggagtcgcagtccactgaggacgacgaggccgtcgtgggggaggacgacgacgcagatgaggctgaaggaggtgcagtagtagggaaacgtgagaaagccaggctcaaggaaatgcagaaattgaagaagcagaaaatacaagaaatattggatacacagaatgctgcagttgatgctgacatgaacaataaagggaaaggacgattgaagtacctactgcagcaaactgaaatatttgcacattttgccaaagggaaccaatcaaaagagaagaaaccgcgtggaaggggacgccatgcctcaaagatgacagaagaggaggaagatgaagaataccttaaagaagaggaagatgcccttgctggttcagggggaacacgcttgctttcacagccttcatgtataaaggggaagatgcgagactaccaactagctgggcttaattggctcatacggttgtacgagaatggtatcaatggtatattggctgatgaaatgggtcttgggaaaactcttcaaactatttcgctgctgggctatctgcatgaattcaggggaataactggtccgcacatggttgttgcaccaaagtctactcttggcaactggataaaggaaattcaacggttttgccctattctacgtgctgtgaaattcttagggaatccagaagagaggaaccatataagggagaacctattgcagccaggaaaatttgatgtgtgtgtcactagttttgaaatggcaatcaaagaaaaaactacactgaagcgtttcagctggcgttacattattattgatgaagcacatcgcataaaaaatgagaattctcttctgtccaagacaatgaggatttataatactaattatcgtctccttatcacaggcacaccactccagaataatctccatgagctttggtctctcctcaacttcttgttgcctgaaatatttagctctgctgaaacatttgatgaatggtttcaaatttctggtgaaaatgatcagcaggaggttgttcaacagcttcataaggttcttcgcccatttcttcttcgaaggcttaaatctgatgttgaaaagggattaccccccaaaaaggaaactatccttaaggttggaatgtctcagatgcaaaagcagtactatcgtgccctgcttcagaaagatttggaggttattaatgctggtggtgaacgcaaaagattgcttaacatagccatgcagttgcgcaagtgctgcaaccatccatatttattccaaggagcagaacctggtccaccttacacaactggtgaacatctagttgagaatgctggaaaaatggttctgttagataaattgctgcccaaactgaaggatcgtgattctagggtgctcattttctcacagatgaccaggcttttggatatattggaagattatcttatgtacagaggctatcagtattgccggatagatggaaatactggtggagaagatcgtgatgcatccattgaagctttcaacaaaccaggcagtgaaaagtttgtttttttgctttcaaccagggctggtggccttggcatcaaccttgctactgctgatgttgtggttctttatgatagtgattggaatccacaagctgatctgcaagctcaagaccgtgcacataggataggtcagaagaaagaagttcaagttttccgattttgcactgagtataccatcgaggagaaagtgattgagagggcatacaagaagcttgcattggatgctttggtcattcaacaaggccgactggcagagcagaagactgtcaataaggatgatctgttgcaaatggtaagatttggtgcggaaatggtattcagttccaaggacagcacaattacagatgaggatattgaccgtatcatagctaaaggagaggaaacaacagctgagcttgatgcaaaaatgaaaaagttcacagaggatgctattaaatttaaaatggatgacactgcggaattgtatgattttgatgatgataagtttggaagtttacttaattccatttacattcttgatttcttgaaggaggaaaacaagcttgattttaagaaactggtcagtgataactggatagagccacctagaagagaaaggaagagaaactactctgagtctgaatactttaagcaagcacttcgccaaggtgcacctgcaaaacctagggaaccacgaattccaagaatgccgcacctacatgatttccagttcttcaacaaccaaaggctcaatgaattgtatgaaaaggaagtccggtaccttatgcaagcaaaccagaagaaagatactattgatggtgaagatgaagatcagctggagcctttgactgcggaggagcaggaagagaaagagcagttgttagaagagggttttgcaacatggacgaggagagacttcaacacatttattcgtgcatgtgagaagtatggtcgaaatgatattaggagtattgccgctgaaatggaggggaagacagaggaggaagttcaacgatatgctaaagttttcaaggagagatacaaggaactgagtgattatgatagaattatcaagaatattgaaaggggagaggccaggatatcacggaaggatgaaattatgagagccatcgggaagaagttagaccgctataagaatccatggttagagttgaaaatccagtatggacagaacaaagggaagttctataatgaggaatgcgaccgttttatgctttgcatggtgcataagcttggttatggaaactgggatgaactgaaagctgccttccgcatgtcgcctttgttccgatttgattggtttgtcaagtccagaaccacccaggagttggctaggagatgtgatacccttatccgtctagttgagaaagagaatcaggaatatgatgagcaagaaaggcaggcaaggaaggacaaaaggatggctaagaacatgacaccgacaaagcgatctgcgttaagggtttcagaaggtgaaactactccatcgaattctttcaagaggcgacgccagtcccttatggatgactatgtgggctcgggaaggcgtaagcgaggttga

SEQ ID NO: 12904 - DNA, 2877 bp, Oryza sativa
  Clone ID: TFbOSC900293j.C1.o26.fg
atgtattaccgcaggcaaaggaaggcttcttctgaggccaatgccaatgtgtttatgcctgggggtccaaatgatatctcatttcctgcatcaaatagggatcatgattggggatatggcggtgttggcaaagaatgggaagctagttatgctcgcaaactccagttgatgaattttctttcttcactgcatcaacgcactgcaaatcctttggtaaccactagaatggatgctaacatggacactcctttggagcaaaaacagaaggacagctcagcaataatagttcttgattccgatgatgaggacggatatacggaaggatgtgaacagctcacatctgagaacaataaacaacaggcaccatctggactcactagtccttacacgacatggattgtatccagtgcgaaagaccaagtaaatggaaccttgcatgttgatggagtccaaagcactcaaattgttccatattatggtcaaaatgcaccgttaataaatcagttccctttgcaaaccagctggcaaccatctatccaatatgaaagggttatattgcagaaaagacctgaggagcaacgcgttcaagatctggtggcagcaagccatgcagagaagatagcagaaacacaagttctccttactcttcctactcttcctaatgagagaaaacgaaggaaaacagaacccaccaccctggtagatgttgatggtggaactaacctaggaaaaagaaaaaggaaaaatcatcaaaatcaagcagcagttgattcaaacttggatttgcaacaaaatgatgttccttcacaaagctacaggactatgatagaagaggagaaacctgtaaaagaaagtgatggtctcgaggatctttggaaagatttttcattggctgctgaatgtacaaagcttgatacaaatgaagacatgtccaatgaaaaagatgtggatgatgaaaatgagatggatgacgactgcaatcatgacattcgaattcatgaagatctaggccacgtatgccgtatttgtggcatgattgttagaaaggctgaaacaataattgattatcagtggaaaaaggcttcaaggacaagaacaaattactatgaatcacgttcaaaggatgctgatgagattgatactggtgctgttaaagtttccgaagatttcattgtctctgatattgccattcatccaagacatgcgaagcaaatgagaccacatcagttggaaggattcagcttcctggtcaagaatctagtgggagacaaacctggaggttgcattctagctcatgctcctggttcagggaagacatttatgctcataagtttcattcaaagcttcttagcaaagtatccttctgcaaggccccttgtagtgcttccgaaagggattttaggtacttggaagagggagtttcagcggtggcaagtggaggacataccactatatgatttctattctgttaaggctgacaaaagagtagagcaactggaagtcctcaaatcttgggaagcccagatgagcatactatttcttggatacaagcagttctcacgaatcatctgtggtgatggagatggaaacattgcagctgcgtgtcgggacaggctgcttatggtacccaacctacttatactagacgagggtcatacaccaagaaatcgggagacagatgtactggcatcactaaaaagagtccaaacaccacgcaaagtggtcctgtctggtacacttttccagaaccacgtttcggaagtgtttaacatcttggaccttgtgcgccctaagtttctcaagatggaatcatcccgtcctattgctagacgtataatgagtcaggtagcaatatcaggtatcaggagtttaaaaggggttcatgacagtgcattcactgagtcagtggaagacaccctgctgaacgatgacaacttcactagaaaagcccatgttattagaagtcttagagaattaacaaaagatgtgcttcactattacaagggtgatatcttagatgaactacctggcctagtagattttagtgtgtttttgaaactcagtaccaagcagaaagaaattgttcacaagatagaagcctatgagaagttcaaaagaagtgcagtggggactgcattgtacattcatccctgcctgtcagaaatttcagagggtgatgctgcagatagggcgagcaacttgacagatgccactgttgacagcttgattgagtctatcatcattaaagatggggtgaaagccaagtttttctttaacattctgtctcttgctaactctgcaggagagaagttgcttgccttcagtcaatatatacttcccatgaaatttttggaaaggttgttggttaagaggctgggctggcatgtagggaaggagattttcatgatatctggtgatactagtgcagacgacagagaagtggcgatggatcagtttaacaactctgccgatgcaaaagttttgtttggttccatcaaggcctgtggagagggaatctcccttgttggtgcatctcgagtcatcattctagatgttcatttgaacccatctgtcacccgtcaagcaattggacgtgcattcaggcccggacagcagaagaaagtgtttgtgtacaggcttgttgctgctgattctccagaggtgaagttccatgaaactgcattcaagaaagaagttatcccaaagctatggtttgaatggagtgagctctgcactactgaagacttcaaactgaatcaagttgatattgatgactctgaagatgaacttttggaggctaatgctatccgccaggatatcaaggctttgtatagaaggtcagctatctctttctcccggtgcgcatgtgcaagttaa

SEQ ID NO: 12905 - DNA, 3459 bp, Oryza sativa
  Clone ID: TFbOSC409799j.C1.o8.fg
atggggaagccggggaagtatggcgacggcgacgacgacgactcggaggaggagcagctctccccttcgtcttccgccggcgaggaggaggaggaggaggtagaagaggaagagggggaggagcagcaggaggagcagggggaggaggaggaggggtttagcggggacgaggaggagcaggaggtggagggtgaggcggatggggagcaagtggaggaggaggaagaggaggagtctagtgtcggggaggaggaagcagaggcggagggtgaggaggaggaagaggaggtggaggaggagcagggggctggggaagaggaagaggaggaggttgatgaggaggagatcgaggcggtcaccaccggcgccggaggggacgacgacgacgaagaagtgggcgatgacgggggcgcggaggaggagtcgcagtccacggaggacgacgaggtcgccgccgggaaggatggcggcggtgaagatggcgacaagttggaagatgctactggaaacgcagagatcgggaagcgggagcgagcaaagctcagggagatgcaaaagctgaagaagcacaaaatccaggaaatactggatgcccaaaataaggccattgatgctgacatgaacaacaaggggaagggacgtctgaagtatctcctgcagcaaactgaaatatttgctcattttgcgaaaggaaaccaatcgacagagaagaaatcacgtggaaggggacgtcatgcatcaaagatgacagaggaggaagaagatgaggagtatctcaaggaggaggaagatgcccttgatggtgcaggagggacccgtctggtttcacaaccatcatgcataaaaggaaagatgagagattaccaactagctggacttaattggctcatacgcttgtatgagaatggcatcaatggaatattggctgatgagatgggtcttggaaaaacccttcaaactatatcactgcttggatatttgcatgagtttagaggaataaccggtccccacatggttgttgcaccaaagtccactcttgggaactggatgaaggaaatacaacggttttgtcctgttctgcgtgctatcaagttcttaggaaaccccgaagaaaggaaccatatccgggaaaatttgttagtcccagggaagtttgacgtctgtgttactagttttgaaatggcaattaaagaaaaaactgcattgaagcgtttcagctggcgttatattattattgatgaagcccaccggataaaaaatgaaaattcccttctctctaagactatgaggatttacaatactaattatcgtctcctcattacgggcactccactacagaataatcttcatgaactttggtctcttctcaacttcttgttgcctgaaatatttagctctgctgagacttttgatgattggttccaaatctcaggggaaaatgatcaacatgaagttgttcagcagcttcataaggttcttcgtccatttctgcttcggaggcttaaatctgatgttgagaaaggtttaccaccaaaaaaggaaactatacttaaagttggaatgtctgagatgcaaaaacaatattatcgtgctctgcttcagaaagatctggaggttgtcaatgccggtggtgaacgcaaacgccttcttaacatagccatgcaattgcggaagtgctgcaaccatccatatttattccaaggtgctgagcctggtccaccctataccactggagaccatctaattgagaatgcaggaaaaatggttctgttagataaattacttcccaagctaaaggaacgtgattccagagtacttattttctcacagatgactaggctcttggacatcttggaagattatctgatgtacaaggggtatcaatattgccgaattgatgggaatactggtggtgaagatcgtgatgcttcgattgaagctttcaacaagccagggagtgaaaaatttgttttcttgctttcgactagggcaggtggtcttgggataaatcttgctactgctgatgttgttattctttatgacagtgactggaatcctcaagtggatctgcaagcgcaagatcgtgcacatagaattggtcaaaagaaagaagttcaagtttttcgtttctgcactgagtatacaattgaggaaaaggtgattgagagagcttataagaagcttgccctggatgctttggtcatacaacagggtcgattggcagagcagaaagctgtcaataaggatgagctattgcagatggtcagatttggtgctgaaatggtattcagctccaaggatagcacaataacagatgaagatattgaccgcatcatcgctaagggagaagaagcaacagcacaacttgatgcaaaaatgaagaagttcacagaagatgctattaagttcaaaatggatgacactgctgaactgtatgattttgatgatgataaggatgaaaacaaacttgattttaagaagttggtcactgacaactggatagagccaaccagcagaagagaaaggaagcgaaactactctgagtctgattatttcaagcaagcacttcgccaaggtgcaccagcaaaacctagggaaccgagaattcctcgaatgccacacttgcatgatttccagttcttcaacactcagagactcaatgaattatatgagaaggaagtcaaataccttgtgcaagcaaatcagaaaaaggatacggttggtgagggtgatgacgaagatcaactggaaccgttgactgtggaggagcaagaagagaaagagcagctattggaagagggcttttcgacatggacaaggagggacttcaatacattcatccgtgcttgtgagaagtacggtcgtaatgacataaagaacatatcctctgaaatggaggggaaaacagaagaggaggtgcagcggtacgctaaagttttccaggaaagatacaaggaattaaatgattatgaccgagttattaagaacattgagaaaggagaagcaaggatataccggaaggatgagattatgaaagctattgggaaaaagctagaccgctataagaacccttggttagagttgaaaattcagtatggccagaataaagggaagttatacaacgaagaatgtgatcgttttatgttatgcatggtgcacaaactcggatacggaaactgggatgaactgaaagcagcctttcgcatgtcgcccttgttccgatttgattggtttgtgaagtctagaacaacccaagagctagctaggaggtgcgagaccctcattcgtctagtggagaaggagaaccaagaatatgatgagcgtgagagattggccaggaaagataagaagaatatgtcgccagcaaagcgttcttcatcaaggtcgctcgatacccctccacaaagctcttcgaagaggaggcgccagtcctacactgaagccaatgcaggctcgtaa

SEQ ID NO: 12906 - DNA, 3849 bp, Oryza sativa
  Clone ID: TFbOSC400996j.C1.o76.fg
atggaggaagcggcggcggcggcggcggatttcgatggcggcttcggcggcgccggggaggacaacctgtccatgcccctcggcgacttcatggccttcctcgataacgaggactggaaggagcagcagcacgagtggcgatgggctataaatggccatcaggctgttgggattggagaaggtcaaacaggaagcagcttggtaatgaatggtcaagcattacaaacaaaaactcaaaacgacaagtattttgggacggagggcaatcaaggtttagagatgccagtggacagcacaagttctgaaaatgcatttcaaaaccatgaagaaatttttgagaataaagaaaattggtcaaactactcgcatacagatccttcacatagtcagatggatgtaatggtggaacttaacaatggtggagaatcttttgatcactcagaggatacctcttatagattgcttagcaatgattttttggaaaattcaaggaatggtaatcctgagatgcatttaccaatggatgcattaaaccatgctaaaactgttgatgaagaaattgtccctccatatgaagattatacaaatggtttatactatgattcgggatgtgatatgttcgcagagcaatctggtttaagtgaagttaaatgtgagggcacaggtcccatgcttggtaattctgagcaggagggtaaccatttcacgtcagtgcctatgtttgaccatagtgctgttatacctgatattccttacaccgagttgaacatcggtgatgtgcctggaagcatgcagaatggaaatggcagttgcctaactgtacaaggagaatatctgcagggggagtatcaggagtatcctcagccagattatggatcgtttgatatggctaatgaaatagtgctgcatgatttgccacaaaacaatcagtcatatgagctggaacaattaccacagaatatatgtgaaagcagttcaatgcaagtgggctctccagatcaatattgtgatgatacatctctgtcggattattacatggatgatgtatcttcgatagagtcgatgtccagcgagcagaaccgatcagaagatatctgtttccggagtgagtctagcactgactcttctccggtgccctcaagcagaaactccaccactgaggatgctgataaatactttggagatgcaccaaaacatttgcagaattccatgtttcctgtcagtacccaacaccaacactcattcatgaactcaagtgatccaatgcatccaacttttcataaaaagtatgacattcctagaaatggcagctcttctattctgggtaactcatcaaggaattgcttcagtttagatagcaatcgtgattctgatttatgtattcttgagggtagtagaagtcttgctagtggacatgtgttgccaccccaaggattgcagcataactttcaacaatctgtgtgtgccaatcctaatcttcctcggtttggagggagatacaggccgcatgaggaaagaatgactttgcggcttgcattacagccattacttgatgcacctcttgcatccagtttgcttgatatttctcagccaaagtctgaggctaatccacctgatggagttttagcagttcctttattgaggcaccagaaaattgccttgtcatggatggtacaaaaggagagaaatggttcgagttgctctggcggaattcttgcagatgatcagggcctgggtaaaacagtgtcgactatatcactgattttgacagaaaggtcaccagttccatcttcagctgttaagcaagaaccatgcgaagctgtaacccttgacgatgacgatgaggatgacgatgctgagcctcatttgaagaaaccggcactagcacatctagcagatacatgtaaacctgaagcgacaagtagtaccattaagacagaaaatcctattgcaaatgttaaggctagaccagctgctgggactttggttgtttgccccacgagtgttctacgtcagtgggcagatgaactgaggaataaagtcaccagtaaagctaacttgacctttttagtatatcatggtagcaaccgcacaaaggatcctaatgatcttactaaatacgatgtcgtgttaaccacatattctatagtaagcatggaagtaccaaaacaatcaagtcctgatagtgatgatgaagagaaagggaagcctgacaggtatggtgctcctgttggctcctcaggcagcaaaaaacggaagacttcctcttctaagaagaacaaaagtggaagcacaccagagagtaaattgcctgagaaacctctcgcaaaagttgcatggtttagagttatccttgatgaagcacaaagtattaaaaattatcgaacccaggttgctagggcatgctggggtctgcgagccaaaagaagatggtgcttgtcagggacacctatacagaatgctgttgaggatctctatagctatttcagatttctcagatatgatccatatgctgaatacaaaaaattttgcttcatgataaaaacaccaatcagcaggaacccaattactgggtacaagaagcttcaggttgttctgaagacagtaatgctgaggaggacaaaagcaacgatgcttgatggaaaaccaataatctcattacccccaaagaccgtctctcttaagacagtggacttcactagtgaagagcgtgctttctataacactctcgaagcagaatcacgagagcagttcaaggagtatgcagctgctggtactgtcaagcaaaactacgtcaatatcctgctgatgcttttacggctcagacaggcatgtgatcaccctcacttagttcgaggtcatgagtctacttctagttggatgtcttcattggagatggcaaagaagctgcctgtagaaaggcagcaatcgttgctggtttgcttgcaatcgtgttctgcgatatgtgctctctgcaatgatgcgccagaagatgccgttgttactatatgtggtcatgttttctgcaaccagtgcatactggagcaacttaccggtgatgacagtgtatgtccagtgtccaattgccgagtccgactaaattcaacttccttattctcccgaggcacccttgaatgtgctctgagtagatcaacctgtgagtttctgtctgatgattcctgtgaagacatggtgcaagggaagcaacctagatttgattcgtcttatgcatcttccaaagtgagagctgccctggatattcttctctcgttgcctaaactggatttaacccatatgagtgatgacaaaaataaaattgtgcatcctgacaaaattaacgggaatagtactccctctgaatatgctggcaccaaaataactgagaaggccatcgttttctctcaatggactagaatgctggatttggtagaggttcatttgaaatcttctcatctatcttatcggaggcttgatggaacaatgtccgtcgcagctcgggatagagctgtaaaagacttcaacacaaatccagaggtttctgttatgattatgtctctcaaagctgcaagtcttggtctgaatatggtggcggcctgtcatgtacttttgcttgatctttggtggaatcctactacagaagaccaagctgttgacagagcgcatcgtattggccaaactcgacctgtcacagtgtcacggttaaccataaaagataccgttgaagatcgtattttggctctccaggagaaaaaacgggagatggtggcttctgcatttggggaagacaaatctggtgcccatcaaactagattgacggtggaagacttgaactatttgtttatggtttag

SEQ ID NO: 12907 - DNA, 2097 bp, Oryza sativa
  Clone ID: TFbOSC407487j.C1.o21.fg
atggcgccgccacaaatgtatgagcgccgcctcctcgccgccgcctccctcctcctctccgccgatgcgcagggccaaccaccccacgccgccgcccaactcggagtcggagtcacggccgagctcaagccgcaccaggtcgatggcgtcgcgtggctcatccgccgctaccaactcggcgtcaacgtcctgctcgtggtcttatgtcctctaagtgtcaccgatggctggctctcggaattcaataaattttgtccttctttgagggttatccagtatgttggtgataagttgcaccgtcgtgatctccggagaatgatgtttcaggatgtccaaaaatcttcatcgtcatctcattccactgagttaccgtttgatgtcatgatgacaacctatgacatagccttaatggaccaagaatttctttcacaaattccttggcactatgttgtcattgatgaggcccaacgtcttaaaaacccatccagcgtactgtataatgtccttgagcaacgctttatcatgccaagacgtctgctactaacgggcacccctatccagaataacctttctgaactatgggcattgatgcacttttgcatgccctcgatttttggtaccctggatcaatttctttctactttcaagcaatcaggtgattcattgacaggtggcgaaactaataaaacggacaaacagtttaagatccttaaacatgttatacaactgcgaaaagcttctagtcatccatatctattcagtggcattgaacctgagccttatgtggaaggggagcatttggttcaggctagtggaaagcttgtcatgctagatctcattcttaagaagctccatgaagtaggccatcgagttctgctatttgctcagatgactcaaacactggacattcttcaggacttcttagaattgcgtcagtacacctatgaacgtctggatggttcagtgcgtgctgaggaacggtttgcagcaataaaaagtttcagctctcaacctaccaagggtgttgtcagagatgataatcagagtggagcttttgttttcatgatatcaactagagcagggggtgttggccttaatctcattggtgctgatactgttattttttatgagcaagattggaatcctcaagctgacaaacaggccttgcagcgtgcacaccgcattggacagttaaataatgtcatcatgcgaagagcagaaagaaaacttaagcttagccacagcgttattggagaggaggatgcaacttatgggaaggggaaatatgtagaaaatgaagctagcgacatgcgctcgattatatttggcttacacctatttgatacttcagatacgactgcagagacaatgaatgatgacacagcttcggagactatcaaagaagagactatgttgaagctgaaatcaatgtctgaaaaagtagtgttgatgcgtagtcatgaaccttcagaaaaggatgaacgggcattcgaaatcaatccaaatatgacagacaacagtggggctgttgttacgagggtatctgattccgttaatgttgatccggattttaatgaagccgcatacttatcctggcttgagaagtttaaagagtcttcgcattctaaggaaaataccagagctgaactagaaaggcaaagaatagcacctgaagaaaagttcctaaaacgtgaagctattaagaaaaaggtggaagaaaagagattagccaaatgggaatccttggggtaccagacattaaagatcaaagatcctgacatcttaccgaaccagaatattccagactctggatccgtccaacttgtatatggagattgcactaatccttcagtagtttgccctgcaaagcctgccatcatattcaggtattattttccgagagtgaaatatgttacattctatgaaagggaattactccatcctaggattgttgaaggaaatgttgtgttgataattcaggaacctggggacatggaggaatgttcgatgctttggccaatctctcaacatgcattccagatgcttataatcgtgcttctgaatttgatgatctccacctggcagatcttcacttga

SEQ ID NO: 12908 - DNA, 1038 bp, Oryza sativa
  Clone ID: TFbOSC22947j.C1.o9.fg
gcatacgctgctgctggtacactcaaacagaactatgccaacattcttctaatgctgttgcgccttaggcaggcctgcgatcatcctcttcttgtgaaggggcatcagtcagagtataaaggcgatggttctatagaaatggcaaagcaacttcctaaagaaatgataataaatttgcttgcaaagctggaagttggagagttttgttctgtatgcagtgatgtacctgaggatgccgtcgtgacgatgtgtggccatgtcttctgctatcaatgtatatacgagcggataactactgatgagaatatgtgtccctcccctaattgtggaaacacattaagtaccgattcagtattttcgtcaggagcgttaaggatttgcatgtctggtgtatccagttctcatgcatcagggagttcatcattagatgacgagtcatcttctattagtcaaactagttacatatcctcaaagatacaggcggcaatcgatatactgaattcgatcattaacacctatgcccttaccgacagtgataccgtcgaatcaaatcctagccgagtggccccagtgaaagccattgtgttctcccagtggactggcatgctggatttgctggagctttcattgaatagcaatctcatacagtacaggagactagatggaacaatgtccctcaattcaagagataaagcagtgaaagattttaacacagacccagaggtcagggttatgatcatgtcactgaaagcaggtaatcttggtctcaatatggttgctgcttgccatgtaattctccttgatctttggtggaatccttatgctgaggaccaggcaattgatagagcacacagaattggtcagactcgtcctgttactgtctcccgtttaaccattaaagatacggtggaagatcgcattttagctctgcaggaggaaaagagagccatggttagctctgcttttggcgaagacaaatcgggtggccacgcgactcggctcaccgtggatgatctgaagtatctatttaggttttga

SEQ ID NO: 12909 - DNA, 2436 bp, Oryza sativa
  Clone ID: TFbOSC415522j.C1.o1.fg
atgtcggaagttagatccgtccctgggatgaaggtggaagcatccccggccgcggccgccgctgccaccgtggattccccgacatccgttctggaggatgatgagaagatttctgaatgtaagaatggggatgtcttggataccaccgaggcgattaagcaagaggaggatcatctcgatgtgcttattgaggagaaagttgatggttttgtggatgcaagttcttccctgaatgtggaacctgcggctaacaacagtgatttgtcacctctcactgtgccggtgaaggaagaaggtcagttattggagcctgtcaaggaggaaaaagctgatgattttgtggatgcagttccatctctaccgattgaccttgaggccaagaatggtgatgcatccctcatcactgatgcgatgaaggaggaggaagagaagttgcacgacgcccgggttaaggctgaagaagaagaggtagcacggaagagggaagaggctgcaagacttgcttttgatccaaatgcacgttttaacaagttggacgagctactatcacagacacaactctattcagaatttctacttgagaagatggaaacgatcgctgatgtggagggcgtccaaactcatgctgaagaggagccagtagaagagaagaagaatgggcgtggcagaaagaggaaagctacttctgcaccaaagtacaatgataaaaaagccaagaaagcagtggcagtcatgcttacaagatctcatgaagattgctcacctgaggattgtactctcacagaagaagaaaggtgggaaaaagagcaagccagacttgttcctctaatgactggcgggaagttgaagtcctaccagataaagggtgttaagtggttaatatcactttggcagaatgggcttaatgggatattggctgatcaaatgggccttgggaaaacaatacagactatcggttttcttgcccatctcaaggggaagggtcttgatggtccatacctgataattgctcccctatccactctctcaaactgggtgaacgagatctcaaggtttgttccatctatgactggtctgatttatcatggggacaaagcagcccgggcagagataaggagaaaattcatgcccaaaaccactggcccagattttccattaatcgtaacttcctatgagatggctatgtcagatgcaaagcatcttgctcactataagtggaagtatgttattgtggatgaggggcatcggctaaagaattccaagtgtttattattaagggagctaaagcgcctgccaatggataataagctccttttgactggaactcctcttcagaataatctagcagaactgtggtccctgctgaacttcattttgcctgatatattctcttcacaccaagaatttgagtcatggtttgacttttctgcgaaaggaggtgaagaagaacaagaggatagtgaagagaagagaaaagtcgatgttgtttcaaagcttcatgccatattgcgcccgttccttctaaggcggatgaaggaggatgtagagcatatgcttccacgaaagaaagagataatcatttacgctaacatgactgaccatcagaaacaaatccagaatcacttggttgaacaaacatttgatcaatacctgcatgaaaaatcagaaattggtctgtatccacctgttgagaagctcttggaacagtgcggcaaatttcagctcttgaacagattgctaagtttgctgcttgcacggaagcacaaggttctaatattttcacagtggacaaaagttttggacattatcgagtactacttggaaacaaaaggccttcaggtttgccgaattgatgggagtgttaagttggaagagaggaggaggcagatagcagaatttaatgacttgaacagcagcatgaatatctttattctaagcacacgggctggcgggcttggtatcaatcttacttcagcggatacctgtatcctatatgatagtgactggaatcctcagatggatttgcaggccatggatcgatgtcaccggattggtcaaacacgcccagttcacgtctatcggttagcaacatcacattctgttgagggccggatcatcaagaaagcatttggcaagttgaggttggagcatgtggtgatcgggaagggtcagtttgaacaagacagagccaagcctaatgccctagatgaagcggagttgctggcgctgctcagggacgagcagggcgacgaggaccggatgatccagacggacatcagcgatgaggacctcctgaaggtgatggaccggagcgaccttacaggccctcctgccaatgccgacgccgcccctctcgtccccctgaagggacccggctgggaggtggtggtgccgacgaagagcggcggcggaatgctgacgtcgctcaccagttag

SEQ ID NO: 12910 - DNA, 665 bp, Oryza sativa
  Clone ID: TFbOSC408712j.C1.o1.np
caaacctaataatgctaatatttaaatcacttgatattaagtgctgcttatgcttttcattaatgaacttttaggaggctaactatgcttccttgtgcaaataaacaatctaattgcaggagtatgcagctgctggtactgtcaagcaaaactacgtcaatatcctgctgatgcttttacggctcagacaggcatgtgatcaccctcacttagttcgaggtcatgagtctacttctagttggatgtcttcattggagatggcaaagaagctgcctgtagaaaggcagcaatcgttgctggtttgcttgcaatcgtgttctgcgatatgtgctctctgcaatgatgcgccagaagatgccgttgttactatatgtggtcatgttttctgcaaccagtgcatactggagcaacttaccggtgatgacagtgtatgtccagtgtccaattgccgagtccgactaaattcaacttccttattctcccgaggcacccttgaatgtgctctgagtagatcaacctgtgagtttctgtctgatgattcctgtgaagacatggtgcaagggaagcaacctagatttgattcgtcttatgcatcttccaaagtgagagctgccctggatattcttctctcgttgcctaaactggatttaacccatatgggtgat

SEQ ID NO: 12911 - DNA, 2082 bp, Oryza sativa
  Clone ID: TFbOSC422293j.C1.o4.fg
atggcgccggtcaggggagagagagccgtgctgcctgcaagggccgcgtgcgggctccgggctgccgccggcacgcctgcgcccgtctgggttcccgtcggcgggcgcgcggtcccttgggccgccgccgccgccgtggacgtgggctgctgctcaccgctctgctcgctcccgtgcccttcctcttgccagctcctcaagctccctgtcggcggtgatgtcgccggcgatggagccgttgatgttgctgcgcaaggtctcaacctctacctccgccgcacgtgccgcatcttccgccgcctccgcctccgcctccgccctggctgctgccaactccgctgccgccagtctggctgccctcgctgctgctgcagcggtctgagccgttgctcgcctgcgctcttctgctgcggcgagctcggcgtcctgctgacgccgagtgctcgaggcgaccgaacgccgagaccgagcgtcggacatggcgcacctccggggggctgctgcgtggagagggggaagggaaaggggaaggaggagcaaccggtgctgttgctgctgctggctaagagctcaaccgagcttgggagggggtggaacaagagatgtttagtctacaggaaagtagctgcttttcttcgtggtttgctccaggcagatgtcatacacaacgcaatgatcatttgcccagtcacggtgatagaaacctggcgcaaagaacttaatattgttggtgtgctggttatcaaagtgttccgttatgatagaagaaccgactgcattgcactaaaaagcatagctactgaattttatgcgctgatgaacttctgttgtcctaatctacttggagagtccggacaatttcatgaaaacttcagcatgccaattgaaagggctagatatagaggcgcatctgcgcaattgataaaagagtcaatagaagcatctgagaggctgaagaaacttgttagcccttttgtattgagaaggacgaaagagatgttaaagaatagcgcctctaaacttggtactaaacatgaattgactgtgtggttgaagatctctgctgctcaagaatatctttacaccaatcttatcatgagcaatgttttgggagatgagcctggcacacctttggcagcttctcaagttgcgaggagtatctgcaatcacccagtaatggtgattggttctgactttgaacagaggggtgaatcagaagagaagaaggatgctttaactgacattatccgaaaaggtttattggcgagagcattgtccaccatagtagatccaagcaaaatgattcgcatggatgggaaaacacctcagaaacagcgaccaatgttaatccaggtgattaaaggtgagaaggcaacagctgtaacgaaggaaaatcagagcaggcgggaaataacaaagccgacaaggagggtcctgagtatgcctcctgaaggttttggagtctccaaaactttgattgagcttctagctatacatggaggtgcttttgatccgtcacttgatgaatctgaaatcaggcaagtcagaggacatgaatctgttgttggtgtatcaaaccatttgcatctgttttcccagagggaatctgaccctgtcacaaatgaaaaacacaaatatacagctggcccaagtcgcaagcgcagcgaactatctatgccagtagatgcagaaattctgaagtcaataaggagcacatttatcgaaattcctatacaacagctttataagatatctggcaccccgcatcaaataagcaaggcggaaaatcttgtaaaggaattcctacaagagatggattctatggttgaggaggagatctccgttcctatggagaaggttggtttggtcatcgggagtggtggtgcaactattaaaaaatacaaaaatttacatccaaggagtgagtcaggcactacaggaaggtttgttatccggggttctcaaaaccaggccatccgatggggctggaaggccttttactctgatttacatgtttgccttggtgatgtggccttttactctagatactgcaggaatgttcttaggcagatactgcggtaa

SEQ ID NO: 12912 - DNA, 2031 bp, Oryza sativa
  Clone ID: TFbOSC25681j.C1.o1.fg
atgcggcgaggctacgaggagatcgacgacgacgagtggtcgaaccacagcttcaagccttcgcgcgtcctcaagcgaccaagccgaggcgcccagccggactcgcagcctcccccgcccatcgactccttccgttacaaccccaggccttcctcctcctccgccgccgccgccgccaccgccaccgtcgtcctctccgacgacgacgacgatttcgaacttggtgaggaggagcggttgcgccgcgccgggaagagcacccgcgtgctcaatcgtccgcagcggcagcacagcccccctgggcgggcccttccgccccgcgagtccttccgctacaaccctaaacccgccaaggccgccgccgcggtgtcggtttccgatgacgacgacgacggctttgatctcgaagacgatgatttcgacatcccttcttcgaggacctcgcgtccgcgccgtaccgctggtcggcgcttggcaaccgccgtcgccgacctctcggaggaagacgacgatttagagctcgctgatgatgattttgaccatccagacccaaggccaacgaggccgcgtcgagccaccgctcgccgtttcgtgattaaggacgatgatgacagcgacggggatgtgggtgcgtctgaggtggatggggtagaagcagaggaggatgatggtgtgaactggtcggagttggagaatgaggacgatgaagatggggactatggtgagacgaaggtggaggtggaggagggggatgtagtgggtaaggcattgcgcaagtgcgcgcgcatttcggctgatttgcgacaggagctgtatggctcatcgacaaggaattgtgagagttatgctgagatagatgattccagtgtccgaattgttacccaggtgtggagttttgattcaatggatgtgtcggagcaggatgatgtggatgctgcatgcacaagcgaggagtcggagtttgagcctattctgaagccctaccagcttgtgggggtcaattttcttcttctcttgcaccggaaaaatatcggtggagcaattttggctgatgaaatgggtcttggtaagacagttcaggccgtgacctatcttactctgttgcggcatctatataatgacccaggtccacatctaatagtttgcccagcttctgtgttggaaaattgggaaagggaacttaaaaaatggtgtccttcattttcaatcatcatgtttcatggtgctggaaggactgcctactcaaaggagttgagttcattgggcaaagctggttatccgcctccatttaatgtcctccttgtttgttactctctctttgagcggcggagtgctcagcaaaaggatgatcgcaaagcactcaaaagatggcgatggagttgtgtgttgatggatgaagcacatgtactgaaagataagggtagcttccgatggagaaaccttatggctgtcgcacaacatgcccgccaacggctaatgctgacaggaactcccctccaaaatgatttgcatgagctatggtcattgttggagtttatgatgcctgatatatttgccactggagatattgatctgaagaagctgttaaatgcagaagatcatgagctaatttcacgtataaagtccattttggggccatttattcttagacgtttgaaatcagatgttatgcagcaacttgttccaaagatacaacatgttaatttcgtaacaatggactcagagcagtttcaagcttataactatgccattgatgaataccgtggtgcttgtcaagctcgtagcgcaaaatccacatccaatttttctaataatgttgttgggttgattccaaaacgacaaatatcaaactatttcatgcagttccgtaagattgcgaaccatccattgcttataaggcgcatttacagtgacaaagatgttgatcgaattgcaaagttactgtaccctaaaggtgcattcggttttgaatgttcattggaaagagcaacccaagaacttaggaagtacaatgattttgctatccaccaa

SEQ ID NO: 12913 - DNA, 3114 bp, Oryza sativa
  Clone ID: TFbOSC900282j.C1.o6.fg
atggatattattgacttgtgttcagacagtgaagagtacttcagcccgtactcagatacagaagacaatcttgattttgacgatcccaatgatggtgttaaccaggtggttttgcacaacacagcatttggcaataatagttcagaactactagtcgggctggatgacgataactggttaaacaacactcatgctttatcctctcatagacctgctgagaatagatcagacattattgaaagcagcagcggtgtcaacactgactgtcagaatagtgcttggcaatacaggactcttccacataccttcatgagcagcagttacaagtctcgtccactttctctaacaggaggtaacaatgttgaaagtacacaccccactgtgaagcctaacactgtgcactataatggaattgggtttccttcacctgctattgcaagtggctacaagccatatgttagttatggccagggtgtttcaattgatgatgatgacgatgatgtctatgaggttctgcatcaaccatttccgttcagtcattcgagtttaggtgacaagaagatcgaggaagaatccacttggaagtacaatggttttcaaacaagttctgcctatggaatcgagatgcctacatctgcaaggtcaacaggtggtgtctctgcatatggaggtctaaactcacataggatctttcctccatcagtgccatacaacaattctgttaacaattttggagtcaatggccttggcactcagagccacttaaatatagaaaagaggctttttggccgtgatgagagggtggtgtatgatgaagccctgaagcaaatcagtcaagaaacaacggaagaaaatttgcctgaaggtgttatgtcagtatcactccttaagcaccagagaatagcattagcttggatggtttccagggagaatagctcacattgttcaggtggaattttggcagacgatcaggagagggttgagcagtctaagttcatgtctgctgatgtgggcagcatgaaatctgtagctaaccttgatgaggatgatgaagtagtgatagtcatggacaagaagcaactgaagggtgaatctgtgaatatgctacaggattcaacactgtttccatcatcagaagcagcaagtgatgccgctgatctgaagccctgggctagtctaccggggtctgctgttgatagaatggtaaatgctgtcaaagttgaacccaagaagaaggctagagtgagaccatcatcttcgtcaactttgaggtctgctaatagatcaactgcgggaacactagtggtgtgtccagccagcgttcttagacagtgggctagtgagttggctgccaaggttactgaaagttctaaattgtctgttttggtttatcatggaggttcaaggactaaagatccaactgagttgacaaaatatgatgttgttgtcaccacatacactattgtagccaacgaggtacccaaacaaaactctgatgaggatatggaggaaaagaacagcgaaacatatgggttatgtccagcattttctattggcaataaaagaaagaaagacagcgaaccaaagaagaaaaagaaacccaaaaattcagatgctgaccttgatggtggaccacttgccagagtgcgatggttcagagttgtgcttgatgaagctcaaacaataaagaatcacaatactcaagtggctagagcctgttgtggactgagagcaaaacggagatggtgtttatcaggaactcctatacaaaatacaattgatgatctgtatagttatttccgtttcttgaagtatgaaccatattctgtgtatggttcctttcgctctatgataaaataccaaatttctagagatgcaactcgtggatataagaaactccaagctgtcttgaagatagttctgttgcggcgcacaaaagaaacactaatcgatggagaaccaatcataaaattgccaccaaaaacgattcagctgagcaaaatagacttctcaaaagaggagcgaactttctatatgatgcttgaagaaggttctagggaaaagttcaaggaatatgcttctgctgggacgataagagaaaattatgcaaacattcttgtattgctgctgcgacttcggcaggcttgtgaccatcctcttcttttgaagggaaaggaaaaagatttgattgatactggttctgtagaagtggcaaagaaacttcctaaggaaacagtgataaatttgcttggacagctggaaggagactatgcaatttgttccagatgcagtgacccacctgaggatgttgttgtagcaacatgtggtcatgttttctgttatcagtgtgtgcataagagcttaaaaagtgatgagaatgtctgtccctccccttcttgtgggaagaaattaagcgctcaatcagttttttcacctggagtgttaaggttttgtatagctgataaattggagtctggtgcaacaactagtagttctgtagaagcagatggctctccatcaatctgtgaaagcagttacatatcttctaagatcagggcaaccactgacatacttaactcaatcgtgaatacacctgctctaacttggagtgatactatggaatcaagtccaagtgaagtagccccttctaaggcgatagtattctcccagtggactggcttgctggacttgctggagctttcgctggatagcagccgtataaaattcagaaggctcgatggtgcaatgtctctcaacttaagagaagcagcagtgagagaattcaacactgatccagaggtgagagtgatgctcatgtcacttaaggctggaaatcttggtctcaacatggtagctgcttgccatgtgattatgattgatccatggtggaacccttatgctgaggaccaggcagttgatagagcacacagaattggtcagacccgtcctgtaaccgtttcccgcttaactatcaaagacacagtggaagatcggattttagctctacaggagaagaagagaaagatggtccaatctgcttttggtgaggacaaacctggcggcagtgcaactcggctcaccatagatgatctccaatatctattcggaatatga

SEQ ID NO: 12914 - DNA, 12738 bp, Oryza sativa
  Clone ID: TFbOSC4701j.C1.o12.fg
atggcctcatcccaacaagttgagcttgaggctgcaaagcttcttcagaaactcattcaagagtcaaaggatgaacctgctaaattagcaacaaaactttatgtgatatgccaacatatgaaactaagtggaaaagagcagtcactgccatatcaggtcatatcaagggccatggagactgttgtaagccaacatggaatagatatggatgcgttgcgatcatcgagaatcccattagctggtggtccacaagcaggagattctagtggtgctatgcctaaggataaggagatcattggcagtcaacctcccatggttggtactgatgcatcccaaagtagtgcgcatgctggattatggaattttccatcaggttcagcagatatggcacgtcacagtgcatctatttcaggcagggtcccagcaggaccaaataggagcgatgttgcaggagctgatattcatcaaggctccatgtcacagaagagtggaagatcctctggaatggaaagccctgccagtctgcaaatagaggatactagatctatgaattcacatgattctttgaagtcagatgaaaaaacaagcaaaaaatcatcttctaagagaaaaagagtggatccaaaagcagcaggggacttgcattctgaagacaactcaaaatcagatgccatgtctaccggacaaaatattagaaagggaaaacagcctggcaaagctggtactcagggtcaactttccaggacagtcgaacacgatccatcacatacattacaagttggtaatgctcaggtgccaccgttacccagtggtgcacctttctttagggctcaccaggaaggaccatcagcttcttctgcaaggactatagacaagactaaaccatcaaatccattcacaatggcacaaatttcaaattttgctgaaggactagcttctggcaacattcctgctgagttgcagaaaagtatattgggaggagcaaatctacttaatgctagttttggctggaaccagaatgcacaaggtccagttatgaagaatactcaagggtctgttcccaacctaatgagacctggtgttaatgtcgaagggaaagttaacttaggatcacaaggaacttttaattctatgtctgcatcacaaatggattaccccacagttcctccttatgtgtcttcttcctttggaggtggtccacagtatcttgacaaagggaaagacttgacttcaggcaatactggcagtgaactaaattcttctaaagctggagctcagctggggatcatgcatatgcattttgacacacaaatgcggtataactttcagggcagtccaatgcaagaaaggcacggaattgtcagagcacctcagagagctggttcatctcaaatgtctcaaacctctcccagcattccattcaaagagcagcagttgaagcagctcagagcgcagtgcttagtatttcttgcatttagaaataatctgcagccccggaaggtacatcttgaaattgctttaggtgttggtccccctgcttcagaaggtggcagtgcaggtcagagaggtagtgagagcagaatggctgatggttctggaaaggaaaatggaaacagccaggaaaaccctgctatttttggtaggcaaagtgatatttctagacttcaatcaacatctacaggcagtgttgcggatgttgattccgcatcaaaggacccagaaattgttaaaaagaagatcaagatagctgaacatgagaaatcatttgaagcagaaaatatccagcaaaccgttcctatacagggaactgattctgaaatgcattctcaagaaacgatatctcccatgccatctgggcaactgcattactttcagggagatacaagaaaaactacccctgagatctacaaggctgatgcagaaaatttgaataggaacttaggctgggtaggaggccagggaccatctcctttgggtggtaataggcatactagtatggaagttggcctcttggccaaagatgaagtgtccaaagaaccatttgcagttttgaggcctcatcatatgcctgttgatggtagcaaccacaatttatctggaaaggatcaaactcctgagacagctggcaatgaaattgataatggtagccacatgggagagatgatatttgagcgatctgcagatgaaggagacgaagatctttctgagcaagatgatttaccattatctcctccgaagtacacaatgactgataaatggattttggatcatcagaagagaagatatgaagaaaacaaaaggaaggcattagagttacagaaggcacacaggagaatttcagcatcctatgagaagctaaaggaaaatgttagttcatcggaggatctttctgcaaaaacaaagagtgtcattgaattgaaaaagcttcaacttctccaacttcaacgtcgtgtgcgcagtgaatttttgcaggactttttcaagcctaatactactgatttggaccgcataaaatcagtaaagaaacatagacatggacgtcgtgttaaacagcttgaaaaaattgaacagaaaatgaaggaagaaaggcaaaagagaattcgtgagagacagaaggaattctttgctgatatagaggcccacagagagaaactggaggatagcttcaaggttaagagagaacgcttgaagggtttcaatcggtacgtaaaagagttccacaagaggaaagagcgaattcatagagagaagttagacaggatccagcgggagaagatcaacctgcttaagaataatgatgttgaaggatatcttaggatggttcaggatgcaaaatctgatcgtgttaagcaacttctgcgagagactgagaaatatctacagaagcttggtgccaaactacagggttccaaatcgatggatggccgtgtttcatatgcttctgatagcacagcaaatgatattgaagatgagagctaccagccgcagcattatctagaaagcaatgaaaaatactatcaattggcccacaggtaccagatgaacggcttgcgttggctggtttcattgtacaataataatttaaatggaattttagctgatgaaatgggtcttggcaaaacagtgcaagtaatctctttgttatgctacctcatggaaacaaaaaatgaccgggggccattccttgtggttgtaccatcttctgttcttcctggatgggaatcggagctcaacttctgggcacctagtataaataaaattgcctatgctggccctccagaagaaaggcgcaaactattcaaagagatgattgtacatcagaaattcaatgttcttttgacaacgtacgagtacttaatgaacaagcatgataggccaaaactaagcaaaatacagtggcattacataattatcgatgaaggacaccgtataaagaatgcatcttgtaagcttaatgctgatttgaagcattatcggagctctcacaggctattgttgacaggaacacctctgcagaacaatcttgaggagctatgggcacttttgaattttctgttgcctaatatatttaactcatcagaagacttctctcagtggtttaacaaaccatttgaaagtaatggtgatagctcaaccgaggaggttgaaaatgaattgccggagaagattgaaagacttgtaagatgttggccatctgcttatcagaaacttctaataaaaagggtggaggaaaaccttggtggaattggagcagttaagattgagggttatttacctagacactacctgccatcaattctgaggctctgtggaaaacttgagatgttggatagattgctgcccaaactcaaagccactggccatagagttctgcttttctctacaatgacaagattgcttgatgtaatggaggattatcttgtatggaagaagtataaatacctccgattggatggtcacacttctggccaggagagaggagctcttatcgacaaatttaataatcctaattctcaagctttcatttttctgcttagtatccgagcaggaggtgttggtgttaatctccaagcagccgatactgtcatcatatttgacactgattggaatcctcaggttgatctgcaagcacaagctagagctcacagaattggtcagaagaaggaagttcttgttttacgtttagaaacagtccaaacagtggaggagcaagtcagggcttcagcagagcataaattaggtgttgctaatcagagtattacagctggattttttgacaacaacacaagtgctgaagatcggagagagtatcttgaatcactgctacgtgggggtaagaaggaggaagcagctccagtgttagatgatgatgctctcaacgatcttcttgctcggagcgaagatgagattgatatatttgaatctattgacaagcaaaggagagaggaagaaatgatatatgagtcatcaaatataaaaagtgtgaaggttgtaaggaggaagggtgagcttgggggtcttgacacacaacattatggaaggggcaaacgtgctcgtgaggttcgctcttatgaggaccaatggactgaagaagaatttgaaaagctttgtcaggttgattcccccgattcacctcaacctggtggtatatcaagggatgcagatgtccctaaagtggttaagttggaagtacctccagagagttcaaaagaaccagagcaagccaaaaaagagccagcttcttctgttggagactccccgcctgctaaacggcgacgaggtcgacccagaaggtctgatgcttccttatctcctgttacagctccaccaaatactggcaaacaagaggcaggaactataattgatggcagttcttctgcaccaactactaccattcattcggttgctccagatgttaccattgattctactgcactatctgctacgggcaatccagatgttggtactgagattaagggtactacaccagatggtaccatcaaaccagtaatttgtactgacaataagggtaccgcatcaattgctgttttggaagggtctaatgcaaaggaggttggtataccagcacacagtgttcatgaacctgtatccagttcagcacctcatccaccaacccctgctacatctagaggtagaaagacccaggcaggagaaacacctcgcaggcgaggccgaaaaccaaagtctcttgctgctagtgcaggagatgttattctaagtcctgtggttgcagttggtagtggagaagcatatgcgagttctgtggtttcatcatatcctcaagggaatgtgtcctcatcacatgcaaatgctatggcaggtttgcagaaggatacaatcatatataaacctgctgcattattgccagaaggagttaaaggcactctaaccccatctggaggagataaagatgaaatggttaagacacctctggcagaagacatatatgctggaactgtaactacctcaggaaatgccaactcacagctgccaatgatagctcataatgaaaatgctggattggttcaagggggcactgatcaaaacttgtccgtagctacacctaccatacctgtggtttcagaagggtcaacaaaaatatcagaggttgtggttgcggataaacctgctgagaagcaaggtgctcgtcgccgcagaaagaaaacatctggtactggtagtgaggacactggggtgagcactaggcaaagagcagctagcaggagattgtacggtattggtaccgctgatattgcaggtactgacatgagcacaggggagaaaataggaatagtgaaggaaatagatggtagttgtcaagatacttctaagggattaccaaatattatctctccatcatatgagaaatctggatatgactctcaaccaagtacgccgatagctgttcctattaacgaggctgcacttcctagtggattcagcgaagcccatgctactcattctgaactacatcctgccagagaatccattagttctgttggccatgagaaactagcaggtgcgcacttggaagcacctccatctgtttcattccaggctccagtgcagcatgagacacggaaggattatgtgggagtacattctgaagtcgcgactactcatccggaaacaattactacccactcatcagtgaatcctgttattgatcataaactagcaaatgtccaatttgaatcacatgcttcacttcatacttcgggcaaggatatcaccacaatgccatccgaggtcgatagtggtgctccgagcaaggcaccaggtaggaggaggaaaggttcagctcgggaaccccgcaccagaagtaattctgcaacagctgcatctgaacgtcgtgctcgacttgctggatcaaagcagccagatgatattaaaatggcagagatgtcaggaaaccccagcactgcagtctgctcttctacacagcaacaggaagacaacactttgaaagctgcgcatgctactggttctgttggtgaagaacagaacaatgctgagaatcgtgtgcgtgaagtgtcaatgccagcaggcatattggaggcaaagttagagctgactaaacaaactgaccaggcaggtcataattcagagcaggaacaagagatggtttcggcagcaaaatcagcatctgcaaatgatgaggagcataaggtgcatgaagtacatcaaataattgctgatcacaatgcacttccatctagtgcacagtacactcttcaggataaaattgatagcagtgcggatgcgggcctggtcccttgtgacaaaattgctagtgtggttattgcagtagatgaccaagaccctagcaatgcctcagataaggatgctcctgcctccacagaagatgatggaaatggtctgcaaagtgaatgtgttcatgttgatttggttctggctaagcaagataatacgaaagttgaagatacgcaaaagtcgaatcaaccagcagaacaaggggaaagcttggagatgactgggtctaaatttagatcggagacgagactggaaaaaacagaagaaaccgtggataagagtggtggtgacaatctaccaactattgagaaaaatgatgattctcccatagaaaggtcatctccttcagcagacaaaattgcccaagtagcatatgggggtgaagcaggaactgaaacaactacggtggaggccgtttctgctatgaattctgatggcttacaggatgttcgcaatgccttgtccacccatggcttatcaaccaatgatattactgttgcttcggaagaacacagggatcctgagagtcatttgtctggtgaagtgtcaatgtcaggtggatcctcagagctcaagttagaatcgctaaaccaatcagaatctgcttgccagtctggtgaagtaactctggaagatacacatgccaccttggacattcagattcctgcattgattgaatcagaagaaaaaaagtcacctggaggcgatgtgcatggtagtgaagaacaacacatgcatgaagtacttcataatactgttgatggctctatctctccatccaatagggagcaggacaagctgcaagttcatattgatactaacactgacgtagacattcctagttctgacaaggaccattctactgatattgttttagcaggttgccaagccccttgcgatgcctcaggtaaggataagctgtccacctgtgatgcctcaggtaaggatatggctgcccctacagacgatgatctcaattgtctgcaaagtgaagatactgtcattcctgtggctgatgctaaggacgagactatgctagtcaaagctattcagaatgacgaaatgtctatgggctcttctcatggcttacctgctaccatacaatcaactgattcagatcgtcttgcagaagaaggggagagtgcagaaattactggctctaaattttcatgcgggatggaacaggagaaaatggaagagcccttggataagagtgtcactgacaatcaaaccagcagtcagataaatgatggttcaaacaacatggattcacaaaaagtggatagttctttgcaagcagccgatggtggtgatcttttggtaagtagaggaaccagtgttgaaaccaccactgctattaatactgatgcgtcagatgaaagtatcagtgtgtccactcagtccgtcaaagaggctagcacagtagaaattggtgcatctactaatgacatagctcctgcttgtgaattaagaaaggattttgagtctcatgtatctggttgtgtgtcaaagccagtaggattgtcggaactcaggttagaagagctgagccaaacaaagtctgtttcgcagtctattgtagcaaatgctgaagaaacaagtaccaggtctgacattgaaactcctgcaatggatgcatcagaaagtaaatcacctgaaagcgatgtgcatgagttgagtgaaagggtggagttcatgggaccaacgccaagtgcaaatgagaagagtaatgaacttcatagtcaagaactagtgaagatgatttcagctgcagaaacagcatcaacagaaggtcatcgcgaaaaagacacgtgtgaagtagatcataagattgattgcactatattttcaccaattggggatcaggacacacgaaacagaattgatggtgacacagattgtggtgtgccctcttgtcaaagaaatgcagcttttgactctgaaaatgaagtctctgctgagattaatttaacaggcagccaagcaccttgtgatgcccccaataaggccactcctgctcccacagaagatgatcacaatggtcaggaaagcgaagatactgtgattggtgctgagcaaggcactgttgaagttgaagctatgcagattgatggtatctccaaaagctattccagtgattcccatgccactttacaatcaagtgactcaaatcagctagtgaacagtgactcaaaatttgaatcatcaaagaaacatgacaaaacagatgaaacttccaatgaaagtagaggtgacaatccaacccacagttgtacaaacgatgattcccatgataagaatttagtaggatgttctccttcagaagacttaaatgaggacaattctgcccagttagctgatggtgatgatttagtgggaagtaaggatactactgctgcacacgccagtggcttaaaggagcttacctctggcaattatgttgcctcatcttctagccatgttgttcaagatgtaacatccatctcgaaaatggagtctgtgcaggctggtagtgaggaaatctatcatggctactctgatgaaaccatccattctgctagaatcaaaccagtggttggtactgaaattacggaaaatgcttctgttgcttctgcaccagttattaccatccaaccagatattgaaactgaagctggtgttactgcgtctttgactgttttggaagggtctatagcagaggaagttgatacacaagtagaaagtggccatgatctggtcactagtacagcccctctttcaccagctcctttacccggtgagagtcatgcgtgcactgatgtatcatgtcctgtggctgtggaggtatcagagacaaagctagagtcagcaaaccacacagctagccagttaggtgcagcttgtacagaaacaccaaatgccttgttgaacactctgatccctgcgttacctgaatcggaggaaacaaaactttctggaagtgatacagatggaaagaccattatggcagagcttgcatcttccagtgatgaacatgataaggtgcatgaagtaggtaatgaaactggtgatgataataaacttccatctagtgtggcagaagatgcagtgcaaggtgaaattgatggcagtgctgacatggacagtcaaataattgctggtagttccgaagcagaaatcaacaattctactgtggctactatagctgacagccaaataccttttgatccctcagataaggacactcttgcagaagatggcaatggtctgcaacgtgaaggtactactgtggatgtgactggttctaaggaagatgatatggaagctgaagagaagcagatggatgatagtcatttgcccgctgctttacaatcaactgagtcaagccagcccacagaacatgctgcccccacacaagatgatggcaatggtctgcaatgtgaaggtactactgttgatgtgtctggttctaaggaagatattatggaagttgaggagaagctgattgatgatatttccggaagcccttctagtcatttgcctgttgctttaaaatcaactgagtcaaatcagcctgcagaacatgctgtccccgcagaagatgatggcgatggtctgcaaagcgaaggtaccgctgttgatgtggttgattccaagaaagatgatatggaagttgaagaaaagcagattgatatctctagaggctcatctagctttctgcctggcgctttagaatcagctgaattaaatcaacctgcagaacatactgcccccacagaagatcatggcaattgtctccaaagtgaaggtactgctgttgatgtgccttgttccaaggaagataatatggaagttgaagaccagtttgacggtatttctagaggcccatctagcttttctcctgacactctagaatcagctgagttaaatcaagctgcagaacatgctgcccccacagaagatgatggcaatggtccgcaaagtgaaggcacttctgttgatgtggctggttctaaggaggacaatatagaagtcgaagagaagattgatgatatctctagaggctcgtctagtcatttgcctgatgttttacagtcgactccaaatcagcgtgcagagcaagagtgtttagataatagtgatgacgtgaacacatctgttgtttcctcccatgccccattaagtggccccaaatttacatgtgtgaaagaacttgaaaaggcagatgaaaccttggaaacgagtgatgcccaagtagcagatgaagtctgtttacagacaaatgatggtgctcacaatatggcttcaggaagttgttccactttagaagacaaaaacgaggacagttctgcccaaatagctgattgtgaagatttattgctaaggaaaggaactactgttgatgaccttgatggctgtgtcgaaggtcacagtggcttgtccacccattccaatgatgaagtgcgcaacctggtagaaattgtcaagggtatgaatgatactactgctggcagtgaagtgcatgtggatcctgaaagtcatgtatctgatgaagtgtcaatgccagttgcaccatcagagctcaaggtagaattgaagaaccaatcagaacctgcctgtcagtttggggcagtgatcgtcgaggaatcaaatgtcagcttgggcattcagactcctgcattagctgaatcagaagaaatgacatcaggaggtttcatgcacggtaaagaagtttgtgcttcagaacaaacgaatataggtgcggctgcagaacctgcatctacaaaagatgatcatgatatgcatgaagttgataaagagattgttcattgtacaatatcttcccccataggggatcaggaaaatctgcaaggtaacattgatggcaagatggacgttggcctggcggcttgccagacagagtcagattttgtgagtggaaatgaccattctagggagactgatttagcaggcagccaggcaccttatgatgcctcggataaggaagatactgctgctgatttgattggtcctaagcaagccactctcgagatcgaaaaaatgcagattgatggtattcctgaaggtccttctagcgtgcctgctgttttgcagttaactgactcaaatcagccagcagaacaagagagattagagaatagtgactctaaatttgcatcaacaaaggaccagggcagagtggatggaacttccaatttgagtggaggtgataatgcaaagtgtagtcttaccaatgatgattctcaaactgtgaatctagtaggatattcaccatcagaagactcgaatgatgatgattctgtccaagcagctgatagtgatggcgttctgggaaataaagaaggtactgatgatgttatctctgctgcatgtaccgatgatgtatccatgctgaagactgaatcaatagatcgtcatggttctgacgaagttgatcattccactgccccgtctgctgccatcaaacaagagagtggtactgaagttacgtgtgacgcttctgttcctgtttctgaaagctctatatcaaaggaaatcggtacatcgcctgagtgtgatgatgatcaagtggctacagcagcacctcatccaccaacgccattatctgatgctactgatgtatctgctgatgtgcaaatcccagcaggaatatcggaggcaaagctagagcagccgaacgaaacgactagcccgtcgggtgctgctactgaagaaaataatactgtcgtgagcactcagattccaacattagctgaatcagaagatagaacacccgccgatactgctattcaaggtactgaggttgacagcgctgagccagcatctgtaagtgatgacgaaaacaaggttacagcagctgatgatagtgcactcccgtctactgggccagaggatacagcggacgataaaattgatagcagcgctgatgctagtgagaagtag

SEQ ID NO: 12915 - DNA, 2739 bp, Oryza sativa
  Clone ID: TFbOSC400299j.C1.o7.fg
atgccttcgacgagcaaatgcaaccgcatcagccgcgtcgccgatgaggaggaggaggaggagatcgttgccgtctcctccgacgccgacgaatcggagtcagagtcggaggtggggagtggagcggaggaggaggatgacgactacgtgggggagagtagtgactcggccggcggcagcggcagtggcagcggcgacggcgacggcgacgaggaaggaggtaggagcgacattggcgatggcgagggcgagggcggcgggcggcgagttcggagcgcgtgtcgcggcgtgagagcgaacgaccgggagaggaaatcgcagaatgtggatgccctcgtcaggggaaatctagttgtaagaaggcagccacttattccacgtattctttcggtttctgatgcggcagcaatagctcgaaagccattcaaacctccctgtcaaaatggatacagtgaaaataatgagcaacttgctcggcgcctttcagctcgtaaaagatttgtcccatggggttcggtgcagccatttgcagttacaaatattcttccacaatcacctgctgtttctagtgatgattccgtagaaaatgaggaatcccttccaccaggcatagagccattgattttgtggcaacccgaggggcgtgacaaggaaaacagcaatttttctgcaatcaaggttgatcacttgcttgtacgttacctccgaccccatcaaagggaaggagttcagtttatgtttgattgtgtatctgggttgttaaatgatgatggaatatctggttgcattttagctgatgacatgggattggggaagactttacagtcgataactttactatacacccttctttgccaaggatttgatgctaagccaatggttaaaagggctgtcgtcgtaacccccacaagtttagttagcaactgggaatctgagataattaaatggttaaaaggcagagtgcagttgcttgctctttgtgaaagcacacgcgctgatgttctttctggaattgaaagtttcttaaaacctttgagccgtcttcaggtactcatcgtatcttatgagacattccgcatgcattcttcaaaatttgaaaggccgggaagctgtgacctcctcatatgtgacgaggcccacaggctgaaaaatgatcagaccctaaccaataaagccttggctgcccttccttgtaaacggcgtatcctgttatcaggcaccccaatgcagaatgatctggaggagttcttttcaatggtaaatttcacaaacccaggagttctgggggatgctacatatttccgcagatattatgaagcaccaatcatttgcggaagagagcccacagcaagtgcagaagaaaagaacttgggatctgagagatctgcagagctcagtgcaaaagtaaatctgtttatattgagacggacgaatgccctgttatccaatcacttgccaccaaagatcgttgaagtagtgtgctgcaagttgactgctttgcaaactgcgctgtacaaccacttcatacattcaaaaaatgttaaacgcttgatatctgaaggaacaaagcaatccaaagttttggcttatattactgctcttaagaagctatgcaaccatccaaagctgatctatgacaccataaaaagtaataattcagggggctctggttttgacgactgcctgcgcttttttcctcctgaactgttttcgggaaggtcaggttttgtgacattggatctgtttgcacaattatgtcgggaaaggagatacccgtatattaggcttgatggagcaacatccattaataaaaggcaaaagttggtgaaccaattcaatgatccatccagagatgagtttgtctttctacttagtagcaaggcaggtggctgtgggcttaatttggttggtggaaatcgattgattctctttgatcccgattggaaccctgccaatgataagcaggtatatcagcgtcagatgtcgaaagaaggtctccaaaaagttattcagcaggaacaagcagatggcaaaatgcaggggagttctctttcaacagaagatctgcgtgatctttttaccttccatgaacaaatcaggtctgaaatacatgaaaatttgaagtgcaatcgctgtaacaaggatggatgtatggttctcgatggtagcaaatttgattcagcagccactgagcatgaggcttctaactcaggagagaacagttacattgatattggtggatttggagcgatctctggatgtgtgcagaaaatgaatagttcgaatcaacagattggaagtccttctgaagaagatttaggaagttggggccatcattctgatccatcaactgtacctgatactatactccagtgttcttctggtgatgaggtttcttttgttttcacaaatcagatcgatgggaaacttgttccagttgaatctatggcgcgagctgcaactcatcgaacacatgaagtgactgttaatgcagaaaaagaagtgggaaaaatcaattcttctaatgtacctggaaccgaacggcaatctctacttggaaaaaatctgaagatgatgggattcaatttaaagaattcgtctatgaaattcccaactaagtccagaagaatgctgccaaactgtttgcaagggatgaacaaaaccagcacatcttcagatcatcaacaaactaaaaagcttcatgttatttctgatgcgtctgatgatgattttgtatga

SEQ ID NO: 12916 - DNA, 3825 bp, Oryza sativa
  Clone ID: TFbOSC400376j.C1.o26.fg
atgggcggcgacgaggaggaggttgccggtgacgtgcgccgcaagttggggggctacctccgcgccgtcgtctccgtttcatccgatgtgggcgtggaggcgctcgcgccgctttccccgtgctcgctcttcgcctgcgggggcgtctccctcgcgccgatccccgacggcggtggcgcgacgccgcggtccaaggggagggcgtgcggcggagggggcgtcgtgcggcagctgagggcgctggtgtcgagccggtgcgtggaggtggaggggagggtgctgagggcggtggcgaggagggggagggagggaggaggaggggatggggaggtggaggcgagggcggtggtgctgttcgacgtgtacctccccgtctccgtctggtcggggtggcagttcccgcggtcccgcgcggccgcggccgccgcggtcttcaaacacgtcagttgcaattgggatgccaggaatgctttgcttgcttttaactggacctctcctgacaatccacactgtgatgaccagtatatttggacctgcaccgattgccacgtccttggttgtgaggtacatcagataccatctgtattgaataatgataagtcgtttgacctgcatgaaatcttcaaaactctacctagtgttatggtggagaagaggatgcagataacaagaataacaccagatgaggcagcatcgggagtgggtatttggtctgtccctgatgatgtcttgtataaggtgctggttcgactgaaacccagagatttgattagagttgcagctgcttgtcatcatctaaggaatctttctgcttctatcatgccttgcatgaaacttaagctttttcctcatcaagaggcagctgttgaatggatgctaaggagggagcagaacttgcaggtcctagaacatcctctatacaagggtttgtgcaccatggatggtttcccttattacataaatgttacctctggtgaaatatccactggtagtgctccaactgtacatgatttttgtggaggtatgttttgtgatgaacctgggttagggaagacagtgactgcactgtctcttattctgaagacacatgggactctggcagtccctccaccagggatgaatgttatgtggtgcatgcataaaccagataaaaaatatggatactacgagcttagtgctagcaactcttctaatggaaacatctttttgtcgggatcaaaaaagttgcgaaaggacgtgattagagaagatacatgttcaagtgagtcactgaataatggtggttcagttgttagtacaaggtcatcaagaaagagaggcaggttagtaaaccctgatttgaatatgatcgctgcacatccgagtgggaagtcgccaatgtcagcaccaactggtgctcattcaactccagctactcatgtgctaaagattaccaaaaacttgaaacatgttaggaaaaacctcatggaggcatatagcgatggttcagttggcaataaaaggaagagagatgccacctctgagttaagtgaaacctgggttcaatgcgatgcttgcagaaagtggcggagattattggacggaactgcacttgattccagtacagcatggttttgcagcatgaaccctgattctgcacgtcagaagtgcagcatcccagaggaatcttgggatttaaagcgaaagataacttatttgcccggatttcacaagaaaggtacaccaccaggaaacgagcaaaatgcatctttttttacaaacatattgaaagagcatgctgctttgatcgattcagaaaccatgaaggctttgttgtggttggcgaaactttctcccaagaaacatatcgagatggaagcagttggtttgacacggccagttctagatgcacgtgctaacataggaaagggtgcccgcccgtattacaagatttttcaagcatttggccttgtgaggaaggttgagaaaggcataactcgatggtattatccatctatgcttgatgatttggcatttgattcggctgcacttggaattgcccttgaaaagccgctggatttgatacagcggcatgtttcctcggacacacttaatgtttatgtatggggagatcacaagaaaccatctgctcacaaccttgcatgggactatgacattgtcataaccacatttagtagattaagtgcagaatggggtccaaagaagagaagtgttttaaagcagatccattggtttagggtaatattagatgaaggacacacattaggttccagtctcgccctcacaaacaaattgcagatggctgtttcattggttgcttctaatagatggattctaactggtacccctacgccaaacacaccaactagtcaagttgctcaccttcatcccatgcttaagtttcttcatgaggaagtttacggtcaaaactaccagtcatgggacactggaattcataggccttttgaggcacaaatggaagacggacgcagtcgtctcctgcagctacttcagaggactatgattagtgcaaggaaacaagacctgaaaaacattcctccttgcataaaaaagataactttcctggacttcagtgaggggcatgcgaaaagttacaatgaactggctgttactatccgcagaaatatattgatggctgattggaatgacccttctcacgtggaatcacttctgaaccccaagcaatggaaattccgtactacaactattaagaatgtgcgcttgtcttgttgtgttgcggggcatatcaaagtagcagaggctggtcaagatatacaggaaacaatggatgcattaatgcagctgggccttgatccttcttcgggggagtatcagtccataagatatgctcttttaaatggtgccagctgtttcaggtgcagagattggtgccgcttgcctgttgtcacgccctgtcggcatctgttgtgccttgattgtgtagctcttgatagtgagaaatgcacgttacctggctgtggcaaccattatgagatgcagactcctgaaactcgtgcacggccagaaaatccaaacccaaaatggccagtgcccaaagacctaattgagttgcagccttcatataagcaggatgactgggatccagactggcagtcgacaacaagcagcaaagttgcttatttggttaataagttgagaagtttgaaggcagaaaacataaaacatgggtactctaggaacatggccaatggtgcttgcctttctagtcaatcttcttgtcaagaccataataatgtggagggcaggttaccacacacaatgcctgacaaagtaataatattctctcagtttctggagcatatccatgtgattgagcagcagctgacgattgggggcataacatatgctggaatgtacagtcccatgccattaggcagtaagagaagttcactgacgaagttcaaagatgatccagcatgcatggccttagtcatggatggaactgcagcactgggccttgatttgagttttgtctcttatgtttttctgatggaaccaatatgggataggagtatggaggagcaagttattagtcgtgcacatcgtatgggtgctactcgtcccatatttgttgagactttggccatgcgtggtaccatcgaagagcaaatgttaaaacttttacaggattccaatgcttgcagacaaatggtgaataaaggaacaagcagcactgataatgaaggtgctcggcctcaccggagcctgcatgattttgcggaaagcagttatctggcgcaactcagctttgtgaaaggatctgacgcggcggaaaaattatag

SEQ ID NO: 12917 - DNA, 2634 bp, Oryza sativa
  Clone ID: TFbOSC410323j.C1.o1.fg
atggctgcctcggtggaggcggcggcggcggcggtggtggccccgcccgcctccgtgggcggtgacgaggtcgtcgtcggcggcggcggcggcggggcgtcggagcaggccaggacgctcatcggcgcgctcaacctgctctcccgcaacctcccgctgccgcccgccgtcctgcacgccgtctcgtccatctaccacggcggcgacgcgtgggagggggaaggggaggaggggggtgaagaggaggtggcggcggcggcggcggctgtcggggatggatgcggcgagagcggggagggggaggaggaccgcgcggatgcttctcccggtgcggatgagggttgtagtttcaaagcaccatattgtcactgcgatgattggggagtcaccttgattcaagagcttgaagatgctgtattgaagaatcaaggaccgtatatgtcatactcagagttgactgctttaaaagaagaccgcttcaacacttccattcagcataggctgactgaacttgaaggattaccatctactaggggtgaagatttgcaaatgaagtgtttgcttgaattgtacgggcttaagttattagacttgcagaagaaagtaaggactgatatcagtgcagaatactggctacacaaaaaatgtgcacaccctgataggcaattgtttgactgggggatgatgcgtatacggtatccttttaccatgtatggaattggagatagtttttcaatggatgctgatgatatcaaccgcaaaaagagattctcagaggactccctttttggtatttgggaacaacagaggatctcaagacttgaagaggaggaaaagaaccaggcagagatcaggaagaggaaatttttttcagaaattcttaatgctgctagggagtatcagctacaagtaccggcttcttacaaacgaaaaaaacagcgcaatgatggagttctggcatggcatgttcgtgcacgtcaacgtataaatcgcatggaaaagagtagattacaagttttgaaggctggtgaccaagaagcttatttgcgtatggttgaggagagcaagaacgagcgcctgaaactgctccttggaaaaacaaatgagcttcttgaaggaatagggaaagctgtgcagagacaaaaagatgctgagcatgttagtcgccctgatggatctgaactgccaaaagggtcagaatctgatgattgttctcaaatatcaggcctcaaggttgaatcccctgatgaagagtccccatcagatgttgatgcagaccatcatagttctgctgatcatagtaaatttaatgctggccataggcttgattctaccgtccactctattgaagagaaggtaacggaacaaccatcagctcttgaaggtggggagttaagaccatatcaattagagggcctgcaatggatgctttctttattcaacaataatttgaatggtattctggctgatgaaatgggtttggggaaaacaattcagaccatagctttgatcgcctatctattggagaagaaggaggttacaggaccacacttaataatagcaccaaaggccgtgttaccaaattggtctaatgaattcaaaacttgggctcctagcattgggacaattctgtatgatggtcgtccagatgataggaaggctctaagggaaaagaattttggacaacggcagtttaatgttttgctcacgcactatgacttgatactgaaagatctgaagttcctgaagaagaattttgaggaatggtttaatgcaccatttgcatgtgaagtcagccttaatgatgaggaacagctgctaattatacatcgtttgcatcaagtgctgcgtccatttttgctgaggaggaagaaagatgaagtggaaaaatatcttcctgtgaaaacacaagtaatactcaagtgtgacatgtctgcttggcaaaaagcatactatgaacaagtcactagcaatggaagggttagtctaggatctggactcaaatcaaaggctttgcaaaatctgtcgatgcaacttagaaaatgttgcaatcatccctatctattcgttgagcattataacatgtatcaacggcaggaaattgttagatcatcagggaagtttgaattgcttgaccggctacttccaaaattgcagagagctggtcacagggttctgcttttctctcagatgacaaaactgcttgatatcttagaagtatatttgcaaatgtaccagttcaagtacatgaggcttgatggatctacgaagactgaagagcgagggagattattggcagattttaacaagaaggactcagaatatttcttgtttcttctcagcacccgagctggaggccttgggttgaacttgcagactgcagacactgttattatttttgacagtgactggaatcctcaaatggatcagcaggctgaagaccgtgcccaccgtattggacaaaagaatgaagtgcgtgtattcgttcttgttagtgttggctcaattgaagaagagatcttggaccgtgcaaaacagaagatgggtattgatgcaaaagttatccaggctgggctgttcaacacaacctccacaggctgggctgttcaacacaacctccacaggttagattaa

SEQ ID NO: 12918 - DNA, 192 bp, Oryza sativa
  Clone ID: TFbOSC422293j.C1.o3.gm
atgaaaagagcaacggagaacaaatatttggcgaacttgaagacagatattgttgagaaggcgttgaaatatgatagaaaagagaaaatgaaggagaaagaaggtatcaagtggctatggacattgcatctcaagaaattaggaggtgcactatgtgatgaaatgggcatgggaaagacccggcagccatag

SEQ ID NO: 12919 - DNA, 4338 bp, Oryza sativa
  Clone ID: TFbOSC400007j.C1.o4.fg
atggatcgcgccgcgcgcctcgcccgccgcggcggcggcgtgaccgtggctgaataccgcatggtgcggggccgccgccgcggaggcgacgcggggccggtggtggtcatcgatgtcgaagacgacggggaggacgctgctgatgactccgccggcggtgggggtggagcggcggcggcggtgaagaggagggtggtggttccgggggccgtggcgacgcggacgcgatcgcggaggatggcgatggcgcagcaggcgcccgtcacgccgccggctgcggcggaggaggcgccgagcaggaggaggaagaggaagggggcggcgagtgcggaggcgggtggcggagggccgtcgaagcgccgcgtgcgatcctcggggtcagcgggcgggcgtggtgcgcgcaagcgcaaggaggcggaggcggatgaggaggaagcggaagcagaggctgaggaggaagcggaagcagaggcggggactcccgctcgcggagaatcgatggaggtgtcacaggttgacgggggtggcagcagcgggcgagccgatgacgcttcgcacaatggtaatggcgagtctcgcgtgtgtaacgcggatggcattgatcaggcaagcgaggagcgtccaagtgtcgctggtggggatctaattgaggaggagcactacgggaatggggaagccagcgtcgctggtggggatcgaattgaggagcactgcggtaatgtggaagccagtgtcgccaattcgaatcgtgatggcggtgagatcatcgctggggagggcacagaggatcgtgggaacacggagttatcagtggtggatccagtgaatgaagagttggcttccgatgaggatgattacgacgatgaaatgttggaggaaaagcttgtcggagatgtcattcgtgcttacagcaatggcgctgatttggatacaaatggagtggactgggaagccgaggatgagatggaatttgctgatttggatacaaatgtagtggactgggaagctgaggatgagatggaatttgatgatgataatgataatgatgctgatgacgacggtgataattttgggggtgatgcggatgaaggtgacaaatctgtacaaatgcatgacttttctaaggtggaaacacaagatttggtgagccacaatgttaatgttagtgaagtgaggcctcatgaggatgaggaggctatcaaggatgagatggagtcaaagggaaaaggatctctcagttttaatgaagggagctcctatattgaaattcttgactctgacgaggaagtcaaagtggtcaatgacacagggaatgccttgagaaggaagccattagtaccagcgaagctaccgattgtgccatcttgtgttgcatggagaactcggtcatcatggggtatgaaggaggagaggatttcttacaatacatatttcgaggtattgtctgatgagccaaaagaggatgatgatgacactgaagtggaattggatgatgaggaggacgatgaaaacgatgacgattgcaatagtgctagctgtgatgaagaagatgaagaggaagaagaggaaagagaggaggaagaggaagaagctcaaaggagaaagcaaaagaaagggattgactcatctgatgatgagatgattgatgatgctgtagattgtggcattgattgggaggaggattacccagaggttgattttactcggccacttacctttcagaaagatggcagtgaggcccctgtgggcagcgaggcttttacggagcaacagaagagatcgcgatttacatgggagcttgagaggaggaaaaaactgaagcttggcatgatgacgaatcatcgtttgtatgaacgagacctggaatcagattccaactcatcagattctagtcagaatcgaaaaaatggatgtcaagggagtggtgatcacagaactgggaggaaaaggaagaatccattatcaaaatctggtaagaaatccagccgcatgttaaagaggcagtctcttatgaagcttctgatggacaagatgtgtagcaatgatgatgggaagtctactccttttgaccagaagccccagattgagtatagtttcaaggatttgcatccgttggttttttcatttggggacgatgatcctagtccaactgataggtcagagcaagatgctgcacttgatatgctatgggctgatttagacttcactttagagtcagagaacattgggacttattatgatgatgagggccaagaggacagtctgctagatcatgcacttgctcctattacaccttgttctagagggaagcatgaatttattattgatgagcaaataggaatcagatgcaaatactgctccttggtaaatctggaaatcagatttattttaccattgctggcctccaattttgcagagaaacctgcatggcgaaacagctcttgtttgaagactgcgttgatgtgtcctgatctttatgaacaaacagggactggtgatggacaatctcaagatttccatataaatggaactgtgtgggatctcattcctggcgtcattactgatatgtatcagcatcaacgtgaggcatttgagtttatgtggacaaatctagtgggtgatattaggcttaatgaaataaagcatggggctaagcctgatgttgttggaggatgtgtgatctgtcatgccccagggacaggaaagactcgtttggctattgtgtttatccagacatacatgaaggtgttcccagactgccgaccggtgattattgcacctcgtgggatgctgtttgcttgggaacaagagttcaagaaatggaatgtcaacgttccttttcatataatgaacactactgattactctgggaaggaagacagagatatatgtagattaataaagaaagagcatcggactgaaaagttgactaggcttgtaaaactgttttcatggaacaggggtcatggtgttcttggaattagttatggtctatatatgaaactaacatctgaaaaggttggctgcactggagaaaacaaagtgagaactattcttcttgagaaccctggtttgcttgttctcgatgaagggcacacacctaggaatgagcgcagtgttatttggaagacactaggaaaagttaaaaccgagaagcgtataattctatctggaactcctttccaaaataattttcttgagctttacaatattctctgtttggtgaggcctaggtttggtgaaatgtttttgactaaaacaagagtgggtcgaaggcactgtgtctcaaagaagcaacgggataaattttctgataaatatgagaaaggagtttgggcttccttaactagtaatgtaactgatgataatgcagaaaaggtaagatcaatactgaaaccatttgttcatatccataatgggactattcttcgaactcttccggggctcagagagtgtgtgatagttctgaaacctctaccgcttcaaaagagtatcattagaaaggtagaaaatgttggatctggtaacaattttgaacatgagtatgttatttctttagcctccacacatccttcacttgtaaacgcaattaacatgacggaagaagaagcttcccttattgataaacctatgcttgaaagattaaggtctaatccttatgaaggagtaaaaacaaggtttgtaatggaagttgttcgtttgtgtgaagcattgaaagaaaaggtattgatttttagtcaatttattcagccattagaattgataaaggaacatcttcgtaagattttcaaatggagagaaggaaaagagattctccaaatggatgggaagatcctcccgagatatcgtcaaaattcaattgaggttttcaataatccggatagtgacgcgagggtgttacttgcatctacaagagcttgttgtgaagggattagcctaacaggggcttctagagttgttcttctagatgttgtctggaatccagctgttggaaggcaagctatcagcagagcatttaggataggacagaagaaatttgtatatacatacaatttaataacttatggaacaggtgaaggtgacaaatatgataggcaagcagaaaaggaccacttgtccaagttggtcttctctacagaagacgagttcagtaatgttaggaacatgctttcaaaagctgaaatggagcactgttctaagttgatatccgaggataaggttctggaggaaatgacttcccatgaccagctgaaaggcatgtttttaaagattcattatccaccaactgagtcaaacattgtttttacttacaaccagattgctcctgagttaagttaa

SEQ ID NO: 12920 - DNA, 2373 bp, Oryza sativa
  Clone ID: TFbOSC400679j.C1.o1.fg
atgggtggcaacagtgtgacgatggcagaggagctcaagggagctgcggtccccatgtctctcgacgggaggcaaggcggtgggagcatttctgcaggggtttgcgtcgatggcatgggcgcctgcctttcagcttgcggtattcaggttttgaagttttggtgcataagattggtgatattttattcttttattgggagtaagtgttgctctgaggtgcaatttgccttctgctacatattgtttttgcaggctcttgaagccccaaggggggagcctcgaaggacgaaaactcactgggaccatcttcttggagaaatggcttggctggcaaaggagtttgatgctgagagaaaatggaagctgtccatggctaaaaggattgctcaaagagctaataagggtgtagttgaccaagcaacaaaggacgagagaaaacagaaggttttttataagaaccaactggagcttgaggaaaggaaaaaaaaggccctagacaagcaacttgatttcctcttaggacagactgaaagatattcaacaatgctggcagaaaatcttgttgatgtgcgccttcaaaatcaagaaaatgactctttacagactaatcaaagatcccagcaggaactagcacaagagaacataaatgcatcaagtccgactgatgttgacaatgtggaaatcgatgatgattacaacagttccttgggtgaagagccaaaagatgatgaacacacaatcgatgaggatgaagctcaaattacggaggctgagcgcaacgaggaattggctgctttgcaggcagaagctgatctaccactggatgatattctcaagttgtacactaaaaataaagttcaagctttctcagttagcagggaaagcagtccagatggcagagacgtttttagtgactcagattcaaaggatttgattaaagatcctttgaaccaggctaatggatgcaacgatgaatctgatcatacttcaagtgatgaaggcatttcttctgaggaagcagatgattaccagtcttactctgagtttgtgaaaaagaacactgtgaaatgcaatggcaatatctcatctgttgatgcaaagttaactgaactatcggtccgatccttggtctccaccgaaatgaccgaaggtacatggactctgggagagctaggcccaagcggtggcgcggaggtagggtggatgcaggctgtaggtggtggtgcgacaatcagtcgggacctgggtggtgcggagtttgggtgctggccatggtgcaatgagcagcaggggccacggagaggctgcgcgcgggcggcggtgcaacgagcagctgagcgtcgagcggacgacgaagattatgttgctaatgatgaaggaaaggatgatgaagctactttgtctgaagaggaagagttggcgaagaaagaagactgtgatcctctagatgaggttaagttactgcagaaagagagtgagatcccacttgaagaacttcttgcaagataccaaaaggatggctatgcagatgatgacacaacagaattggaaaattcacctgcactatcagttgaggatgtcaatgccaacatgcctgtggatgatgagtctgcagacaccgtggaggtaaacagggatctttctgcagataccatgaaactgaccagagatcagtctgcagagaccgtaaaagtgaataatgaccagtctgcagagattgtggagggcaacaatgacacatttgaagatcatgaatctgcaggcatgctgggacctgagcatgtcagtggtagtgttctacaactagaaacatcagagcctattgtacaggaaaatactgctaaagagggtgatgtaactgatactaaagcgatggccaatggagataatagtgatgtgattgctgatgctgcagctgctgcaagatcagcacaaccgactggtaacacgttctcaacaacaaatgtgcggacaaaattccctttccttcttaagcattctctacgagaatatcagcacattggactggactggcttgttgctatgtatgaaaagaggctgaatggaattctagcagatgaaatgggtttggggaagacaattatgaccatctccttgctagcacaccttgcatgtgagaagggaatatggggtccacatcttattgtagtgccaactagtgttatgctaaattgggagactgaatttctcaaatggtgtcctgcgtttaaaatactgacatattttggaagtgcaaaagagagaaaacagaaacgtcaaggttggatgaaaccaaattacttccattcacatcaagagttcaaggactggttctgcaatccaatttcaggcatggtagagggccaagacaag

SEQ ID NO: 12921 - DNA, 3021 bp, Oryza sativa
  Clone ID: TFbOSC400288j.C1.o5.fg
atggggaaggagaggggaagggaggagcaggtggcgacggtgcgcgcggtgctcggcgatgggacgccggagatggacatcatccgcgcgctccacatggccggcgacgaccccaccagggccatcaacatcctcctcgactttccccacgggccgccgccgccgccgccgccgtcaccgtcgccgtcgccttcgcctccggcgggtaaacccaccaaaccccaccccgaatcgaccccgccaaccaaaacccctgcccgttcgaagccggcggcggcggcggcagagaaacctaggcccagtgtcgcgcccgaatccaccaatggcggcggcggcggcgaacattggtggttggtggggagcgtggagatggcggggctgtccacgtgcaagggccggcgcgttgcctccggggatgccgtcactttctcgttccccaactccccggtcgccgccgccgccgggggcaagagccgttccggccgccccgccctcgtttcctgctcctccgagatcatgcgcttctccaccccgcgccatggggaggtcggtcgaatccccaatgaatgggcgaggtgcctgctcccccttctcaaggaggggaagataaaaatcgatggcgtatgcaaatccgctcccgaagtacttagcatcatggacactgtcctcttgtccgtaagtgtctacatcaacagctcaatgtttcatggccaaaagcaatcgacacccaaggctgctcgggctgctaccgaggattccacgtttcatccgctgcctgcacttttcaagttaactggtctttcgccctttaagaaggcagcatttactccagaagatctctattccagaaagcgtccgcttgaaacaaagagcagtgcacctgccacaaagttgactactgagaagttgagattatcgtctgatggaaacgaagatgatcatgctgaaagaattgtttcagattcagaattggatgatataattggaatctcagacagttctgctttggaggaaagggacccccctgatgctctgcagtgtgatttacgcccttatcagaagcaggcattttattggatgatgcagcttgagaaaggcagttcttctcaggatgcagctacaacgctgcacccttgttgggaggcatataaactcgaggacaagtatggcttggttatattgtttgagccgtttctctattacaatgattttttgaaattaacattaggacgtttatactgcattcatttcaggagggagcttgttttatacttgaatgtattttcaggcgatgccaccactgaatttcctagtacactgcaacttgcaagaggagggattctggcagatgcaatgggactggggaagactattatgacaatagctcttcttcttgccgactctagcaaaggatgcatcactactcagcattctactcacatatgtgaagaagctagtggactgggtgaattgccagttcagcctcatgatgatgtgaagaagctagctatccctttctcttttagtaagcttaggaaacctaaaaccccgcttattgcaggcggcaatctaattgtctgcccaatgacactacttggtcagtggaaggcagaaattgaagctcatgctacaccaggttctgtaagtatatatgttcattatgggcaaaacagaccaaaagaagcaaaccttattggtcagagtgatattgtcctgactacatatggtgttctgtcatcggaattttcaaacgagaattcaacagaaagtgggggtctgtactctatacattggtttagagttgtgctggatgaagcacacatgataaaatctcccaaaagtttaatatccctcgctgctgctgctcttacggctgatcggcgttggtgtcttactggtacacctattcagaacaacttggaggatatatacagccttttccggtttttgagggttgaaccgtggaggaactggtctttaccaatccttattttacccccagcaaatatcgaagtcaaatactgtgatttgtcagagactgagaaggatttctatgatgctctgtttcgacgatctaagagcttcaatgttggcagtcgtggagatacacaggagtttgctgacctaaacaaacttgcaaagcgtttcttgcatggtggtaatggtgctgtgaatggtgactcttctcttccctccagagcttacattgaggaagttgtccaggaactgcagaaaggtgaaggggagtgtcccatatgcctggaagcctttgaggatgctgtattgactccctgtgctcaccgtttatgccgagaatgtctcttgtctagttggcggagtgcatcagcaggcctttgtcctgtctgtagaaagtctatgagcaagcaggatcttattactgctccaactgacaatcgttttcaaattgatgtcgagaagaactgggttgagtcttccaagatttctttccttctacaggagctagaagttcttcgcacttctggtgcaaagagcatcatttttagccagtggactgcatttctggatctcttacaaattccactttccagggcaacagaaaattttgttgttccaaatcatggatactatgaaaattcgtgtatcagtaccagacataatttctcatttgctagactggatggaaccttgaatcttcagcagagagagaaagtaatcaaggagttttctgaggacaaaagcattttggttctgcttatgtccctgaaagctggtggtgttggaataaacctaactgctgcatctaatgcatttgtcatggatccttggtggaatcctgctgttgaagaacaagctatcatgcggatccatcgaattggtcaaacaaagagtgtttccatcaaaagattcatcgtcaagggcactgtcgaggaacgaatggaggctgtgcaggctcgtaagcagcgaatgatttctggagctttgacagatcaggaagtacgcagcgcacgtatagaagaactgaagatgcttttctcctga

SEQ ID NO: 12922 - DNA, 2466 bp, Oryza sativa
  unsure (1)..(2466): unsure at all n locations
  Clone ID: TFbOSC400606j.C1.o2.fg
atggcctccacctcccgccgcggcggcggcgaggacaacnacgacgagccctacctcctgggcttcatcgtcgccaacgccgtcggcctccagtactaccagggcggccgagccatcacccgccgcgagagcgtcggcctcgtccgggagccccacaacccccacgacgccaacgccatccgcgtcgacaacgcccggggcgagaagatcggccacatcggccgccgcgccgccgccgccctcgccccgctcctcgacgccggccacgtcgccgccgcccacggcatcgtccccaagcccgcctccaagaggctctacagcctcccctgccaggtccacctcttcgcccgcccgccccacgccgccctcgtcgccgccgccctcgccgcctccgggatcgacctcatccacgtcgaccaccccgagttcgccctctccgagtccgccatcgtgcaggagcagcagaccaagaggtctcgcggggatgtcgataggctgttctctcatgtggggaagggagggagagctcggattgcgcccatggaggcgccgcgggatgtggtggtgtccgaactgttcgagcaccagaaggcggcgctggggtggctggtgcaccgtgaggagtcatgcgaccttccaccattctgggaggaagataatgatgggggatttaagaatgttcttacaaatcagaagacgaatgagagaccgccgccgttgaagggtgggattttcgctgatgatatggggctagggaagactctcacgctgttgtcgctgatcggaaggagtaaagctcgcaatgtaggtgggaagaaggctagaggggcgaaaaggaggaaggttgaggaggcggtggaggaggagtcaagaacaacgcttgtggtgtgcccgccatcggtgttctcatcttgggtgacacaactggaggagcacacgaaaaccggtagcttgaaggtgtatttgtaccatggagagcggacaaaagagaagaaagagctgttgaaatatgacattgtgattaccacttatagcaccttggggcaagaacttgagcaggagggctcaccggtaaaggaaattgaatggttccgtgtgattctggatgaggcccatgtgatcaagaactctgcagcacgccaaaccaaggcggtgattgctttgaacgcggagaggcggtgggtggtcacagggacgcccattcagaacagctcatttgatctttacccgctcatggcatttttgagattccaaccattctcaatcaagagctactggcagagcttgatccagctccccttagagagaaagaataacggaattgggttggcacgattgcagagcctcctaggtgctatttccctgcgcagaaccaaagagacagagagtggtagcaaaagcttggtcagcattccgcccaaaactgttttagcttgttatattgagctttctgcagaggaacgtgagtactatgaccagatggaattggaagggaaaaacaaactgcgggagtttggtgacagggattcgattttgcgtaattactcaactgtgctttatttcattctgaggctccgccagctctgcaatgacatagcactatgcccattagacctgaaatcatggcttcctggcagtggcagctcccttgaagatgtgtctaaaaacccagagctgttgaagaagctggcctcattggttgacgatggagatgacttcgaatgtccgatttgtctcgctccaccagccaaaaccgtcataacgagctgcacgcacatatactgccagacttgcatcatgaaaatcctcaagagctctagttcccgctgtccaatatgccggcgctcgctatgcaaagaagacctctttattgcgccagagattaaacatcccgatgaggattcctcagtcaatcttgatagacctctttcttccaaggtgcaagccttgctgaaactactgaggcgttcacagagcgaagaccctttgtcaaagtctgttattttctctcagttcaggaagatgctgatcttgcttgaagggccacttaaagcagcaggctttaacatactacgactcgacggctctatgacggcgaagaagaggtcagaggttatccgccaattcggatgcgttggccctgattctccgaccgtgctgctggccagcctgaaggctgcgggagccggcgtgaacctgaccgcggcatcaacggtgtacctcttcgacccttggtggaaccctggggtggaggagcaggccatggacagggtgcaccggatcgggcagaccaaggaggtgaaagtggtgaggctgatcgtgaaggatagcatcgaggagaggatgctggagctgcaggagaggaagaagaagctgattagcggcgcatttggtaggaagaaaggaggcaaggagcacaaggagatccgtgttgaagagctccagatgatgatgggaatgaaatga

SEQ ID NO: 12923 - DNA, 2571 bp, Oryza sativa
  Clone ID: TFbOSC401643j.C1.o6.fg
atgtcgctccacagcctcaaagaaaccctccagtcttcctccttttcacagccccaatccgagtcccaaccccgatcacctcctcctctcctcgccaggaggcccccaaaaacgtccctctcgcagcagctcctccgccttgatgcctcctcctcctcttcctccttttccgtctcgccgccaccgccccctcgcacttccccgacctcggatgcggcggcggatgatgcgccgccgctgccagaggaggaggacgaggtcccctgcatccgcccccgcgcttcccttccgccagcggcctccctcgactcccgcgggccctacgaaccgcttgctctctcgccgcccggagagcgccccgtcgtccaggtaccctcctcgataaattgcaggctacttgtgcatcagagggatggtgtaagattcttatacaatctgtatagaaacaaccatggcggtgtgcttggagatgacatgggtttgggaaagactatccaaacaattgctttcttatcagctgttattggaaaagataatgaccacggtgatcaattagtggaaggaagaaagattgcccctatactcatcctctgccccacatcagtaattcgaaactgggaaaatgaatttgcagagtgggcaagatgttctgttgctgtctatcatggcccaaatcgtgacctggttcttcaaaaggttgaaactcaaagactagagatagttattaccagttttgacacttttaggattcatggcaagattttgtgtggcatctcgtgggaccttgtggttgttgatgaggcacaccggctgaagaatgaaaaatcaaagttatatacagcttgcttggaaattactactcgaaagcggtttggtctcacaggaaccataatgcaaaataaaataatggaattatttaatctgtttgactggattgtacctggttgcttgggggatcgagaacactttcgagtatattatgacgagcctttaaaacatggccagaggttcagtgctcctgagagatttgtacaagttgctgataagcgcaagaagcaccttgtttcagttcttagcaaatttctgttgagaagaacaaaggaagagaccattgggcatctcatgcttggaaaggaggataatattgttttctgcagaatgagtgacgttcaaaagcgcgtttacagaagaatgctgcaacagcctgacgtgcaaatccttataaacaaggatctcccatgtagctgtggaagtcctttgactcaggtggaatgctgcaagagaactgaaccacatggcattatctggtcttatcttcacagagacaatccagagggttgttctctgtgccccttctgtcttgttcttccttgccttgggaagcttcagcagatcagtaaccatctggagctgataaagccaaacctgaaagacgaaattgagaagcagaagaaagatgctgagcttgcagctgctgtctttgacacagatattgaattagttggtggaggtgctaaaagtgaaaacttcatgggtctcagtgatgcagaacattgtggaaagatgcgtgcgttggaaagactattgtcattatggactctgcagggtgacaaaattcttcttttcagctattcagtcaggatgcttgacatactagagaaatttcttatacggaagggttactgcttttctcgctttgatggaacgactcccatgaatgcacgccaattactaattgatgagttcaatagatgcccaagcaaacaggttttccttatatctacacgggcaggaaatttaggtgtcaacctggtcagtgctaatcgtgtggtgatttttgacccaagttggaaccctgcgcaagacttgcaagcgcaagacaggtcatttcgatttggacagaggcggcatgtcactgtatttcgcctacttggtgctggttcccttgaagagcttatttattctcgacaaatatataagcaacagctttccaatattgcggtctctggaaaaatagaaaaacgttactttgaaggagtgcaggatgacaaaaaatttcaaggtgagctctttgggatatgcaatctgtttcgcgacttgtctgataagcttttcaccagtgagatcattgaaatgcatggagaacatgggaagggtaatacagctgaaacaataggaattcgagaaatagttgatacaaatatatttggtacgcaagatcaaatgaaatcctcaatgacagcaatacataacgagaacaagaatttgtaccattgtggaatagtttatgctcaccgaaatgaagatgttgtaaacacgaggacaaatgaagcaagcaactgtgcagaagataaaactgtcccaaggcacttagaggagctgcaaagtaagaagaatgaaacaatgcatacaattaaggcaaaatcttactcactggtgcagaaaaagaaggaattcagccgaattgcatctttcatgggtatgaacgaccttgagtttagtaagtggttgctgtctgtctcgcctttgcaacgacatgaagtattggaccgctacaggaatgcaaagtaa

SEQ ID NO: 12924 - DNA, 6991 bp, Oryza sativa
  Clone ID: TFbOSC18580j.C1.o1.fg
tgagaggaggcatgaaaagaagactgacgatggagaaaccaactcatctaggagtttaagtctctctgataacaacgatgaaaagaaaaaggacaaattctcaagtggtgatgagaaagaagaccacgaaaagcagctgaaacaaatacggctggatatggaggctttgcgtgacgataaaactcagatggaggtcattttggatgagaagatagatgaagtgcgcaagatctctagcaaagttaatgatcttgaggtgcagcttagaagggagaaagatgaatgccataggatgacctcaaagatgaagaagtttattaaagctcatgctcggtttttgaaggcacaagaagaagtgaaaaggtcacaagctcgtttcgagaggcttggtgatttgcttgcttcagatattttgaagcgtggtgctaatgaagaggggtccagtgtcaatgaagacctaaacgaaaggagtcctaatactgcagcaactaaaaagagatcaatcccatactcaacaagtgaagaagcgaaagctgtgaagaagagaagagagcgagactctgatacaatgactaggtcagataaatataggtcagatgttacagattttgataaaacaagtaaggggactgaggcaaccaagtctttatatttgaagaagaaattatgggaagatgaaaaaagcaaatattttgttaacttgcaggtcaaaggttctcccgtcagacatgttttgccctccactggcatggctgctcatgctattgatgatctcaacgaagctattgaactggaggacagacatgaatccatagacgcattactagaaaatgatgctgatgacaaaactagatcacctgctattcccctgcagccaccaccagtggtacagaatgcttatgagcagagcggcttcgaacatatatcatttgatatcccctttggtttatctatctattgtgcaaagtttcctttaacacaactagctggttccacgcaagcgacaaggttcgctgctgcacggcaaattggagaaattgccaagtcccacccccaggagctaaatgtcttactcaaaaaggatatctgcattatcattatattaagaaggaaaagggtttctccatatttacgtagtaagaattgggacacaagggtcgcagcagcccatgcgattggtgccatagcagagaacgtcaaacacacatcggtgaaagacttgttcgcatctgcagaagcagaaaaacatgcttctgggttgtctggaattggtgatgttgggtcaacgttgcggcatgctgatactactgcaacatctgagcttgcttttggaagcttcgatataaacagggtgttggaatttggatctcctttattggcatcaggtggacaggaatatgacattgcaaatgataacggcaaaaatccagcagagcgtttagctcgccaaaagcaaaatctccggcgtcgtttaggtctggatgtatgtgagcagttcatggatttcaatgatgttatcaaagacgaggaccttcttgcccaaaagaattattggggtgcaaatatgcaaaacaatggattctattcatttaatactggtcagaatattcagcacttggttgcatctatggttcccagtgcaattgcactggagcattctgttgggatggctttgtcttcaatctgtgatgatctaatcaccccacttacattttttcaggatacagttgatgcaatcacagatgaggacaatctggagtacagtgagaatgggagatggccttttcaacagtttgtagatcaacttattcatgacatgtttgaccctatttgggaagttcgccatggcaccattatggctttgagggaaattttgacgcatcaaggtgcttgtgctggagtatattttcctgatctgaactcacctttcgctgaccttgatgataaaaacaatttggactccctgaaaagagcacatggtattgatcttaatgaagacattgattcgggacagctcgagccagttttgaaaagacaaaagaaagaggagtctaatccagaggttatggacattcagttggataaggagccaagtaacggtgattattccaaaacagaggcaagtctgagtactgagcctactgtatctagtggtgaaccaaatcttgctcatgcaaaggttgaatcacccttccaggttgatggttcagctaacccatctaaggtggatccatattgtacaccacctcacgaaacactcaactccatgcccaaactgagttctacccatctccctgaaaattcaaaatttataaagctgatgaaactagcgaactactcagcggtaaaaaattgggaatttcttcaagactgtgcaattcgtttcctttgtgtactttcattggaccgctttggtgattatgtatctgatcaagtggttgctcctgttcgtgaaacttgtgctcaagctcttggtgcagttctgaagtacatgcatccgactctagtatgccatacactgaatattttgctgcaaatgcagcgcaggcaggagtgggaagttcgtcatgggagtctccttggaattaagtatttagttgctgttcgtcaggaaatgcttaaagacttgcttaattatgttcttcatgcctgtaaagctggtctggaggatccagatgatgatgtccgggctgtggctgcagaggctctgatcccagctgctgcttctttagttagactaaatgatcaaatgctacattcaattgtgatgttgctttgggatatattgcttgaccttgatgatctaagcccttctacaagcagtgtgatgaatttgttagctgagatatattctcaaccagagatggttccaaagatgcttggcacaacagccataggtggagacaacgaatttgatctaaacagtgtaactctggttgccggtgaagaaaaaatgggttctaatgataatccttatgtcttagccgctctgacaccccgattgtggccttttatgagacatagtattacatcagtccggcgttctgctgtacgaacattggagaggcttctcgaggttgggaacaccaggaattcagctaaactatggcttgcatctatattaggtgatgcgctgcaagttgtcttccagaatcttcttttggagtcaaatgatgagattattcgatcttctgaaagggcttggaaacttttacttcagtgccctacggaggaccttgagtctgctgcaagttcatattttagtaattgggtgcaacttgccactactccatatggcacagcattggattctgcaaaaatgtttttgccagttgcacttccacgaggaagtcgttcaagagctgctgcaaagatcaaatctgcaaggttagaacatgaaaatacgagaatgatatcttttggttctaccggagagaacacttcacaggaaaagcattctgaagcttccttgagtgtttcaaaaataattgtggggtctgattcggacaaatctgttactcatacgcgagtgctgacgtcaatggcccttggtctgtttgcctctaagttgccagaggggtcgtggcaagttgttcttggtccactagcaagcgatctcatgtctctctcaggagtccagagacaggtggcttctatggttattgtttcttggtttaaagacctcagaaaaagtgatcctgctgcggtgggtacattgctagctttcttatcctccctgaaagggtggatgttggacttactggcttgctctgacccttcatttcctacaaaagattctccgcttccatatgctgagcttgcaagaacatacaggaagatgcgcaatgaagccaataatttgttccagtcaatagaatcttgtgctcttcttaaagagtatacaagcaacttaaactttgaagctgacatgctgagtgttgatgatgctattaacttcacttcaaagcttttgttaccatctgaacctgattttagtttggacagtgataaaattgtcttgaacaatatagagtcagcaaaacaaggtctattgtctacgtcaggctacttgaaatgtgttcagaataatttgcatgtgacagtttcctctttagtggcctctgctgtagtctggatggcagggctgcctagtaagttgaacccagtcattttgcctttaatggctgctgtaaaaagggaacaggaggaaatacttcaggacaaagctgcagatgcacttgctgagctcatttttagttgtgttggccgcaaacctggcccaaacgacaaactaacaaagaacctctgcacgttaacatgcactgatgcaagtgagacacctcaagctgcagttataaactcaattcaggttattgaggaccaaaacttgctgtcgattggtaagcgttttagcaatcacaaatccaggggccagatgacttccggtggtgaatcgaagtcggagggttttataagccggcgtggatcggagttggcttttaagcatctttgtgagaaatttggagcatccttatttgaaaagcttcccaagttatgggattgccttacggagtttcttaaacccgtcaagactggagatgatcttatgaaagaagatccaagtattgcgcagttaggaagatcttgtgaggacaaggaaccgcagtcccttataaataatatccaggttgttcgttcggttacacctcatttggctgagcccttgaggcctcaattgctaagtctccttccctgtattcttggttgtgtgcgccatcctcatgtcgctgtcaggttagctgctgcaaggtgcatcacatcaatggcaaaatcattgactgctaatgtaatggtaattgtgatagaaaatgtcataccgatgttgtcagattcatcttctgtctgtgcaaggcaaggagctgggatgcttttgagccttcttgttcagggtttggctgtggagttggttccttatgctcctttccttgttgttcctcttctaaggtgtatgagtgatcctgatggttctgttagacagactgtaactcacagttttgctgctctggttcctttgttgccattagcaaaaggttctttgttaccggatggactgagtgaacgcttatctagcagtgcagaagatgcgcagtttctagagcagctcctcgacaactcccaaattgatgattacaagctcagcattgatctcagtgttgaactgcgaaggtaccagcaagaaggaattaactggctagcattccttagacggttcaagttacatggaattttatgtgatgacatgggtcttggcaaaacactccaggcgtctgctattgtagcagctgatattgctgagtcacgtgcacggaatgatgagcaagatccgaaatctttgattatctgcccttctacattagtagcacactgggaatatgaaatagagaagtacatagacagctctatcatgaaacctcttcagtacatcggttcatcacaagataggattatcctccgttctcagtttgataagttcaacgtaatcataacgtcatatgatattatacgcaaggatattgattttcttgagaatgtcttttggaactattgtgtgctggatgaggggcacataataaagaactcaagatctaaaataacatctgctgtgaaacaattgaaagcacaacaccgtcttatcctcagcggtactccaattcagaataatgtattggagctctggtctctatttgactttcttatgcctggatttcttgggacagaaaaacagttccaagctacatatggaaaaccattgctagcagcaaaagatccaaaatgttcagcaaaggatgctgaagctggcattcttgctatggaggcactgcataaacaggtcatgccgtttctacttagaagaacaaaggatgaagttttatctgatcttcctgagaagattatccaggatagatattgcaatctcagtctattgcagctcaaactttatgacaaattctccaactccaatgccaaacaagagatttccactatagtaaaagaaaatgaattagatcaatccacttctcaaccaaaggcaactcgtcatgtgtttcaggcactgcaatatctattaaaactttgtagccatcctttacttgtaactggggaaagcccacctgattatcttgtggaccttctaaaggaaatcggtatgggaactggtgatgagcttcatgacctacaccattcccctaaacttgttgctctccaagagatacttcaggagtgtggtatagggtcagaaatatcaagccctgatgcttctgcagctattgggcaacacagagttttgatttttgctcaacacaaggctttgcttgacattattgagaaggacctgtttcaatcccatatgagaagcgttacatatttacggttggacggctctgttgaaccagagaagcgatttgaaattgtgaaggcattcaactcagatccaaccattgatgtgctcctattaacaactcatgtcggtgggcttggattgaatttgacatctgctgacacattggtctttatggaacatgattggaacccaatgaaggatcttcaggcaatggacagagcacaccgtctgggtcaaaggaaagtggtaaacgtgcaccgtctcatcatgcgcggtaccctggaagagaaggtgatgagtcttcaaaggttcaaggtgtcggtggccaatgcggtcatcaatgctgagaacgccagcctgaagacaatgaacactgaccaactgcttgatctgtttgcttcgacgcctgcttccagaaaagcgtctgtactcccaagcagttcgggtggtgatcagagtaaagattccaaggggaaatctggtgggaagggtttgaagtccattctgaatggtctggacgagctatgggatcagtctcagtatgcagacgagtacgatctcaaccagttcttggcgaagctcaacggctga

SEQ ID NO: 12925 - DNA, 7449 bp, Oryza sativa
  Clone ID: TFbOSC400740j.C1.o2.fg
atgctgggccctcctcgccgcgggccggcgtacaagacgaagctgtgcgcgctgtggcagcgcggcaactgcaaccgcgacacctgcagcttcgcccacggccacggcgacatccgccgcccgccgtcctcccgcggcgccttcacgcaccacccggactctgcagatatgttgactcaactgctgccagaggatagcatgacctttttcataaattcttcacttggtatttcgacgatttgtgttgacgataatgcttgtgctgtaccagaaggtgaacttggagaagagattatagagccggtgatttcagaggcaggattgataggaggttttcacctcggaggaggcattcccctggaagagagtccaggggtcatcgtcccctttatgatagaaggccatcttctcgagaaagagattctagctattcacgatctcctagcaggaagagaatgtgagaggaggcatgaaaagaagactgacgatggagaaaccaactcatctaggagtttaagtctctctgataacaacgatgaaaagaaaaaggacaaattctcaagtggtgatgagaaagaagaccacgaaaagcagctgaaacaaatacggctggatatggaggctttgcgtgacgataaaactcagatggaggtcattttggatgagaagatagatgaagtgcgcaagatctctagcaaagttaatgatcttgaggtgcagcttagaagggagaaagatgaatgccataggatgacctcaaagatgaagaagtttattaaagctcatgctcggtttttgaaggcacaagaagaagtgaaaaggtcacaagctcgtttcgagaggcttggtgatttgcttgcttcagatattttgaagcgtggtgctaatgaagaggggtccagtgtcaatgaagacctaaacgaaaggagtcctaatactgcagcaactaaaaagagatcaatcccatactcaacaagtgaagaagcgaaagctgtgaagaagagaagagagcgagactctgatacaatgactaggtcagataaatataggtcagatgttacagattttgataaaacaagtaaggggactgaggcaaccaagtctttatatttgaagaagaaattatgggaagatgaaaaaagcaaatattttgttaacttgcaggtcaaaggttctcccgtcagacatgttttgccctccactggcatggctgctcatgctattgatgatctcaacgaagctattgaactggaggacagacatgaatccatagacgcattactagaaaatgatgctgatgacaaaactagatcacctgctattcccctgcagccaccaccagtggtacagaatgcttatgagcagagcggcttcgaacatatatcatttgatatcccctttggtttatctatctattgtgcaaagtttcctttaacacaactagctggttccacgcaagcgacaaggttcgctgctgcacggcaaattggagaaattgccaagtcccacccccaggagctaaatgtcttactcaaaaaggatatctgcattatcattatattaagaaggaaaagggtttctccatatttacgtagtaagaattgggacacaagggtcgcagcagcccatgcgattggtgccatagcagagaacgtcaaacacacatcggtgaaagacttgttcgcatctgcagaagcagaaaaacatgcttctgggttgtctggaattggtgatgttgggtcaacgttgcggcatgctgatactactgcaacatctgagcttgcttttggaagcttcgatataaacagggtgttggaatttggatctcctttattggcatcaggtggacaggaatatgacattgcaaatgataacggcaaaaatccagcagagcgtttagctcgccaaaagcaaaatctccggcgtcgtttaggtctggatgtatgtgagcagttcatggatttcaatgatgttatcaaagacgaggaccttcttgcccaaaagaattattggggtgcaaatatgcaaaacaatggattctattcatttaatactggtcagaatattcagcacttggttgcatctatggttcccagtgcaattgcactggagcattctgttgggatggctttgtcttcaatctgtgatgatctaatcaccccacttacattttttcaggatacagttgatgcaatcacagatgaggacaatctggagtacagtgagaatgggagatggccttttcaacagtttgtagatcaacttattcatgacatgtttgaccctatttgggaagttcgccatggcaccattatggctttgagggaaattttgacgcatcaaggtgcttgtgctggagtatattttcctgatctgaactcacctttcgctgaccttgatgataaaaacaatttggactccctgaaaagagcacatggtattgatcttaatgaagacattgattcgggacagctcgagccagttttgaaaagacaaaagaaagaggagtctaatccagaggttatggacattcagttggataaggagccaagtaacggtgattattccaaaacagaggcaagtctgagtactgagcctactgtatctagtggtgaaccaaatcttgctcatgcaaaggttgaatcacccttccaggttgatggttcagctaacccatctaaggtggatccatattgtacaccacctcacgaaacactcaactccatgcccaaactgagttctacccatctccctgaaaattcaaaatttataaagctgatgaaactagcgaactactcagcggtaaaaaattgggaatttcttcaagactgtgcaattcgtttcctttgtgtactttcattggaccgctttggtgattatgtatctgatcaagtggttgctcctgttcgtgaaacttgtgctcaagctcttggtgcagttctgaagtacatgcatccgactctagtatgccatacactgaatattttgctgcaaatgcagcgcaggcaggagtgggaagttcgtcatgggagtctccttggaattaagtatttagttgctgttcgtcaggaaatgcttaaagacttgcttaattatgttcttcatgcctgtaaagctggtctggaggatccagatgatgatgtccgggctgtggctgcagaggctctgatcccagctgctgcttctttagttagactaaatgatcaaatgctacattcaattgtgatgttgctttgggatatattgcttgaccttgatgatctaagcccttctacaagcagtgtgatgaatttgttagctgagatatattctcaaccagagatggttccaaagatgcttggcacaacagccataggtggagacaacgaatttgatctaaacagtgtaactctggttgccggtgaagaaaaaatgggttctaatgataatccttatgtcttagccgctctgacaccccgattgtggccttttatgagacatagtattacatcagtccggcgttctgctgtacgaacattggagaggcttctcgaggttgggaacaccaggaattcagctaaactatggcttgcatctatattaggtgatgcgctgcaagttgtcttccagaatcttcttttggagtcaaatgatgagattattcgatcttctgaaagggcttggaaacttttacttcagtgccctacggaggaccttgagtctgctgcaagttcatattttagtaattgggtgcaacttgccactactccatatggcacagcattggattctgcaaaaatgtttttgccagttgcacttccacgaggaagtcgttcaagagctgctgcaaagatcaaatctgcaaggttagaacatgaaaatacgagaatgatatcttttggttctaccggagagaacacttcacaggaaaagcattctgaagcttccttgagtgtttcaaaaataattgtggggtctgattcggacaaatctgttactcatacgcgagtgctgacgtcaatggcccttggtctgtttgcctctaagttgccagaggggtcgtggcaagttgttcttggtccactagcaagcgatctcatgtctctctcaggagtccagagacaggtggcttctatggttattgtttcttggtttaaagacctcagaaaaagtgatcctgctgcggtgggtacattgctagctttcttatcctccctgaaagggtggatgttggacttactggcttgctctgacccttcatttcctacaaaagattctccgcttccatatgctgagcttgcaagaacatacaggaagatgcgcaatgaagccaataatttgttccagtcaatagaatcttgtgctcttcttaaagagtatacaagcaacttaaactttgaagctgacatgctgagtgttgatgatgctattaacttcacttcaaagcttttgttaccatctgaacctgattttagtttggacagtgataaaattgtcttgaacaatatagagtcagcaaaacaaggtctattgtctacgtcaggctacttgaaatgtgttcagaataatttgcatgtgacagtttcctctttagtggcctctgctgtagtctggatggcagggctgcctagtaagttgaacccagtcattttgcctttaatggctgctgtaaaaagggaacaggaggaaatacttcaggacaaagctgcagatgcacttgctgagctcatttttagttgtgttggccgcaaacctggcccaaacgacaaactaacaaagaacctctgcacgttaacatgcactgatgcaagtgagacacctcaagctgcagttataaactcaattcaggttattgaggaccaaaacttgctgtcgattggtaagcgttttagcaatcacaaatccaggggccagatgacttccggtggtgaatcgaagtcggagggttttataagccggcgtggatcggagttggcttttaagcatctttgtgagaaatttggagcatccttatttgaaaagcttcccaagttatgggattgccttacggagtttcttaaacccgtcaagactggagatgatcttatgaaagaagatccaagtattgcgcagttaggaagatcttgtgaggacaaggaaccgcagtcccttataaataatatccaggttgttcgttcggttacacctcatttggctgagcccttgaggcctcaattgctaagtctccttccctgtattcttggttgtgtgcgccatcctcatgtcgctgtcaggttagctgctgcaaggtgcatcacatcaatggcaaaatcattgactgctaatgtaatggtaattgtgatagaaaatgtcataccgatgttgtcagattcatcttctgtctgtgcaaggcaaggagctgggatgcttttgagccttcttgttcagggtttggctgtggagttggttccttatgctcctttccttgttgttcctcttctaaggtgtatgagtgatcctgatggttctgttagacagactgtaactcacagttttgctgctctggttcctttgttgccattagcaaaaggttctttgttaccggatggactgagtgaacgcttatctagcagtgcagaagatgcgcagtttctagagcagctcctcgacaactcccaaattgatgattacaagctcagcattgatctcagtgttgaactgcgaaggtaccagcaagaaggaattaactggctagcattccttagacggttcaagttacatggaattttatgtgatgacatgggtcttggcaaaacactccaggcgtctgctattgtagcagctgatattgctgagtcacgtgcacggaatgatgagcaagatccgaaatctttgattatctgcccttctacattagtagcacactgggaatatgaaatagagaagtacatagacagctctatcatgaaacctcttcagtacatcggttcatcacaagataggattatcctccgttctcagtttgataagttcaacgtaatcataacgtcatatgatattatacgcaaggatattgattttcttgagaatgtcttttggaactattgtgtgctggatgaggggcacataataaagaactcaagatctaaaataacatctgctgtgaaacaattgaaagcacaacaccgtcttatcctcagcggtactccaattcagaataatgtattggagctctggtctctatttgactttcttatgcctggatttcttgggacagaaaaacagttccaagctacatatggaaaaccattgctagcagcaaaagatccaaaatgttcagcaaaggatgctgaagctggcattcttgctatggaggcactgcataaacaggtcatgccgtttctacttagaagaacaaaggatgaagttttatctgatcttcctgagaagattatccaggatagatattgcaatctcagtctattgcagctcaaactttatgacaaattctccaactccaatgccaaacaagagatttccactatagtaaaagaaaatgaattagatcaatccacttctcaaccaaaggcaactcgtcatgtgtttcaggcactgcaatatctattaaaactttgtagccatcctttacttgtaactggggaaagcccacctgattatcttgtggaccttctaaaggaaatcggtatgggaactggtgatgagcttcatgacctacaccattcccctaaacttgttgctctccaagagatacttcaggagtgtggtatagggtcagaaatatcaagccctgatgcttctgcagctattgggcaacacagagttttgatttttgctcaacacaaggctttgcttgacattattgagaaggacctgtttcaatcccatatgagaagcgttacatatttacggttggacggctctgttgaaccagagaagcgatttgaaattgtgaaggcattcaactcagatccaaccattgatgtgctcctattaacaactcatgtcggtgggcttggattgaatttgacatctgctgacacattggtctttatggaacatgattggaacccaatgaaggatcttcaggcaatggacagagcacaccgtctgggtcaaaggaaagtggtaaacgtgcaccgtctcatcatgcgcggtaccctggaagagaaggtgatgagtcttcaaaggttcaaggtgtcggtggccaatgcggtcatcaatgctgagaacgccagcctgaagacaatgaacactgaccaactgcttgatctgtttgcttcgacgcctgcttccagaaaagcgtctgtactcccaagcagttcgggtggtgatcagagtaaagattccaaggggaaatctggtgggaagggtttgaagtccattctgaatggtctggacgagctatgggatcagtctcagtatgcagacgagtacgatctcaaccagttcttggcgaagctcaacggctga

SEQ ID NO: 12926 - DNA, 4029 bp, Oryza sativa
  Clone ID: TFbOSC401858j.C1.o30.fg
atggcgatggcgcgatccatcctcctcctcctcctcctcgccgccgccgcctccgcctccgccgacgcgcccttcctcgtcgcgcacaagaaggtttcgctctcccgccccaagcctggcgtcgagcgcctcgccgtctccctcgacctctacaaccagggatccgcaactgcctatgatgtgagcattaatgatgatacttggccaaaggaggcatttgagcttgtctctggagagatgtcaaagacattggaaaggcttgaccctggtgtcactgcttcgcatgcatttgtcttggagaccaaagtacagggcaggtttcaaggttcacctgcggttattacctatcgtgttcccacaaaggctgcgcttcaggaggcctattcaacccccatccttgcacttgatgttcttgctgagaggcctccagaaaagaagtttgaatgggctaaggtgactagctccatggaggacgatgacgatgaccaacgcttgcttcacagccttggtgtcacgtccgcagacatccacgatattgaaaggagaatcatatcacaggcaacaactgatcctgccgactcatctggaccaaccatcaatggaggtcatcagcctgatgatgctctcgccaaactgcatcacaaactgcgctctgtgcaaattgaaattgatgctgtagcctccaccatcaaaggagctaagcttaagcaaccatccggaaataaaccacatgagcataaaggcaaggaccagccagatcatcatggagcaggacacctccagcaagcccttgctgccgaccgtcttacaagcctcaggaaagctaaagcacagatacagaaagagatactacagtcacatccttctccatctgcctccaatcgaaaagataaaatgctggccatgctggtccaagacgagccgaggcacaaaaagccacccgtagggcctaaaaacatcgtgaaacgcccgatgaaaactgtcacctatgatgatgacaacaacttcgatgcagtgcttgatggagcctctgcgggatttatggaaactgaaagggaagaactgatcaggaagggtttgttgacaccattccataagttgaagggcttcgagaaacgtgtggaactacccgaaccttctcatagacaagatgattctgcaggacaaactgaagaagccatggaagcttccaggattgctagagttgctcagtcgctaaagcagattgcacagaaccgcccagcaaccaaattgcttgattcagagtctttacctaagctagatgcacctgctgccccatttcagagacttggaaaacccctaaagcgtcctgtctctcccagttcagatgagcaggaaaagaagagaccaagaaataagaccaaaagaccactgcctggcaagaaatggaggaaagcaaactcaattaaggaatcatcattggatgacaacgatgttggagaggcagctgtgtcagtttcagatgatgatgaagatcaagttacagaaggctctgatgagttaactgatgttacccttgaaggaggtttgagaattcctggcacactttacacgcaactatttgactaccagaaagtgggagtgcagtggctatgggagttgcattgtcaaagggctggtggaataattggagatgaaatgggcctgggaaagactgtgcaggtcttgtcatttcttggttccttgcataacagtgggctctacaagcctagcattgttgtttgtcctgtaacccttttgcaacagtggcgaagggaggccagtagatggtatccaaagttcaaggttgagatcttacatgactctgcaaacagttcatctaaaaagagcaagaggtctagtgattctgacagtgaagcttcctgggatagtgatcaggaagaagcggttacatgttcaaaacctgcaaagaagtgggatgacttgatttcacgtgttgtgagttcaggatcaggtttgcttctgaccacatatgagcagttaaggatcctaggggagaagttgcttgatatagaatggggatatgctgtattggatgagggtcaccgcattaggaatcctaatgctgagattactcttgtgtgcaagcaattgcagaccgtgcacaggataattatgacaggtgcacctattcaaaacaaactttcggagctttggtctctctttgattttgtgttccctggaaaactaggtgtcctgcctgtgtttgaggctgagttttctgttccaattactgttggtgggtacgctaatgcaacaccattgcaagtgtccacggcgtatcgatgtgctgttgtcctacgtgacctggtcatgccgtaccttcttagaagaatgaaagctgatgtcaatgcacagcttcccaagaaaacagagcatgttcttttctgtagtctaactactgagcaacgtgctacttatcgtgcatttcttgctagttcggaggtggaacaaatctttgatggtaacagaaattccctttatgggatagatgttctaaggaagatatgcaatcatcctgatctacttgagagagaacatgctgctcagaatcctgactatgggaatcctgaaagaagtggaaagatgaaagtggttgagcaagttcttaaagtatggaaagaacaaggtcatcgtgttcttcttttcactcagacacaacaaatgcttgacattatggagaacttcttgacagcttgcgaataccaataccgaagaatggatggacttacacctgcaaagcaaagaatggcacttattgatgaattcaataacacagatgaaatttttattttcattctgaccacgaaagttggtggactgggtacgaatttgactggtgcaaaccggattattatatatgatcctgactggaatccttcaactgacatgcaggctagggaacgtgcatggcgaattgggcaaactagagatgtgacagtttatagactgatcacgcgtgggacaatagaggagaaagtctaccatcgtcagatatacaagcatttcctcacaaacaaagtactgaaagaccctcagcagaggcggttttttaaagccagagacatgaaggatttgtttacgctgcaagatgatgacaataatggctcaactgaaacatcaaatattttcagccaattgtctgaggatgtgaatatcggagttccgagtgacaagcaacaagaccagctatatgcagcctctgctacaccgacaacctctgggactgaaccgagctcatccaggcatggacagggtaaagaagaccattgccctgaccaagcagatgaagaatgcaacattttgaagagcctttttgatgctcaaggcattcatagtgcgatcaatcatgatgccataatgaacgctaatgatgaccagaagctgcgcctagaagcagaagctacacaggtggcacaaagggcagctgaagctttacgccaatcacggatgctcagaagtcatgaaagtttttctgttcctacatggactggaagagctggtgctgcgggggcaccatcctctgtccgcaggaagtttgggtcaacactcaatacccagttggttaattcttctcagccatcagaaacttcaaatggcaggggccaaagtcttcaggtgggtgctctaaatggcaaagcactgtcctccgctgagcttctggccaggatacgtggaacccgagagggagcagcttcagatgcactagaacatcaactcaacctgggatcagcttccaatcacacatcgagttcatcagggaatggccgtgcatcaagctcttctactaggagcatgatcgtacagcctgaagtcctaatccgccaattgtgcaccttcatacagcagcatggtggttccgccagctcaacaagtataactgaacacttcaagaaccggatactgtccaaggatatgctgctgtttaagaatctgctgaaggaaatagctacgttgcaaagaggtgcaaatggtgcaacgtgggtgctgaaacctgactaccagtaa

SEQ ID NO: 12927 - DNA, 5004 bp, Oryza sativa
  Clone ID: TFbOSC8410j.C1.o2.fg
atggcgtcccctccgcccttcgacatctgcggcgacctggacgacgaccccacccctcctgcgccgacgccgctcgccgctccgacacccaacggcctcaacgatcgcctcctccgcctcacccgcacgcaccaacggggcccctcccaaaacccaaaccctaaccctaaccctaaccctaaaccccctccgccgccgcctcctcaagagcccgaacccgccaaggtcaagctggccggccgccgccgcctctgcaagctctctaccgccggcgatgagtccgccggagacgacgacagcatccgcgacatactggacgatctcaccacccgcctcgactccctgtcagtcgacaggcccaccgcaaggcccagaccccacgtgtccccacttccctgcgccctccatgccgaccccgacccctctcagtctcagcttaatgatgggaccaaaccctcttcatcctttgtggactgtgatgacgacgacgatgatgcgggaggtgcctacggtggttttggtgttaaagaggaggtcaccaggaaggtgttcaaggcctcttcttcttttgggggccgcggcaacgatgataagatgaaagccaaaggagcttatgcctttgatacggtgtcaaggaaaaccacaaccgaatccaaggcctcaaaattttttggggactatgacgatgaagacgacatcgaccaagatgcagagaatgggaaggaaaaccatgctgatgatgttggttgggagaagacagaggacttcaagatggagcccactgggacaggtgtaacgcgcaagccctacaatctcccaggaaggatattcaacatgctttacccccaccagcgtgagggtctcaggtggctttgggttctgcattgtaggggaactggagggatccttggagatgacatgggccttggcaagaccatgcaggtttctgcattcctggctggattgttccattcccgtttaatcaagagagtgttagttgtagctccaaagacgcttctgactcattggaccaaggaactttcagttgtgagcctcaaagataagatcagagactactctggtcccaatgcaaatgctcgcaactatgagcttaaatatgccttcaaggagggtggaatccttttaacaacatatgacattgttcgaaacaatttcaagatgataaaaggcaacttcaccaatgattttgatgacgaggaagaaacattatggaactatgttattcttgatgaggggcatattatcaagaatccaaagactcagagggctcaaagtctatttgaaataccctgtgcacatcgtattgtcatcagtggaacacccatacaaaataacttgaaggttcaaagcaaggaattaagagaacggataaagccatactttttgcgacgcatgaagaatgaagtgtttcttgatagcggcacgggagaagataaaaagcttgctaagaagaatgagctaattatctggctgaaattaacatcttgccagaggcaattatatgaagcttttcttaacagtgaactagttcattcatcaatgcaagggtcacccttggccgcaatcacgatattgaagaaaatatgtgatcatccgctgttgttgactaagaaagctgctgagggtgttttggaaggcatggatgcgatgttaaataatcaagaaatgggaatggttgagaaaatggccatgaaccttgcagatatggctcatgatgatgatgacgttgaattgcaagttggtcaggatgtctcgtgcaagttatcttttatgatgtccttgctccaaaatcttgttagcgagggacacaacgtcttaatcttctcgcaaactcgtaaaatgctaaacattattcaggaggctataatattagaaggctataagtttttgcgcattgatggtaccaccaagatttctgagagggaaaggattgtgaaggacttccaagagggtcctggagctccaatatttttgctgaccacacaagttggtgggcttggacttacactcaccaaggcagctcgtgtcatagtagttgatcctgcttggaatccaagtacggacaatcaaagtgttgatcgtgcttatcgaattgggcagatgaaagatgtcatcgtataccgccttatgacatctggaaccatcgaagaaaagatatacaaattgcaggtcttcaagggggctctgtttaggacagctacagagcacaaagaacaaactcgttatttcagcaagagggatattcaagagcttttcagtctgcctgagcaaggttttgatgtttcgctgacacaaaagcaattgcaagaagagcatggacaacaacttgtgatggacgactccttgaggaagcatatacaattcctggagcaacaaggcatagcgggcgtgagccatcacagccttctgttttctaagacagcaatcttacctacactgaatgataatgatggtttggacagcagtcgtcgagctatgccaatggccaagcactactacaagggagcctcatctgactatgttgccaatggtgctgcctatgcgatgaagccaaaagagttcattgctcgaacatactccccgaacagcacaagcacagaaagtcctgaggaaatcaaggccaaaatcaaccggctttcgcaaacccttgcaaacacggtgcttgtggcgaagctaccagatcgtggagacaagataaggaggcagataaatgagctggacgaaaagctgaccgtgatcgagtcttctccggagccattggagaggaagggtccaacggaagcccgaactttaaaggattgggaaagtttgaaagcgaaggaagaagaggcgggcgggcgggcgcggggtgaaggcaggaagggatctgaattaaactcaactccgttccgtttaaactcaactagtagtacccttgttgtctttaaagttccttccactttcaccaccggccgcggagccctcgccgccgccgccgccaacggccgattcgttccaatggccccgacttcccaacctcaacctcaacaggaggtggaggtggaggtagatgaggatgaggagctagtcaacatggtggtggaagccggcgtcggcgccatcaagatgaagatgaagatcccccgccgcgtattggggtcgctctacccgcaccagcgcgacggcctcgcctggctctgggcgctgcactgcaccgccaccggagggatcctcgccgatgacatgggactcggcaagaccatccaggagggtggcattctactaacatcctaccacatcgtccggaataattacatgttactaagaggcaatggcaacggtaacaatgttgacaacaacgaagaagaaccactgtgggactatgttattcttgacgagggccacattgtcaagaatacaaagacgcaaagggcacagagcttgtttcaaataccttctgctcatcgcattgtactcactggaacacctattcaaaataaattaaagatgtcctggttcgaacttaggtacgagaagccaattctttgtggaaatgacaagaatgctactgatcaagagaagcaaatggcttcaaatgcagcaaaaaggcgattgtatgaagccttcctgaataaagatccagttcgttcacaaactggagcattgaagggttcatccttggaagctagcacgattttgaggaaaatatgcgatcaccctctacttttgactaaaagagatactgatgatttcctggaagaaatgggtgccatgctgaataaccgagatatgtgcatggtggaaaggattcttgaagataacctttatgctgacaaaagactacagattgtccaaggcgcctcctgcaagatagcttttatccttcccttactgaggaaccttgttgaagagggccactatgttttgatattttcacagacacgtgtaatgcttaaccttattcaggatgctgtatctatcgagggccataagttcctgcgtattgatggtaccaccaagatatctgagaggaagaagattctgaaggactttcaagaggggcttgacagtccaatattgttgttgacctcacatgttggtggacttggcaatacactcaccaaggcagatcgggttatagtagttgatcctgcttggaatccaagcatagataaccaaagtgtcgaccgtgcttatcgaattgggcagactaaagatgtgattgtatatcgtttggtaacttgtgggaccattgaggagaagatttacaagcaacagatcttcaagggaggtctttttaggacagctacagaatgcaaagaacaaccgcaattttataaccaggatctttaccttcagaatgaacaagagtactctagtttgccgccacatgggtttgacgcctctctcacccaacacaaaatgcaagtggagaatggtcagcagcttgtcatggatgagtccttgaagaagcacatccagttcttggaacaacaaggtatagctggcgtgaaccgtcatggcgtcctgttctgtaaaactgagaccactgcaactttgggtgacgacggtgcaataaacaggaaggtgagagacattatggtgaggcgctgctatgctccttgggagcacatttgtagagatgtcgagaaaaagagcttgatcgatcaagtgaaggagatgagcaagaagatggatggtttgggagatacaatgggacggattgttgctttggaggaggagtatgcagccgagctcattggaatgctccatgaaaacaggtgggagagaagccatctggagaagataaggatgcagatcgacgatctgcatgaggaacacatggcaaagtttgatgaaatgctggaaaggatcaagaggatggagctggctgatgagggtgagttgatagccaagtttggtgaaatggtggagaggatgaggcagagatgcgacatggatagattgagcctgccgcttctgtcttctacccttgtagcgtag

SEQ ID NO: 12928 - DNA, 4317 bp, Oryza sativa
  Clone ID: TFbOSC102263j.C1.o2.fg
atgccccgccggaaggggaaggggaagggggtcgaggacgaggtcgaggtgtacgagccggcgtcccccccggagcgcgtgctcatcatcctcgacagcagcgaggacgatctcgacctgcaggaggtgcgccgctcgctgatgatcacgggccgggggcgcgcgcgggcggcggagcgcgtgggggaggaggctccgcggggttctgggcggcgcgcggcgccggtggttgctagccggcggagacggagacggtcgcggtcgcggtcgcggagcccccgcgccgcccgcccgcgcgcggagtcctcgcggcggcctacggcccgccgtgcccgtgcccgtgcacgtagcccctcgctagagatcatcgacgtcgacagcgggagcgacaggggcgtggtgcgcgtcaaggaggagccgcgttccggaagcgactcggactacaatggtgcgagaggtcgtgcgcgtgcgcgggcgcgggcgccggtcgccgccaccgccgcgaagaagaagaagaggaaacgaggaaaggaagctccaagcagagcccaggagagccgggaggttgtccgcgtcaaggaggagccgaattccgacggtaatggtgcgggaggtcgtgcgcgtgcgcgctcgccggtcgccgccgccgcgaagcagaggaagcgaggaggaagagaagccccaagcagagcccaggagagccgtgtgcccgttcaaatcaaggaggagccgtattccgggagcgattccgacggcaatgtggccggtggccgtgcggtcgtgccggccgccgacgcgaagcaggggaaacggggaaagaaaaccccaagcagaggcaaagggcggcgggtggttgttcgcgagacttccacacccgctgctccgtccaatggtgctccctccgtcggcaggggaaaaggtagagggcctgggagaggtcgccagagaagcaagggcgctgttcgtggtcgcgctactccggtgaaccgggtgagcacgggtgttggttcgagaactcggtcacgcttggcagagcaggggagagcttttgcacaagaggaagaagaacaagtggaggaacgagaggaggaggaggaagaagaagagcaggggagagcttttgcacaagtgaaggaagaacaagtggaggaacaagaggaggacgaagaagaaggtgaggaggagatggagatggaggtggaggtggaggttcgttcagatgacaacgatcatggcaatggtggaatcaggggagaaggtggaggtacggacgatgttgcggagatagaggaggaggaattgggtacggatgaagatgaaaccagtgatgatagcgatgagaacttcagcgatgaggaaggggatgaagaggaattggaggaggaggaggaggaggaggaagaagaagatgatgatgatgatgacgaggaggaggaggaaccgggtgatgcacctgatcaaccgggtgaggccggtgaggaatctcctccccgatcaagaatcatggcaatgccgctgatgggaaagaggatgtttgagggatttagttttctacaacaggtggacacctcgactggcagggatatcagagctcgcacacgatcaaatttcaaacgcaagaaactcctggacaagaaactgctcaagcgtgggacgttcgcgaagccttattgtatcgatgtgtctagctcggggtcggaggaggatgtgccacagccggagcagtcggcgtacggtggggattgtgcggatgacgatggcggcagcgatggcaatgaggagcatagagctgtgaagaggaggaaattgaacaggaggcaaagtgcccatagtgatagcgaggaggatacaacatttgtatgtgatgtcaaggaaggatcaggttctaggagggtacaagaaggagcacctcgtaggcaggttaagaaggagggttccaacaagaaaaaggatggctccactccacaatgcgtcagaaacaatggaccaaaagttgggagacaaacaaatgggctcaatggacagggtggtgtatccttcaagagaaatgtaaagattgctcagaggaggaagcgcaggcaagcaacggcagaccaagaaaagtatggtcatttgctcgaccccatgtttaatgaaatagagagcaaccaatatgagcctgttcctgaagagcaaattgacaggagattgcccctggtattcgcatttggggatgacgataagctggaagagaaatccaaacatgacaagttacaggatgaagatgaactgtggaaagaatttgattttgctttggaatccataaatgtttgttctcacaactgcgaggagggtgaaaaggaagatgagcaagaaatccctgcggacaaagcagcttcatgcatccaagggaagcatgagctcattattgatgagcaaataggacttcgatgcaagcactgcaactttgttgatcttgaaatcagattcgtacttccctccatggtaaagtcctgtactgaaagggacatgagaaaagatcacgagttagacttgttttttgatgatatcctaacatcagcgggatatgaaggaccacgtgattttggtggtaaaaagactggcctggtttgggatctagttcctggggtccgggaggacatgttcccgcaccagcaagaaggttttgagttcatgtggagaaaactagcaggggggacttcaattgaacagctgaggaacaatgcaaacactattgaaggtggctgtgtgatttctcatgcaccagggacagggaagaccagactagcaatcacatttgttcaatcctactttgcgttttttcccgagtgctgtccagtgataattgctcccagagggatgcttgctacatgggaacaggagttcagaaaatggaaggtgaaggtcccttttcatgtattgaactccaaggagattaactggaaagaagacaggaccatcaaacagctggctatcatggatgaaaatttggcccaaagtttggctagaaacaaattggatcacaaatttaggcgaaagttgaagttggcatcatggcgtaaagggagcagtataattggtgtgagctatacgcttttcaggaaactagcgaaccagagcagcatggatgggaacatggtgaggaatctgctccttgagatgcccgacttgttggtccttgatgaagggcacacaccaaggaacaagaaaagtctcatatggaaggttcttgaagaagttcgcaccaaaaagcgaataattctatctggtactccatttcagaatagctttcttgagctctctaatgtcctgtacctgattagaccaaagtttgcaagacacttcgcttctaaaagtttcaagaaaataggccttgaggattactggacatccttgacactgaataacataacagagaaaaagatagatgaaatccggcaaatactcgatccaattgtgcacatccataacggtgacattcttcaaaagtctcttccaggattgagagaatcagttgtgattctgaatcctcttcctcatcaaaaggaaatcatcacagcaatggagaacacagtgacaatggggactcttgatgcagaatacaagatctcccttgcatctatacacccgttcctcgtcacatgtgcaaaactgtcggaaaaagaaacatcttctgtggatgtctctttgctgaagagcttacggccaaacccgtgcgtaggagtcaaaacaaaatttgttttggaaattgtccgtttgtgtgaagccatgaaagagcgagtacttgttttcagtcaatatcttgaaccactatctctgatcatggaccaacttagtaaaatgttcaattggacagaaggtgaggagatcctactgatgagtggaaatgtccttgttcaaaatcgagaagctttgatggaggccttcaatgacatgaaaagcaatgccaaggtaatgcttgcatcaacgaaggcatgctgtgaaggcattacacttatcggggcatcacgtgtggttctccttgatgttgtatggaacccttcagttggaaggcaggcgattggccgagcttatagaattggtcaagagaagattgtgtatacatacaatctaatcacagaagggacaaaggagaaggacaaatatgataggcaagctaagaaggatcatatgtccaaactgctattttcaaaagaaccccatgctgcaggattcaacttgtctcaagaagtgatattcaatgacaagatattggaagcaatgacatcacatagggagctcaaagacatgtttgtgaagattctccattctcactaa

SEQ ID NO: 12929 - DNA, 2847 bp, Oryza sativa
  Clone ID: TFbOSC400255j.C1.o28.fg
atggactatgagcccgtgttaaaatgcctgaagaagttgcctggagttgctgtgcaagatataccttacaaaacaaggaatgttatcaagaatctccctaagttctttgccgaaagctgcgcttctgataaagaagttgacgggcttctcatgaagttgccacaacacttacgagatgcactcctaccctttcaacttgaaggtgtgaagtttgggcttcgaaggcatgggcgctgccttattgcagatgagatggggcttggtaagactctccagcatttctccctgctttctaaaatattgcaatgcacaaatgttgaaattatctcaaactatttattccaactacttcagtcaccttgtgtatcaatattgcatttgatttcactaatgatagctgctatgatatatgacatattttgtgtacatcatctaaacggttttaaaattccagagatctatctcacagtttgttttctcctaggagacaatagaccttttgacatctatcatcagataaatatgctatggccccatttgcttggcagcaataaatttgactttgcgaacaaatattgcttgctacatactgttcaaggctgcaatgggagaacttaccaggatttttcaaagggtgctcggttgacagagttaaatgttttgctcagtcagactctcatgattaggcgcttgaaggagcatttgttgaatgaactacctcccaaacgtcgacagattatttggttgaagctgaatgcatcagatatcaagacagctatatcttgtatcaaaggggtgaacactagtgatgagattcctacaattgcctcgccagacaatagcaatgactctgaggaggtgaacatggaagaagggttcaagattagtaagattggtctgtctgctccttataaacattgtgctcatttccttgtatttccttttcatttgcccacagctgatggttgcaagaaatctccaaggaatctcactacacaagaaattggtattgtgaaaatacctgggttcagcgagtggttcttaaatcatttcatcatgaaagaaccagctgataatggtagtctggactctcagtctaattgccagaaaacaataattttcgcccatcatttaaaggtcctagatggagttcaggtgtttgtcacagagcagaggatcaagtatgtccgcattgacggaagcacatctcctagggaaaggaaagatgctgtcgattctttccgtttaaatccagaggtaatggttgcaattattggaattactgctggcggtgttggtttagatttctcatctgctcagaatgttgttttcgtggagctcccaaagtcagcttcagagttgcttcagaacacattagatgagtcacattggcttcatttgaaccagagtctgttccgtgtctcatcattgatgaatggaaagaaagatgctataagagagattgaggtgcttccatggtccgtaacaattgacaaaattttccttctttctaaggttgatcaagtttaccaccttgaggaaagcagtaaatctgagggaaaatcacagcttggatttcttcctttggagaatcataatgctgattgtgggcatggaccaggagagaatgtagaaagtgatgatatgtccattgagaattttcctggcctcaacgatatgaattttgagtcagatttcttcagtattaggacaattcctcttcactttgaggatgatagccttcatacggtaatgcaaaattgtccatctccaacagcacatgaagagatagcttttgatagttcttctatctctcaagcttcagttatttgcccttcaatgtcaagcgctaaatcagtaaaggttagccagcacacaggccgaattcatttgtacatatgtgttccagggcatgattcaagacccagaccactttttgaaaacttcctgccagaagaagtagagtcacctttatgttctgataataccatgaaaacaagtaatcgtctcttgaagagggatcctgcattttgcaatacgttcaaagcgttcgtgaaggaatggttggcgcttagaccaattgagcagaagagactactgggaaagcccttacagcttcccttgagccttgagttgtgctacctgaaagataccaacaaccacagcacaaaagggttgcttaaaggaggaagtaagaggcgtgtaacaccatggtgtgatattagtaatcctttgccagaaaatgctgaatggagaaaggtggttttgcataatggtacaagtagagagagagagtacactcaaggctggactgttcacgatgaacctctctgcaaattatgtcaaggaccttgcaatggaaggcttgcaaagtcacctgaatattttgaagacctgttctgtggtctgccttgcttcgaggtgttcagatcgagaactagtggcaggtttgcacggcaggcactatttgaaattgaacatggtatatgctccaagtgtaaacttgactgtcacgagcttgtcaagaatatcagaccattatgcaagaaaaagagagaagaatacattaggaatgttgctccaaatattgcaagtagattgaaattgctagataagcttgtacatgagccaaatgagggtaatgcttggcacgcagatcatatagtgcctgtatataaaggaggaggtcacctgtgcacagcaaaaggagcgaaaagattaacaaagaaagctaaagagcttctgaaaaacaccgtcaataatcagcagaaggatgaagcaagtgaagcagcagaagaagatgataagtcgttgcttgtcgttgtccctggtagtgcctactcctga

SEQ ID NO: 12930 - DNA, 1392 bp, Oryza sativa
  Clone ID: TFbOSC414036j.C1.o1.gm
atgcagtgcgacggcggcgcctacatgcggtgtgccgacgcccaccgttgtaaatccgctccaattgactctaccaacccacccgtgctctctcctgccgtgctcgtcgacagcaatcagaactcggaagccgaccgggaagtcgccgcgccgccatcgtgctcgccgccggtcgccgtctcggaggaggtaaagatcccgccgccgccctccctcccctccgcgtggtcggcgccgtgctccactaccccggccggcgcagatgatattgtgcacttcttctctccatatggaacagtagttgaccatcagatcactcagaaggatgaaaataaactttctgaaggatcaggcttctggtgtgccaagacaaggcatgattctctagcgcaggtgctaaaggaaggtggtgttctgcttattacgtatgatctggtgaggttgtataatgaagaactaaacggcatgagcagtaaaagctcaaagatgagaagagcttgtccttcatgggactatgtgattcttgatgagggtcacgtgctgaagaacccaaatacgaaaaatgctgctgcgctgaaaagcttatctcgtgggcaaacagttgtcctcacaggaacaccggagttccgcaaaatggtgcgaccttattttcttaggcgcaccaaggaaagtattgaaagccttttacctaataaagctgatcttgtcatctggctgaagctaacgccatatcaggtttgtattgctgtagaagctggcgatgatgtagaatttgtgccagtagaaattgggggcaccacccgccagtctcgcgctggcgcgctgccgcgtgcggggagagggaaaaaaatcggcgactcgcccagtcctccaccaccatggccgctcgccttcacttcagcctcggcccccgcctccgcgggtctgccactctcccgcacgggctcggtcgcgcctctccgccacggcttcggttccgccgtcgtcaccgcgccgccggccgaggacgaggacttcgccacagctgctgacctccagttcgagccgccgctcaaggtcgtgaagtaccccgacccaatcctacgggctcgcaacaagcgcatcaataccttcgatgacaacctccgcagcctcactgacgagatgttcgacgttatgtacaagactgatggaattggtctctctgcaccacaagttggggtgaatgtacaacttatgagaccagacaatgtcaaaattgatgctcaggatgttacaggggcaaagattaaagttaaattgtcaggtctgtctgcaagagttttccaacatgaatttgatcatttacaggggattcttttctttgacaggatgtctcttgatgttcttgagagcgtgcgtgagggactgaag

SEQ ID NO: 12931 - DNA, 2004 bp, Oryza sativa
  Clone ID: TFbOSC10297j.C1.o4.fg
atggcgggtctcggcggcggatggggcggcgggtacgacgacgacgacgactgggggctgagcgcggagcagctcgaccagctcgagcgggacgcctaccgcaagctcgccgagcgcaaggcctcctcctccgccgcctccaccgccacctcgccgctcccctccgcggcctactcgccggtcaagaacagccaccaccacccggcatccagggtttcccaggagtcttgcttcggcaaggtagaatcactttctccttctcggcttagtcaaccaaatgcatcgggaaatgcagttaataatagtcagggcaatatgtctaaggtatcagtacatcttttccttcattctactggtgtgatcgcagcgaagttccagtaccaccagaaacttgtggatgcagttcacaagatccccaaagccagctggaacgggaaggagagggtatggatgttcccacactcatcattatcagtagcagaggaagttcttagtacagtacctggaatagctgttgaggtccaaaaactggatccgctggttaagcgcgcactaactgcttctttatatgccggagatcttcgagatttgtatggcaagattccaactgatgttgagtcaaagcttatgccgtttcagcgtgaaggtgtcaggtttgctttacagcatggtgccaggaccctgatagcagatgaaatgggtcttggcaagacattacaggcaattgctgttgcttcttgccttcatgatgcctggccagttcttgtaatctctccatcatccttgcgattacattgggcttctgtggtgctaccacaaactggaggatcaaataaagcaggatacagattggtatattcaaatactaaaggggattttaatctggatggggtgttcaatgtgatatcttatgatgttgttcccaagataaaggacatgcttctggacttggattttaagattgttatagctgatgaatcacactttctgaagaatgcccaagcaaagagaacaatgcattcacttcctgttctgcagaaagctaaatatgtggttttgctaagtggcacccctgcgttatctcgccctatcgagctgtttactcagctccaggcattgtatccaactgtatacaagaatgttaatgagtatggtaatagatattgcaaaggtggcttttttgggctttatcaaggtgctagcaatcatgaggagcttcataatttgatgaaagcaactgtcatgatccgcaggttgaagaaagatgtcctttcacagttgcctgttaaacgcagacaacagttggagactgtgaagatcaaaatccagtcctgtgactcccaggagacgatggactctctcaaatttgctcaaaagaatcttattaacaagatctacaatgattcagctgaagccaaaattccagcagtgctagattacctgggtactataattgaggccgagtgcaaatttttaatatttgcacatcatcaatccatgcttgaagctattcaccaacatctcttgaaaaagaaagttaagtgcataagaattgatggtcaaacacctgtacctgtaagacagactctagtcacagatttccagaataaggatgacatcaaggcagcagtgttatccataaaagctggaggtgttgggttaactttgacagcagcaagtacagtaatctttgctgagttatcatggactccaggtgaccttattcaagccgaagaccgtgcccatcgtattggtcaggtttcttcggtgaacatatattaccttcttgcaaatgacactgtggatgacattatatgggacgttgttcaaggcaaacttgagaatttgggacagatgctggatgggcaggagaaaacgctggatgtgtcccagagcgacactaggcccagcccttccaagcagaagacgctcgacgcctacctcaagcgatgcagcaattccacagaagctgatcagcccaagctcaagaaccctaggttctga

SEQ ID NO: 12932 - DNA, 4299 bp, Oryza sativa
  Clone ID: TFbOSC401803j.C1.o22.fg
atggatgagaatagaaaattatctgatgacatgtccaagaaaatggaacctattcactctaatggagaggcaggggaagataaaactataattattgaacctgaaagtgatgcaaataaacttgaagtggaaactgacgcaagacatggtatctgtgaggcgcacaaggcgcatgaatatggaacaatggaaaatgatttgcatgaggaagcatccaccaccgatgatgattcagagaatgactcatatgaataccttcttcgggaatcggataatgagcaaacttcagagtctgatgctggtgagggagacaatgaggcacctctcactgatgaagaagttgaaacattaattaccgaattccttgacgctgagagcaaggctgctcaagcgcaagaatcacttgaaaaggagtcactggaaaagattgaatctgaagtaaggttggagctatcggagagtctccaaggaaatgagttagagtcagccgtttctactgagatgaagcaatacaagaaggaatgggaatctgaacttgatgatttggagactcacattgctgttctcttggagcaacttgatgctgctggtgtcgaacttcccagcctctacaagtctatagaaagccaagttccaaatgtttgtgaaactgaagcatggaagaacagggctcactgggctggttatcaagtgcctgaggaagctaataaatcaatcagaaaagctgatgaatacctccaatcttgtagacctgtaaggagaaaacatgggaggttgctggaggaaggtgctagtggctttcttgctggaaagattcctgttggggatgatggatctgcacaatgccatgagaaaagttggaatgcattcaatgaacttaccaaatctaaggaatatgctgaaagttctttcggaagtagtaactgggcatcagtttatctggccagtaccccacaagaagcggctgctttaggtctccaatttccaggagttgatgaggtagaggagatagctgaagttgagggtgctgttagtgacataaaaggtgtcgatgaaatagagctttctgaagtacagagaagaaaatacagaaaggtaccagaagaggatgatgcaaagatgacaaaacgtctgcagcgccatttgaaagaaagaaggacaagacatttgcataaggagaacattggtttggcgtcatcatcaaatggatgcttttctgttgagctagcgaagcgcacacgtgaagatgatgttgagtttgacaataagaggtcaaaaactgtaattattgaaagtgatgatgacatgcagactgatagcaagccagattcagcaccaagtgaaaatgcggatgagattattgatcttgatatcttcccatcacaaagccctaaacttggtgataaagttcggcctaaacctttcaagtgcactatttgcactgaaatgttgaatgtccctgaagtgcaccgccacccagtattggatgttataatttgtggatcttgcagatttctagtgatagagaagaatcgtctcgaggatcctgtgtctggtggttattgcacctggtgtgtaaaaagtgaacagcttcaaagttgcagctcttgtaaactgcttttctgcagaaattgcttgtcaaagaattttggtgaagaaggcttatcggaagctagagtagctggttggcaatgttgctgctgcctacccagtcaactggaacatttaatttctgactgtgacaaggccctaggtggtgttgagtcttctgatcctgagaatgactttgcagagctttctgtattagagagcaatggtccttttagcaagcataaaatgaaaaagaggataagaagaatcatggatgacgaagaacttggagaggaaacaaagcttaaaattgcaatggagaaggctaggcaagaacatctgaagtccatgcaagagcagtctgccagcaagttaaagagcaacaatatcggaatttccttggaagcaccatctgaggtttctgaatatgttggggatggacatatagtaaaccttgcccgcgaggaagatgaagcacctgttagaattccaagcagcatatctgctaaactgaaacctcatcagtatcgcatcaccatcacactggtcatgatttctgtacagttgtacctatactgttacaggaagctaaaatatatcatgatatttcaggtatcaggaataagatttatgtgggaaaatgtgatccaatctgtcaagaaggtcaaatctggggataaaggttttggttgcattttggctcacaacatgggccttgggaaaacttttcaggttattacattcctgtatactgttatgagatgcatccagttgggactgcgcacggcgcttatagttacccccgttaatgttttgcataactggaagaaagagttcatcaaatggtgtccagcagaacttaagccacttcgtgtgtatatgttggaggatgttccaaggtgcagggcaaacattcagtatttactaaaaaagtggcgaataaaaggtggcgtgcttctgattggttattcatcatttagaaacctttcccttggaaggagtgcgagggacaaaactgttgcaaacgagatcaccaatgctttgcagatgtgggttttgatacagtccatttacatatgtcacaatcagtgtgggccagatattcttgtatgtgatgaagcacatataattaagaacaggagagctgacactacacaagctttgaaacaaatggttgattttgttagggaaggttatcttggaagtagccatgagttccgtaacaggttccagaaccccattgaaaatgggcagcacacgaattctacatcagatgatgtcaagatcatgaaccaacggtcacatattctgtatgaacaactgaagggatttgtccagcgaatggacatgaacgtggtgaagaatgatctaccagaaaagaaggtttttgttgttactgttaaactctctcaactacaaaggaagctgtacagaagattcttggacgtgaatggtttctcaagcagtgctgcttcagaaaaatcttttcagcggagtggcttctttgccaagtaccaaacgttagcgctgatatggaaccatcctggtcttctccagatggctaaacagaaaggaaatttgcgccaagaagatgtcgagtcctttctgatggatgagagctctagtgatgataatattgaaaattacttgccaaatggagagaagctgagaagcagaaatgatcagctatccaagaaaagttctgatgttgtaaatgaggaaagtaactggtgggagaatcttttagatgaaaatgcttataaggaagcagattatagtggcaaaatggttttactccttgatatcctgtcatcatgttctgaattgggtgacaaggcattagtgttcagccagagcttgagcactctggatttggtggaattttatctatctaagttgcaagttaatggaaaagagggcaaatattggaaacaaggcaaggattggtacaggattgatgggagcactccatcttctgagcgacaaaatcttgtggagaggtatggccagaccaagcctgtgtatgcttaccgcctaatggctcatgcaacaatggaagagaaaatatataaacggcaggtgacaaaagaagggcttgcagcaagggtggtggatagacagcaagtgtctagaacaatctctaaagaagagatgttgcatcttttcgagtttggtgatgaggaactactggagcagagcggttctaccatgaatggtcacagtaaagttgggactgagaagccacctactcccaactccagtgaaaccactgaacatttacctttggacaggctcatggtgaacctacttcatgaccactcccggtggatcgcaagttaccatgaacatgaaacccttctgcaagaaaatgaagaagaaaggcttaccaaggaggagcaagatatggcatggttaagctacaacaagttgctagaagttgccccgaggaaagctacacatgacgccgagagaaaaccaagtactgttccaacagagagcagccttatacaaccacctaaagctacttcaagaagccggcaaccccagcagcctaagatcacttcaaacaaccaaaagaagtgtaacaacctgagccacttgcttactctgagaagccaaggcaccaagcctggatgcagcacgagttgcaaagaatgtggccaggatattagttgggagacgctaaacagagacggtagatcaaggtga

SEQ ID NO: 12933 - DNA, 3399 bp, Oryza sativa
  Clone ID: TFbOSC20491j.C1.o1.fg
atgcacggcgactggccggagtcgccgtcccaggaggtgctctacgccgacgagatcgccgccgtccgcgcggttcttggcgcgggcctccccgaggcccgcgtcgtcgccgcaatctcccgctgcggaggcaacgccgagcgcgccatcaacgcgctcctcgatgacgccaccgccggcgtcgaggacaaacccgagcccaagaagggtaaaggtgccaagacggctgctcctccggtgaaggcggaacgcgacgctggtggcgccgccccgaagccgccgccgcctccggtgaaggttgaggtcctcgacgacgagcccctggggagccaagaatcgaacggctgctccgcgagggtcaagaaggagcgggaggacgagctgctcgtcaaagcgccgcctccgatgccggatcgggtcaaggaggaagacggcgtcgcggccaagcgaggcgcggcgacggcgaacgccgccggcataagcctggtgccgaggccgaagaagaggtctcgcgtgcacgacgaggcggacaccatcgacctcacggcgacccacccggtgccgtacctgaacccgaggccgatccgggcggtgccgccaccggaggccatggagatgctcgagtcgcggcgtgtgcgtgccaggccgcctccgccgtcgagtgatctgaggatggtggtggcgccgcctgatgccgagttcggcgagttccccgaggagcgcgactggttcctcgtcggcaggtcgtacgtcaccggcctgtccaccaaccgcgggaggcggaggctggacgccggcgagctcgtccatttctcgttcccctcattggagaggacctatggtgggatcaaggtgtcgaacaagaaggcggctgctttggcggagatcgtgcgcttctccaccaatcgagctggagagattgggaagctatctacagaatggaccaagtgcctcgtgccactggtaagctcatccaaggtgaagattcaggggaagattgtgtttcccacggtggaattgagattgatgcaggagattttgttgtatgttagcttctacatccaccgttctgtattcaccgcaagcggcaacaactcatcatgggacctgcttgctcctgcaaatgttgattattccactaaccctctttacaggctgttcagattgctcaagctaagggcattcaccaaggctgatatcactcctgaggagcttgctgcaggaaagagaccgcggaatctaaggggtgatgacaatgatgaagatgaacccatggctatagttggattggaaaaccgacgcacagctggccaaacatttcctgagcaaggcactgatgagcaagctatttcagaggctgcattaaacaaaattgttggcactgctgaaacatatgacttggaggaagcagagcccccaagcactcttgtctccgttctaaaaccataccagaaggaagctctgttctggatgtctcaattggagaagggtattgatggtgatcaagccaaaaaaacccttcatccctgttggagtgcctacaaaatcgtcgacaagagagctcctgcagtgtatgtcaatgttttcactggcgaggcaacaacccagtttcaaagtgtaactcagtcagcaagaggagggatactagcggatgcaatgggtcttggtaaaactgtcatgactattgctctaatactatcaaacccaaggggggagttagaacaagataagaggggtactagagatcgtgacaccaaggcacaaacttcgagatcctctgtaagaggaggcacacttataatctgtccaatggcattgctaggccagtggaaggatgaattggaggcacattcaacaccaggagctctttctgtgtttgtctactatggtggcgacagaaccactgacctgagattcatggctcagcatagtgttgtcttgacaacctatggtgttcttcaatcagctcacaagaatgatggcagcagtatctttcacaggatagattggtatagagttgtgctcgatgaagcacatacgatcaaatctcccagaaccaaagcagcacgagcagcttatgaattaacttctcattgcagatggtgccttacgggtacaccattgcagaataatttggaggaccttttcagtcttctttgcttcctacatgtagaaccatggggtgacgcaagttggtggaataagctgattcaaagaccttatgagaatggtgatgagaggggattgaaacttgtcagagctattctgaggccactcatgctgaggagaacgaaggaaacaaaagacaaaatgggaaatcccatactagtcctcccaccagctaatattgagattgtggagtgcgaacaatctgaagatgaacgcgatttctatgaagcgcttttcaggagatcaaaggttcaatttgataaatttgtagcacaaggcagtgttcttaacaactacgctaatattcttgagttactccttcggctaaggcagtgctgcgaccacccttttctagtgatcagtcgagctgatactcagaagtatactgacctcgatgagctagcacagaggttccttgatggggtgcaacgtgattccgcgagacgcagtgcgccaccttcacaggcgtatgtagaagaggttgttgaagaaatccgccagggcgcaactactgagtgtccaatctgccttgaatcagcttctgatgatccagtgctcacaccatgcgcgcaccggatgtgccgtgagtgcctgctctctagctggaggacgccttctggaggaccatgcccactttgccgaagccccattaccaaatctgagctgatcacattgcctagtcagtgtcgattccaggttgaccctgagaataactggaaggactcatgtaaggtgataaaactcatcaagatcctggagggccttcaggagaagagggagaagagcattgtgttcagtcagttcacttccttcttcgatcttcttgaggttcccttcaatcagaaagggatcaaattcttgaggtttgatgggaagctcagccagaaacacagagaaaaggttctgaaggagttcagtgaaagcaaggacaagctggtgctacttatgtcactcaaggctggaggtgttggacttaatttgactgctgcctccaatgtgttcctaatggacccatggtggaatcctgcagtggaagaacaagctatcatgcgaattcaccgtatcgggcaaaagagagcggtccaagtaaggcgcttcatcgtcaaggatacggtcgaggagcggatgcagaaggtgcaagcgtgcaagcagaggatgatctctggggcgctgaccgacgatgaagtccgctccgctcgtatcgagcaactgaagatgctgtttacatga

SEQ ID NO: 12934 - DNA, 537 bp, Oryza sativa
  Clone ID: TFbOSC900422j.C1.o8.fg
atggagagcgaggaggcacggaaggtgtgcttctccaagcgccgtgcggacctcttcaagatggcgagcgagctgtccgttcatttcaacgccgacgtggcggctgtcgtcttctcccccgccggcaacagggcctactccatcggcgacccgtcggtcatggaccgcttcctgtcgtcgttgccggcgccggcgccgccggcggagaccgagccagagccagaggtggattggtcggtgatggaggagctgagcaggctgtgtggccagctgcaggccatggtggacgcgcacaaggcgcgcctggagaaggcggaggagaagcttcgcgagagcggcgcggcggcgtggatgatggatctggaggcggaggtgggtcgcatggcgccggaggatgtgctggccctggtgactaagctggcggtgctgcgggacggcgtggcggagcgcgcccacgagatgctgcgcgaggcgctgctcgctgtcgctgccccgaccccgaccacccccaccaccccgccgcccgcgggcttctga

SEQ ID NO: 12935 - DNA, 1221 bp, Oryza sativa
  Clone ID: TFbOSC400773j.C1.o106.fg
atggccgggaggaaggagaccgtgataaaaatggcgaaggagctctccgtgctctgcgacgtccccgtcgcgctcgtctgcgccgtcggcggcgcggtggaggtgtgggagtcggaggagggcgtcctcgaccggtaccgcgccctcccgcccgaggtccgcgccacgcgcgcgcacacgcaccggggctacctcgagcgggagctccgcgcgaggagagccaagctggccaaggtccgggaggaaggcgcgttcaagtcgtgggggcgcgacgcgctcagcggcatcatcacggcggaggaggcgccggcgctgctcgagtccatcgacgctgcgatcgccgccgcgaccgcgaggcaggaggcgcttgctctactggacggcggcgggctccatctgcagcacgtcccggcgagcgcttccgacgccgtcgcgcctgtcgtcggcggccacggcgtccaggtccagtacatcggcggcagcggcggcggcggcgggagccagcaggagatgacgccggcagccgacggagatggcgcccgcaacgccgaccagtacgacgacatcctcccgtgggatggcaacaccttcgaggcgcacaacgcccacgtgatgctgcccgcgtgcggcttccaatgcaccggcgactaccgcgtggacatggacggctacgtgtggggagccccggatgatgccaacgcctaccatggctggcccgatgaggcaatgtggtgcaccgacgagtcgtgctcgtgcaacgccgccaccgccaccgccgtgccagccatgtatcatccccccaccctggacaccgtccacgggagcttcctcgccgcgccagctcaaccactcgccttcagcaccggcgccgacttcatcaacgcgccgaacgactttctcaccgtgggcgtcggcggcagcttcatcaacgtcggcgactactcggcgcagagcttggccgacgagttccaccacctcagcgacgccaccaaccagctcgatcagacgcactacccaccattcggtggaacgggcggcgccgagcccggcgacacgcagtcccatagctggggggactactacttggcgcagagctccgccaatgagtgccagctgctcggcgtcgacggcggcgacatccatctcgatcagacgcattgcctcggtggtgcgggcggcgccgagcccggcgacacgaagtcccacaattggggtggctga

SEQ ID NO: 12936 - DNA, 542 bp, Oryza sativa
  Clone ID: TFbOSC102221j.C1.o1.np
atggctcgcaagaagatgaagcttctgcggatcgtcattgatgtgaagcggcgggtgacatttaggaagcatctgaagggcttgatgaagaaggttagtgagttcgcaacactgttcctcatggtgtacggtgaggttgaggtgcaagcaacgaaggtttggccgtcggtgtgggaggcgaccagagttctcgagcacttcaaggccatgccgcagctgggcagatacaagaagatgatagacctagagggcatcctcaacaagcagatcgacaagctcaaggagaagttgcacaagctgggacgcgaagctgatgaaagcgagaccaagctactcctcattgaagccatcaatggccgccacccaagcctcgatggtctcaccatcgagcagattatcagcctcggaaggatggcaaattcacgcctcaagattgtcaacgaccgcctcaagaagctccgtgccagcaacacgtacaccagcgtgataccatggtcgccgccgccgccgccgccccgccgcccagcgtcgccgccgccgcc

SEQ ID NO: 12937 - DNA, 501 bp, Oryza sativa
  Clone ID: TFbOSC401885j.C1.o19.np
atggctcgcaagaagatgaagcttctgcggatcgtcattgatgtgaagcggcgggtgacatttaggaagcatctgaagggcttgatgaagaaggttagtgagttcgcaacactgttcctcatggtgtacggtgaggttgaggtgcaagcaacgaaggtttggccgtcggtgtgggaggcgaccagagttctcgagcacttcaaggccatgccgcagctgggcagatacaagaagatgatagacctagagggcatcctcaacaagcagatcgacaagctcaaggagaagttgcacaagctgggacgcgaagctgatgaaagcgagaccaagctactcctcattgaagccatcaatggccgccacccaagcctcgatggtctcaccatcgagcagattatcagcctcggaaggatggcaaattcacgcctcaagattgtcaacgaccgcctcaagaagctccgtgagccatcatccttggccatggtgttgtgcttccctctt

SEQ ID NO: 12938 - DNA, 53 bp, Oryza sativa
  Clone ID: TFbOSC102221j.C1.o3.gm
atggagggagcacttgccatgttcgctgagataatattttgtcccaacaaact

SEQ ID NO: 12939 - DNA, 630 bp, Oryza sativa
  Clone ID: TFbOSC401885j.C1.o22.fg
atggctcgcaagaaggtgaagcttcaggggatcgtcattgatgtgaagcagcgggtgacattcatgaagagtctcaagggcttgacgaagaaggttagtgagttcgcaacactattcctcatggtgtacggtgaggttgaggtgcaagcaacgaaggtttggccgtcggtgtgggaggcgaccagagttctcgagcacttcaaggccatgccgcatctggtcagatacaagaagatgacagacctagaggacatcctcaacgagcaggtcaacaagctcaaagagcagttgcacaaggtgggacgtgatgctgatgaaagcgagaccaagctactcctcattgaagccatcaatggccaccgcccgagcctcgagggtctcaccatcgagcaaattaccagcctcggatggatggcaaatgcacacctcaagattgtcaacgaccgcctcaagaagctccgtgaggaaggcctcatacctgcatccgtgtcattgtcgagcacggaagtaccaatccagagggagggatggctggtggatgttgcaaggggcattggctcaatagggtacaatcggttcggaggtagcagtggaagcggcactgctggatccaatggtgacatggcttag

SEQ ID NO: 12940 - DNA, 566 bp, Oryza sativa
  Clone ID: TFbOSC6754j.C1.o1.fg
atggctcgcaagaaggtgaagcttcaggggatcgtcattgatgtgaagcagcgggtgacattcatgaagagtctcaagggcttgacgaagaaggttagtgagttcgcaacactattcctcatggtgtacggtgaggttgaggtgcaagcaacgaaggtttggccgtcggtgtgggaggcgaccagagttctcgagcacttcaaggccatgccgcatctggtcagatacaagaagatgacagacctagaggacatcctcaacgagcaggtcaacaagctcaaagagcagttgcacaaggtgggacgtgatgctgatgaaagcgagaccaagctactcctcattgaagccatcaatggccaccgcccgagcctcgagggtctcaccatcgagcaaattaccagcctcggatggatggcaaatgcacacctcaagattgtcaacgaccgcctcaagaagctccgtgaggaaggcctcatacctgcatccgtgtcattgtcgagcacggaagtaccaatccagagggagggattgctggtggatgttgcaaggggcattggctcaatggg

SEQ ID NO: 12941 - DNA, 630 bp, Oryza sativa
  Clone ID: TFbOSC401885j.C1.o21.fg
atggcttgcaagaaggtgaagcttcagcggatcgtcattgatgtgaagcagcgggtgacattcatgaagagtctcaagggcttgacgaagaaggttagtgagttcgcaacactattcctcatggtgtacggtgaggttgaggtgcaagcaacgaaggtttggccgtcggtgtgggaggcgaccagagttctcgagcacttcaaggccatgccgcatctggttagatccaagaagatgacagacctagagggcatcctcaacgagcaggtcgacaagctcaaagagcagttgcacaaggtgggacgtgatgctgatgaaagcgagaccaagctactcctcattgaagccatcaatggccaccgcccgagcctcgagggtctcaccatcgagcaaattaccagcctcggatggatggcaaatgcacacctcaagattgtcaacgaccgcctcaagaagctccgtgaggaaggcctcatacctgcatccgtgtcattgtcgagcacggaagtaccaatccagagggagggattgctggtggatgttgcaaggggcattggctcaatggggtacaatcggttcggaggtagcagcggaagcggcactgctagatccaatggtgacatggcttag

SEQ ID NO: 12942 - DNA, 334 bp, Oryza sativa
  Clone ID: TFbOSC401465j.C1.o6.gm
atggctcgcaacaaggtgaagctgcagcggatcatcaatgatgcgaagcggcgggcaacattcaagaagcggctcaagggcttgatgaagaaggcaagcgagctggcaacactatgcaatgtggacacatgcctcatggtgtatggtgagggtgaggcgcaagcaacggtggtttggccgtcggagtcggaggtgatgagagttctcgagcgcttcaagaccttgccacagctggacaaatataagaagatgaccgacctggagggcttcatccaggagcgcatcaacaagttccaagagcagttagacaaggtgaggcgtgatgccgatgaaa

SEQ ID NO: 12943 - DNA, 807 bp, Oryza sativa
  Clone ID: TFbOSC900168j.C1.o3.gm
atggctcgcaacaaggtgaagctgcagcggatcatcaatgatgcgaagcggcgggcaacattcaagaagcggctcaagggcttgatgaagaaggcaagcgagctggcaacactatgcaatgtggacacatgcctcatggtgtatggtgagggtgaggcgcaagcaacggtggtttggccgtcggagtcggaggtgatgagagttctcgagcgcttcaagaccttgccacagctggacaaatataagaagatgaccgacctggagggcttcatccaggagcgcatcaacaagttccaagagcagttagacaaggtgaggcgtgatgccgatgaaagtgagaccaagctactcctcattgaagctctcgaaggccgccgcccaggccttgaggggatcaccattgagcaacttaccagccttggctggcttgtagatgcacgcctcaacatcgtcaatgatcaactccagaagctccacgagcagggcctcctaccagcgtctatttcactgccaaccatgggggtactgccttacaccacggcgggctacactgttgcgcaagaggcaccaatccagagggggggatggctcatgggtgttgtaaggggcattggctcattgggctatagtttgttcagaggtagcggcagaagcaacactgctggacccagtggtgacatggtgcaacctttcaacattggcgcaggatcctcattggccaaccagggcggctgcagaaacaaccagcaggaggaggtcgtcacgagcgtgaggtcggggaagctcaacgttgtggccttcccttag

SEQ ID NO: 12944 - DNA, 726 bp, Oryza sativa
  Clone ID: TFbOSC30381j.C1.o2.fg
atgggtcggccgcgaggggggactagcaaggggaagcagaagatcgagatgtgctgcatcgacggcaaggagaaacggcaggtcaccttctccaagcgccgccggggcctcttcaagaaggcgtccgagatatccacgctctccggcgcgtccatcgccatcgtctccttctccaaggccggcaacgtcttcgccttcggctcgccgagcgtcgacgccgtcctccgccgccacgtcgtggccgggccttccacctccacctcccacgcccacgccggcggcgacgtcttcgcggacgacggcggcgacaaccccgaggtgctgaacgcgctgaagcgggcgacggacgaggccgcggcggaggtggcggcggaggacgcgcggcagagcggcgtcgagggaaagatcacggaggccatggcggcggggaggcggcggttctggtgggacgccgccaacgtcgaggcgctcggggaggcggagctgccggtgttcgaaagggcgctccataagctcaggggcgccgtcgcacagggaggcaacaatccaatccaggagagatgggataggatcccagctcaagggagccctggtggcagctacggttgggaggacctaagccctacaggcaagctctataatcaacccccttttgcttaccggcttccagtgatgcagtcaatagtttctgatcagcttggagtggtctgtgccatgttgctgtga

SEQ ID NO: 12945 - DNA, 1452 bp, Oryza sativa
  Clone ID: TFbOSC400964j.C1.o2.fg
atggtccgcacgcccaccataatcccgctacggcccaactacagcccgccgggcgacggtgccgcattccgccgcgagcccgcgacgtattcccgtttcccacccgccgcggctcgcaacgaatgtgatctcaccttcggtcaggaaaggaaacgagagggaatgaaaggcaagcccccgatatcaaggaaaatcatttataatcaccgagattttgtttccatgggtgaaagatttgttgctctttgctttatatttacgatgtctccatgcattgatgcaacgctattcgttcgcgtggttttggatttcgtccggcgagaggagacgagacgagacgagatgcctcgcacgaagcttgtgttgaagctcatcgagaacgagaagaagcggaaggccacgttcaagaatcgccgggacggcctcaagcagaaggtgtcgcagttcgcgacgctgtgcggcgtcgaggccttgctcatctgcgtcgcccccgccgtggcgggcggcgaggtcacgacgtggccgcccgaccgcgccgccgtgctggacctcatcgcgaggctccgggcgacgccgccggagaagatccggcagctgcacaacacccagtcccaactccgggacgatctggacaagcagcagcggttgctcctcaaagtccagaagtgcggcgccgacgacgtgctcacaccgtggcactgcagcctgtacgacctctccctcgacggcctcaatgcgctccacgacaccctgtccgagacgctggacagggcgcaccggcggatagccgcgctcggcggcggccacggccacgtccacgacgacgccgcgtcgtcctccgagttctcggtccccgcgcccgcgccgcacgccgtggcattgccggacaacgccttcgacttcccgttcgccccgtcgaacaccggccccgtcgtcggcgcccactacttctaccctctccacgacaccctgccgctgccgctgccgctgccacagcaggttcccggccagcatccgccgtgcatcgcctaccagatgccgccgccgccgtgcctcgcctatcagatgccgccgccgccgccgccgtcgctcgccgcggcgccattcgaccagtgtatgagcgccacgggcttcatggacagcaacccttacgccacccacatcatgcacggtggctcgacggctgctggcctcctcgacgatcatggccagatcttctccgccggcgcagggtacgacgacgacgacattcttgggcacggcttcggcttcgccgccggcaccgggtacgatcttgacccgcgcatggccaccgccgacgtttggccgatgaacacgctcaacaatattccaaacgatggcggcatcggcttccagctgcagaacgatctgaagtggatgcttccaggtggtagcaacgggagtaatttgcaaggcggctttcagatttag

SEQ ID NO: 12946 - DNA, 585 bp, Oryza sativa
  Clone ID: TFbOSC400481j.C1.o33.fg
atggtgcatccgctggggaggacgagtatggggcggcagcgcatcgagatccgccgcatcgacaacaaggaaaggcggcaggtcaccttcaccaagcggaggggcgggctgttcaagaaggcgtcggagctcgccctgctcaccggcgcgagcgtcgccgtcgttgtcttctcccctgccaagcacgtctacgccttcggccacccgtccgtcgacgccgttctccgctcatacgcctccgtccccggggaggccgccgcggtcgcacccgtccccgtccacggcggcagcggcggcgaggacgtcgacctcctcgggctgaggctggcggcagatgataccggggcgcaggtcgcggcggagcatgcgcggatgcgcgacgtcgcggcgaggatcgtgcaggcgaaggccgggaggcggttctggtgggaggccgacgtggacgcgctcggggaggccgagttgctggagttcttcacggcgctcaagaagctcagggacaacgtcggccgccacgccaacgccctgctcgccccccagccgccgccgcttccgctgcagcagaagcagcggcgccggcggtag

SEQ ID NO: 12947 - DNA, 723 bp, Oryza sativa
  Clone ID: TFbOSC401478j.C1.o9.fg
atggctcgcaataggatcatcctcaagaaggtcgctaaggattccactcggcgcctcacattcaagaagcggcgcaggggcttgatcaagaaggccggagagctggcctcgttgtgtggtattggcgtgtgtgtggtggtgtatggagagggcgaggtgaagccagaggtttggccttctgcccccgaggcacgagcaatcctctcccgcttcaactcggcgccgaacattgataggttcaagagggtgacgaaccaggagcagtacctccgaaagcgcatcgccaaggctcgggagcgcacgagcaaggcggacgatgtcaaccgtgagcgtgatgctaccatcatgctttatgaggccgccaccgataagcgcccagtggcagacctcaatgtccaggagctcaccaacctcggattggtgatcaatgagcgcatcaaccacctgaaggaacgcattgagcgccttggaggtgcggccctcatggcgccaccgccatcgacgcaaccgacggaggcatcatcatccttgccaccgctagtgccatacgccaatggtgctggcatggaagggaacaagaggatgaaggtgagcacgcatcagaaaggctggttcattaacatgagcaccatgacaggtgacgcagggacctctgccgacgttgaaggcaatactggtgttggcaccagcgctaggggtgacatgatgcatctttccaactag

SEQ ID NO: 12948 - DNA, 1440 bp, Oryza sativa
  Clone ID: TFbOSC400964j.C1.o68.fg
atgtctcgccggaagacatccatagccctcatcgcgaacccgcagacgcgcgctacgacctacaagaagcggaaggcggggctgatcaagaaggccggggagctcgccacgctgtgcgacatccccgtcgccgtcgtgtgcgccgggcccgacggcggcgcgccgaccgtgtgggtgtcgccggagggcggcgacgccatcgagaggtaccgcgcgctgccggcggagaagcgggcgaggcacacgcacgtggcttacctccaggaggagctcgacaaggagagggccaagctcgccaggctgcggcagaagggccgccccggcgagctcgacccgccggacgccgtgctggacgggatgtcccaggacgagctgcagcagctgctcgcgtccatcgacgccacgctgctggctacggccaagaggcgggaggcgctcgggttgctgcccggcgccgacgacgacgcggacggcggcggccggcggcgcgacgccgacgtcgccggaaccaactccgtcggcgtacacggctaccagcaccaggaggtgcatgcaccggcgacatgtgaccccttccatccgtacaacgccggcgtgacgctgatgcagccagggtacaacaacgcccagtacatgggcggccatggcgccgtggacatgagcggctaccagctgcagatgcagatgccgggcaatggcagcaacaaccacagccggctcgcgtggggaggcttccagccatgcaacgccaccttcgtccagcccgtgtacggcaacctccaatgctggtacaacaatgtcgtcgacggcaacggcgagccctgcgacgccatcgtgccatcagctggtgacccctacatggacatcgccggcaacgacgtctacggcaaccagatgcagccggcaccggcggccaacggcgggtggcacgatccgggcacgtggggctacgacggcggcgagccgtgcaaagccatcgtgccatcatttggtgacccctacatgggcattggcgtctacggcaaccaaatgcagccggcgccggcgccggcggccaacggctgctggcacaatccggccggcacatggggcaacgacggcgagccgtgcaacgccatcgtgccatcagctggtcacccctacatcgacatcgagtgcgacatcgacggcaactacatcgacacaaccgtgttcgattaccaaaccaccagcaccagcgacaacttcatggacgcgcccgtccagttcatcgccacgggcagtgacgagagcatcgtcacgaacgtggccggctgcgacgagacggagttctccattgacgatctcctccagtgctccgacgcctcccagcattcttccggcctcgaggagctgcattatctcagtgatctggccgatggcttcgactttggatgcaacttcgacgtgctattggactga

SEQ ID NO: 12949 - DNA, 650 bp, Oryza sativa
  Clone ID: TFbOSC19523j.C1.o1.hg
ccaatcgggtggggtgtcaaagacagaaaccaaaaggcagccagtcatcagagcggtcactgcggcacacgtcgtggggcgtggttggaggttcgctcaagtcgtggtcgtcctcgtcccggttggatggactagggggtgcaatgcaaatagcgtatggttacgggcggggaccaaaaaggaaagccgaggaggagagggaggggagagaagggagagggggtcggggagaaagaagagcgagcgagcagctttggctacggccaaaccctacagcgcctccaccaccactccttgccttttttggtgagtcgccctttgccgactctcagatccccttgcgttttaccacttttgccttgtccgccgcccctccaattgggataaaaaagaaaagagctgcatctctcgctgctcctcctcctcctcctccgccgtgcaggccgcagccgctcgtgtggttggttggttcatcggcgatcgaagatggtgcgggggaagacgcagatgaagcggatagagaaccccacgagccgccaggtcaccttctccaagcgccgcaacggcctgccaagaaggccttcgagctctccgtcctctgcgacgccgaggtcgcgctcatcgtcttctccccgcgcggcaagctttag

SEQ ID NO: 12950 - DNA, 423 bp, Oryza sativa
  Clone ID: TFbOSC404997j.C1.o3.fg
atggagggaggagggaggaggaggaagagggggaaggtggagctgcggcggatagaggaccggacgagccggcaggtgcgattctcgaagcggcggagcgggctgttcaagaaggcgtacgagctgtccgtgctctgcgacgcccaggtcgccctcctcgtcttctcccccgccggccgcctctacgagttcgcctcttccacctccagcattgatacaatttttggtcggtattgggaccttctggacacaacaattgatctcaatattgaagcaagggaatctcgggttgattgcaatatacaggtctggatacggagacaaatcgtccacggagggctagctcctttgttggttggagatgcagctcctccatttaggggtgttggtgtgggctcctcgcctagccctttgtatttatga

SEQ ID NO: 12951 - DNA, 570 bp, Oryza sativa
  Clone ID: TFbOSC401367j.C1.o24.fg
atggcggtgggtgaggtcctaacagaaaggcgacgtgaaacactgacaactgatctggtgttgattccaatttgtagacaagaacccaaaatatcttccattgttccagaggaggctgctgctggtgagtacttagccattatctctgcatcctatgtgacaaacagaaactggacagttttaccagtccaaacaaagcaagtttcagacttacagcaacaagaagcaaagctttgcaagcagagttacatcagagttacttgcattacatattctgagaccgatctgagctgcgggccatcgtcgatgacggagctgaccgcggcagcggcgccggctgggtcaggatcgtcggcggcggtggcggcggggagcagcgagaagatggggagggggaagatcgagataaagcggatcgagaacacgacgaaccggcaggtgaccttctgcaagcgccgcaatggcctcctgaagaaggcgtacgagctgtccgtcctctgcgacgccgaggttgccctcatcgtcttctccagccgcggccgcctctacgagtacgccaacaacaggtga

SEQ ID NO: 12952 - DNA, 495 bp, Oryza sativa
  Clone ID: TFbOSC900058j.C1.o28.fg
atggggagggggaagatagtgataaggaggatagacaactcgacgagcaggcaggtgacgttctcgaagcgtcggaacgggcttctgaagaaggcgaaggagctatccatcctctgcgatgcggaggtcggccttgtcgtcttctccagcaccggcaggctctatgagttctccagcaccaactgggcatggtgcactgctcacgctgaagaatatataccaactcctataactggagaactccagcaaactcccctcaaaggagctgaatatgcgcacaatatatgcgcacaatccgatagtacagaatcttctgaacttgaggttggcaagagctgcaagccacgcatgggccaaagggggcagattgctgcagtggccacactggtactcactcccgttactccactacttagcttctcacgttttcatgaaccacacacttcatcagcatctgagggcatcagggcaggccatcctcaagtttgcaaatga

SEQ ID NO: 12953 - DNA, 1158 bp, Oryza sativa
  Clone ID: TFbOSC422528j.C1.o3.fg
atggggagggtcaagctcaagataaagaagctggagaacagcagcggccgacatgtcacgtactcgaaacggaggtccgggatcctcaagaaagccaaggagctctccattttgtgcgacatccctctcatcctgctgatgttttcacccaacgacaagcccacgatttgcgttggcgatcacagcagcatagaggatgtcataacaaagtatgcacagcaaactcctcaggaaagggctaaaaggaagttggagagcttagaagccctaaagaagacattcaagaaactagatcatgatgtcaatattcaggactttttaggctcagggggtcagactgttgagatgctgattaagtcaattgtttggcaggaattatcgagccatcttggtgctttgcaatgtcaaatggcagatgtcgaaaagcgcctcagttattggagcgatcccgagaaggttgagaatattgaccatataagagcgatggagcaatctctcaaagaatctctgaatcgcatccggattcataaggagaactttgcaaagcagcatctgatgagcctacagtgtgcagctgctcagttccagaacgacatgaagctcccactaggactaacaggtgacccgaacacttcatcgtggttccatggcggcggcggcgcagaggcgcagcagccaatgatgctacctgaagaccccagcttgctccatcagagagacatcgggtgctcagcgagcacgtcgttgcagagctacccgggctacttcagcatgggcaagcagtccaccgacaacgccggcggcggcgagcagcaccaccacgcggcggtgcagcagcagccggagttcagccaggccgactgcctgacgtcgctgcagctcggcgcgcagttcccgtacccgtcggcgttcgacaacgccgggctgctcagcgaccggctgttcgacaacgcggcggcggcggcggcggcgatggacttcggcggccactacgacctgccgaggcccggcgacgaggccagcttccagaactgggcgtcggcggcctgcggcgccaccatgtatgatcatcagcagcagcagcagcaacagcagcagcctgcccaaattatgactgaatctctgacccccatcagctccctgcagcagcaactgtag

SEQ ID NO: 12954 - DNA, 1254 bp, Oryza sativa
  Clone ID: TFbOSC900368j.C1.o16.fg
atggacgcggtccgtccactccagccagccgatcgcgagtggccccccaacccgacaaaacctcctcgcctttcactcgctacatcgatttgccagccacgctacataaaccgtacaaaaccatatcctcccccatcgcctcgcctcgccgatcgatcgacggacgacggccggaacatagctgtagatcgagctgaatcgccggcggcggccatgggacgggtgaagctgcagatcaagaggatcgagaacatcccgaacaggcaggtgacgttctccaagcggcgaaacgggctgatcaagaaggcctacgagctgtccgtcctctgcgacatcgacatcgccctcctcatgttctccccctccggccgcctcagccacttctccggccgccgcaggatcgaggacgtgctcacaaggtacatcaatctcccagaaagtgacagaggagggtacgtaaacttcttcgacggaaaagtttcacaacgagattttaacctgaacctagcactcttcctcgtgtttgttcttaatctcggtgctcttgctgatccaggagcagtaaggcgccggttaactccaacattgaggatgtttgagccggacccggccaggtctgcatccatggaggacgtcgaggccagcgagaagttcatcgccggcatcctcagccgcgtcgaggagaggaagaggtatttgctgtgcagcatgggctcgttcgacgtgacggcgtcaacatctgccatgcagcatctgtatctaccgcagcagcatcagcacggggacatcactgataatgggtttggaagcgatgaggtggcctcgtgggtctctgaggggatgccgccgacaacctcgtcggtggcgtcgatattcgccggaacttcagattccatgatgtcttttagagatcaagcggtgtacgacacgatgagacaagatgcatgtgtggatcagacagtggtcccggagatggggatgtgccatgtggaccagcagaaccagagtgacgactggcaggcgtacacgtcggcggagttcctcaacgcgctaatcccgcccacgccgttccctctcgacgacgaggatacgatgggcccgatgttggcgtcatcaccgctattgatgcccggcatccatgaccagcagccgccggtggaggatatggcgacggcgggctgctcgcaagcgccggctaacgatggcaacgggttatacgcagctgaggacattgctccggttaacgttggttaa

SEQ ID NO: 12955 - DNA, 303 bp, Oryza sativa
  Clone ID: TFbOSC20924j.C1.o1.fg
atgcacatatacaaagagcaggaggctgaaccatccactggcctgatgatgccagaaccagcacctgctgcttcccccggctccggcagctcagagggctcaagcatcgaggacacagcggaccgtcaggtcaccttctgcaagcgctgcaacgggctactcaagaaggcgtatgagctctccatgctctgcgatgccgaggttgccctcatcgtcttctccagccgcggccgcctctacgagtactccaacaacaggtactgcattcctcttcctctcttcagttctagaaacctgaattaa

SEQ ID NO: 12956 - DNA, 459 bp, Oryza sativa
  Clone ID: TFbOSC21205j.C1.o5.gm
atgaccggcggccgcggctcctcccctccccagtggcgacgggagcggcgggcggtggatccggtgggcgggagggcgggcgaacgcacgggcgaggcccgcggctgtccctgcccggatccgacggcagcgttcctctcctgcccttccccgctcgagggcgacgacgacgaggcgggagcggcggcggcgaccacaatgacgacgatgacgacgacgaggagggagggctctcctctccctactttcgcgaggcgacgaccgggcgggtgcggcgaggcggcggcggcgagggccgacggcaaccggcccccacacgcccggatccggcggcggcggccgtccctcacggcggtgagggtcggcggcgggcgcgacgatgtcgacgacgagttgcggcggccggagtcgtcctactcctacccctacccctacccctgctgcagtgctataggctag

SEQ ID NO: 12957 - DNA, 456 bp, Oryza sativa
  Clone ID: TFbOSC21276j.C1.o6.gm
atgaccggcggccgcggctcctcccctccccagtggcgacgggagcgcgcgggcggtggatccggtgggcgggagggcgggcaacgacgggcggcccgcggctgtccctgcccggatccgacggcagcgttcctctcctgcccttccccgctcgagggcgacgacgacgaggcgggagcggcggcggcgaccacaatgacgacgatgacgacgacgaggagggagggctctcctctccctactttcgcgaggcgacgaccgggcgggtgcggcgaggcggcggcggcgagggccgacggcaaccggcccccacacgcccggatccggcggcggcggccgtccctcacggcggtgagggtcggcggcgggcgcgacgatgtcgacgacgagttgcggcggccggagtcgtcctactcctacccctacccctacccctgctgcagtgctataggctag

SEQ ID NO: 12958 - DNA, 828 bp, Oryza sativa
  Clone ID: TFbOSC101029j.C1.o5.gm
atggtgaagtgtagggcacgcacgactaggaaaaagattgagatcaagcgcggggacaagaaggtacgagatgcatgcttttccaagcgccacactaccatcttcaacaaggccaatgagctcgctatcctctgtggcgtgatggttgctgttgtttttgtctctcccaatgccaatggcgggattttctcatttggctacccatctgtcagctctgtggcaaatcgcttcctcgccaatgctccaaacaacaccagtgtgagtagctcaacccaaagcgggagggatgtggaaatccgtgaactagaacgtgaagaaagagagttgaaagagcatctacaagcttccacagatcagaataagcttctgcgggaggcaatagcagcaagggatggagggcaattgatgcttctcctgcagagtgattgtagtgagttgggaccaaaaggtctggtcagcgccctcatcatcacggcattacacatcgaggggagtagccatccatccggcactgcactgcagccactgccagtgttgggggaggagaagccgtggctcgagatctctctcccagcgccgcgccggcgctggccgtcgcacggctacacgctgccccctgcccccggtctcgcgtggcgcgtggcggcgtccgctctcccccgcgggccgtccgccgtcgcacccgcgcttcgtcacgcgaaacacaaggattctcccgtacgcgcgcggctcgtcgccggtggagtcgcggacggcaagaggcgcgacccgttcagtgcttcgcgtttccatatgccggaccggaccggcctgtggcccatatcttag

SEQ ID NO: 12959 - DNA, 828 bp, Oryza sativa; identical to SEQ ID NO: 12958
  Clone ID: TFbOSC900022j.C1.o4.gm

SEQ ID NO: 12960 - DNA, 417 bp, Oryza sativa
  Clone ID: TFbOSC900028j.C1.o26.fg
atggtgaagtgtagggcacgcacgactaggaaaaagattgagatcaagcgcggggacaagaaggtacgagatgcatgcttttccaagcgccacactaccatcttcaacaaggccaatgagctcgctatcctctgtggcgtgatggttgctgttgtttttgtctctcccaatgccaatggcgggattttctcatttggctacccatctgtcagctctgtggcaaatcgcttcctcgccaatgctccaaacaacaccagtgtgagtagctcaacccaaagcgggagggatgtggaaatccgtgaactagaacgtgaagaaagagagttgaaagagcatctacaagcttcaccctctatagctggctggctggctcggtcatcatccaaaatcgatttatggctctacttgactagataa

SEQ ID NO: 12961 - DNA, 249 bp, Oryza sativa
  Clone ID: TFbOSC422477j.C1.o6.fg
atggggagggggaaggtgcaggtgcggcggatcgagaacgaggtgagccggcaggtgaccttctccaagcggcggccggggctgctcaagaaggcccacgagatcgccgtcctctgcgacgtcgacgtcgccgccatcgtcttctccgccaagggcaacctcttccactacgcctcctcccacaccacaaatttgacaggagcactagatggtgctagggatgaaaacggagcggatacggacggataa

SEQ ID NO: 12962 - DNA, 975 bp, Oryza sativa
  Clone ID: TFbOSC400773j.C1.o108.fg
atgccgcgcgcgaagaccccgatgggcctcatcccgttcccgaagaagcgcgccgcgacgttcgcgaggaggaaggagaccgtgatgaaaatggcgaaggagctctcggtgctctgcgacgcccaagtcgcggtcgtcgtcggcaaccccggcggtggcgcggcggagaaggcggcgtgggagtcggaggagggcagggccaagctggccaaggtccgggaggaaggcgcgttcaagccgtgggacgacgcgctcgacggcatcgcggaggaggagacgcggaagctgcacaagtacctcagcgacaagatcgaggccgcgagggcgagaatggaggcgatgggtctgcagctgggcgacgtcgacgacaacggcgtgaacggcgacgacggcggcggactcgatctgcagcagcacgtcccgccgagcgcttccgacgccaaggagttcgagtccgtgcctgtcgtccatggcggccaatacatcggcagcagcagcggcggcgggggcggtgacatccagatgcagacgacgccggccgcagatggcatcagcttcgccgagcactttctcgtcgcgccgcgcgctcagcccctcgccttcagcaccgccggcgccgacttcatcaacgcaccgaacaacttcctcaccacgggcgtcagcgtcagcgactactcggtgcagagctcgggctacgggatcggaaaccagatcgacaacgccaagcaactcctctatcagatgcaaatgcaatacccagtcggtggcacgggtggcgccgagcccagcaacacgcagacgcagtccccggatttgcggagcttcagcaacgtcgtcggcgactactcgtacacggcggcgcagagctcggccaaccgcctcgatcagatgcatcacccagtcggtggccgtggcagcacgggtggcgccgccgccgatcccagcgacacgcagtccaagaatcgggggagctga

SEQ ID NO: 12963 - DNA, 239 bp, Oryza sativa
  unsure (1)..(239): unsure at all n locations
  Clone ID: TFbOSC32476j.C1.o2.gm
gtcaccttcaccaagcggcggggcnnnnnntcaagaaggcgtcggagctcgccctgctcgccggcgcgagcatcgccgtcgtcgtcttctccgagaccaaccttgcctacgccttcggtgacccatccgtcgacgccgtcctcctctcctacggccccgtccccggggaggatgctgagcccgcacccgtccacagcggcgggttaggcaaggacgtcgacctcgagatgctgaggtag

SEQ ID NO: 12964 - DNA, 717 bp, Oryza sativa
  Clone ID: TFbOSC420031j.C1.o3.fg
atgacaaagcggaagattgagatcaagcgcatcaagaatgaggaagcacgccaagtgtgtttctctaagcgtcgtcctagtgtgttcaagaaggccagcgagctctataccgtctgtggtgcagaggttgctatgcttgtcaaatctcctgctggtaaatttttctcctttggtgccccctctgtcggatttgttcttagccgcttccatgctactactacttctagaaaacactccagtatgggtgttacgatccaacatgataatagtgcaacaatcaaactacatgagttgaatcaacaacacatagagttgcaaaaccaactgcaagctcaaaatgagaaaatgaaagcgctacaagaggttgctaagaaggaaagtgggggaaaagtgatgggttggttgaatagcaaggttgaagatatatgccaagaagatttggaagagttcaagatggtgcttgagtctctaaagtacttgacgagggggataattaatcaactctttcagaattatgctatgttctctaatatgatgcgtgtgcagcattgtgtgaccgctttgcccaatcaacaattccttccgagcagtgaagatgtcaaaccgatgattcaccatgttcctagttcaagttatggatggaacacaagcatagatagcaaacctaattcaagtgatgctcatgttgttggggccaggaggtactttccgaagtga

SEQ ID NO: 12965 - DNA, 1014 bp, Oryza sativa
  Clone ID: TFbOSC413657j.C1.o13.fg
atggggagggtgaagctgccgatcaagaggatcgagaacacgacgaacaggcaggtgacgttctcgaagcggcggaacgggctgatcaagaaggcgtacgagctgtccgtgctctgcgacatcgacgtcgccctcctcatgttctccccctccggccgcctcagccacttctccggccgccgcggggtggaggacgtgattctccggtacatgaacctctcggagcacgacaggggagaagccatccagaatcgggaggagattcagcaagagatatattcttcccagcaacagctgcaaatcaccgaggaccgccttaggatgttcgagccagatcctgcggcgttcggcacatccagcgaggtcgacggatgcgagaagtatctcatggaattgctgacccgagtcgtcgaaaggaagaacaacttgttgagcagtcacatggcgccgttcgatgcaacgacagctgcgatgcagggtgcagatgggacgcagatgtacgtgagccaggcggacgggttggccacgttcggtggtgacgctgccatgtggggcccagatggaggcgcggatcctggccatccgatgttcagtgcatctgatccgttgatctacctcagggaccacgacgtgtacgacgccaactcacaggtggccgggctgcacggcggcgacccgtgcgcggccggcggcgccgcggcggcggcggccgcggtggggtgcgtcgacgacgacgtcgccggaggccacgccgccgccgccgacgcgtggaggcaggcgtacacctgcaccgagttgctctccacgctcatccccaccacgccgttccccctcatgccgcattgcctggggccggaggaccagtacctgtcgatggagcatggcatggtggcggcggcgcaggagccggtggaggcgtcgacggcgagctgctcctacgttcccagcgacgagaactccggcacgccggtcatggcgtacgacagcaacccgccgccggcgaacatcgcctga

SEQ ID NO: 12966 - DNA, 612 bp, Oryza sativa
  Clone ID: TFbOSC20977j.C1.o1.fg
gtaggccagccaagaggggaaaggaggaaagttcaggaggaagaaaaacaccaggggcaatatatagatggactctctccacagctaccaccactccatctcatctcatccttccccaaccattctcttctccttgaacacacccctctcttcctcattataatctcttctttgattagagaggaattagcaaacatgcacatatacaaagagcaggaggctgaaccatccactggcctgatgatgccagagccagcacctgttgcttcccccggctccggtggctcaggtggctcaggctcggtgggagctgagaagattgggagcaggggaaagattgagatcaagcgcatcgagaacacgacgaaccgtcaagtgaccttctgcaagcgccgcagcgggctactcaagaaggcgtatgagctctccgtgctctgcgatgccgaggtcgccctcgtcgtcttctccagccgtggccgcctctacgagtactccaacaacagaggtaaaaagtggtgtacacgagtgatgcacacattgatcattcatgattcttttgcatcatcttcttcaattggaggatgccccatcacgagtgctctgggcccctag

SEQ ID NO: 12967 - DNA, 300 bp, Oryza sativa
  Clone ID: TFbOSC401316j.C1.o12.fg
atggggaggggcaagatagtgatccggcggatcgacaactcgacgagccggcaggtgacgttctcgaagcggcgcaacgggatcttcaagaaggccaaggagctggccatcctgtgcgacgccgaggtcggcctcgtcatcttctccagcaccggccgcctctacgagtatgccagcaccagcatgaagtcagtgattgatcgatatgggcgagctaaggaggagcagcagcacgtcgcaaaccccaactcggagctgaaggagttttgtagcgtcttcatatatataacagagaactaa

SEQ ID NO: 12968 - DNA, 1224 bp, Oryza sativa
  Clone ID: TFbOSC400773j.C1.o107.fg
atggcgcgacgaaagatcccgataggcctcatcgcgcaccggcagaagcgcgccgcgacgtacgcgaagaggaaggagagcctgaggaagaaggcggaggagctctccacgctctgcggcgtccgcgtcgcgttcgtctgcgcgggccccgtcgtccccggcggcggcggcggcgcggcggggaaggaggaggtgtgggagtcggaggagggcgtcctcgcggagtaccgcgccctcccgccggaggctcgcgcgcagcacgcgcaccgggtgtacctcgaggaggaggtcggcaaggagagggccaagctcgccagggtgaggcaggacggcgcgttcccgtcgtgggacgccgcgctcgacggcatcacggcggacgaggcgcgggcgctgctcgagtccatcgacgcggcgagggcggccgcgaacgcgaggcgggaggcgctgggtctgccggacgacggcaacggcgtggacgatgacggcggactagatctgcagcagcagcaggagcacgtcccgccgggcggttctgacgccgtcgtcgtgcctgtcggccatggcgtcctccaatacaccggcagcggcggcggcaaccagatgcagacgacgccggccgcagatggcatcaactgcgccgacctgtacggcgccgttccgtgggatgacaccttccagccgcaggtgatgcgcaccggtgaccacttcgtgcccatggacggctacctgtggcaagccccgggcaatggctggcccgatctcgccacggggtgcaccaacgagtcgtgctcgtgcaacgccgccgccgccgcagccgccatgccagccatgtatccccccaccctagacaccgtccacggaagctttctcgccgcgccggctcaacccatacccatcgcattcagcaccagcaccgacttcatcgacgcgccgaacgacttcctcaccatgggcctgtgtggcggcttcaccaacgtcggcgactactcggcggcgcagcctcagagctcggccgatggaggattccagctcggtgacacgttcgccgccgagcccggcgacacgcaatcccagaattgggggagcttcatcaacgtcgtgagcgacgactcggcgcagtgcaactgcaacgccgcaatccatcttgatcagatgtattacctattcggtggcacgggcggcggcgagcccagcgacacgcagtcccggcattgggggagctga

SEQ ID NO: 12969 - DNA, 657 bp, Oryza sativa
  Clone ID: TFbOSC401113j.C1.o5.fg
atggtgaagggaaagggaagggctggcaggaaaaaggttgagatcaagcgcatcgaaaaaaaggatgcacgtgacgtttgcttctcgaagcgtcgccaaaccctatttaataaagctggtgagctttcattgctatgtaatgcaaatatagctgctgttgtgatttctcctgctggtaggggtttctcctttgcccatccctctgttgatgatgttgctgaccgcttggcctccatggccatgggcattcccaataaccattccttgggtggtgggtaccatgatagcggtgaggtgacaaacatagcgcaacagcagaaaattgaatatgtggagctccaaaagtcattggaaaagtcggaaaagaagaagagggttcaggaggcaatggagaaggagagggcaggacatcttatgcaatcactgacttctgaagttaatctcctggggcaggatgaattggaggagctgcacaacaaactctcagctctaccttacacttccattgcaaagttctaccaggtactgcaagatgcaaagggtactagaatgccattgccacagccacatattgaaatagcatgtcaatcacaatttctatttgaagagcaggctgtcacacccgcaaatgctgattttccgggatctagcacatga

SEQ ID NO: 12970 - DNA, 858 bp, Oryza sativa
  Clone ID: TFbOSC401196j.C1.o47.gm
atgcggcggatcgaggacacgacgaggcggcaggtgacgttctcgaagcggcggaaggggcttctgaagaaggcgtcggagctgtcggtgctgtgcgacgcggaggtggcgctgctcgtcttctccccgcgcggccgcttcttccacttcgcctccgctccctcgtacgccaccatcccgccctcctccttcttccctactactgcatggctacctccttgttgtcatcaaggagggccagctccttgccggcggtgggcgaccggttgcagcaacgctggggacggcggttgcagcggcgccggggacgatggtgatggggacggaagcgctaggacaccggcagtggaggggcggtgggcggttggacgaggcggcggtgctgcaggcaacgaagccaggacgccggcggtggaggtgtggttggcagagcatgggaagggcggcggcgctgcaggcgacggcgccagtacgccgacggacaccgatgatggaggcattgtgagcggaggacggggagggcggcggcgcggcgggcaacggcgccaggacgccggcggtggaggcgtggtgggcggacgatggggaggacggcggcacagcaagcgacggcgccaggacatccgcggtggtggcgtggtggtgaacgacggggaggacggcggtgcggcgggcgacggggtcaggatgtccgcggtggaggcctggtgggcggacgaagggaagggcggcggcgctgcgggcgacggcgccaagatgccggcgatggaggcatggtggggggcggagccaggacgccggcggtggagtcgtggtggccggatgacggggagggcggcacctggtcgccggcggtga

SEQ ID NO: 12971 - DNA, 921 bp, Oryza sativa
  Clone ID: TFbOSC401478j.C1.o10.fg
atggctcgcaagaagatcgtcctggaccgcatcgccaacgacgcgacgcggcgggcgacgttcaagaagcggcggcgcgggctgctgaagaaggcgagcgagctggcgacgctgtgcgacgtggacgcgtgcctggtggtgtacggggagggggacgcggagccagaggtgtggccgtcgacggaggtggccatgaacgtgctgcggcagttcagggcgctgccggagatggagcagtgcaagaagatgatgaaccaggaggacttcctccgcctccggatcggcaagctcaaggagcagctgcgcaagatggaccgcgacaaccacgagcgggagacgctcatcctcctccacgacgccctccagggacgcctcggcacctacgagtccctctccgtcgagcagctcaccagcgtcgactgcctcgccagcgccaggctcaaggtcatcaccgaccgcctcgtcgagatccgcgcccccaacgaggacggccaggtgctcgttcccccacctcctcctcccccgccggcgctccccgctcctcctccgcctccggcgccaatgcttcctctcgcgccgccgccgactcatgttactccggccatgccgctgtcttctatgccgccgccggcgttccacgggatgaaccaccaccaccaccagaaccacttcatcaaccatggcggcaacgaccagaacgcctggctcatgaacgtcgccaggaacggcggcgacctcggcgccctcgtctacagcgccttcgccagcagctcctcctccaacaccggtggcgccggcaccagcgccgccggcgccgccgccccgggccctgacatgatggatctcgccaacccggacatgccgggattcgggtgtccctgggacgacgattctgcggggccatctttccctcccatgtaa

SEQ ID NO: 12972 - DNA, 627 bp, Oryza sativa
  Clone ID: TFbOSC401721j.C1.o14.fg
atggcgatgcaggtggcggcgccgtcgcggaggaggccgagcttggggcggcagaagatcgagatccggcgcatcgagagcgaggaggcacgtcaggtgtgcttctccaagcgccgtgccggcttcttcaagaaggccagcgagctgtccattctgtgcagcgccgacgtggccgccgtcgtcttctcccccgccggcaaggcctactccttcggccacccctccgtggagtgcctcctggagcgattcctgccggactcgtcgtcgggagcggcggcgcgggtgcggcgaggagcgaataataatggtggtggtgggatggtcggggagctcaacaggcagtacggcgagctgcgcgcgatggtggaggcgcacaaggcgcggcgggagagggcggacgagaagatagagatggagcgcgcggcggggaggtggctgcccatggacgccgatgtgcgccgcatgtcgccggaggagctcatggctttcgggacgggcctcatggctgtgcaggctgccgtctccgcgcgcgccgaccagatgctgcgcgacgcgctcctcattggccgcaggccgcccaccaccaccaccgccggcttcggcttcttccacatgccacactactga

SEQ ID NO: 12973 - DNA, 627 bp, Oryza sativa
  Clone ID: TFbOSC900422j.C1.o13.fg
atggtgacggcggcagcggcgaggaggcggccgagcctggggcggcagaagatcgagatccggcgcatcgagagcgaggaggcacggcaggtgtgcttctccaagcgccgtgcgggcttcttcaagaaggccagcgagctgtccatcctgtgcagcgccgacgtggcggccgtcgtcttctcccccgccggcaaggcctactccttcggccacccgtcggtggagttcctcctggaccgcttcctctcgtcgtcgttgcccgcgacggccgggaaggaggaggggtcgtcggtctcggtggtggcggagctcaacaggcagtacggcgagctgcgcgcgatggtggacgcccacaaggcgcgccgggagagggcggagaagacgatggagaagcagcggcagcggcagcccgcggcgtggatggatccggaggcggaggtgggtcgcatggcgccggaggagctgatggccttagggacgaagctggtggccgtgcaaggtggcgtggcggcgcgcgcggaccagatgctgcgtgacgcgctgcttcttggccggaggccgaacaccaccaccaccaccaccaccagggcgccgcccggcttcttccacctgcacccgcacttctga

SEQ ID NO: 12974 - DNA, 1815 bp, Oryza sativa
  Clone ID: TFbOSC18908j.C1.o2.fg
atgccgaggagggcgaggaggaccggcgcggcgtacgtcgacgacgagagggagcgcgacatcaccttcttcaagcggcggaacgggctgttcaagtgcgccagcgacctctccatcctcaccggcgctagcgtcgccgtggtcatcgaggaccagaaccgcagcaagttccacgcggtcgggacgccgacggtgcaggccgtcgtcgacgccgccctctcaagcgacgtggaggaggcggcggctgaggcgcggccggtcgccgacgagcagctgatggagaggatcgcgccgctggagagggagctggcttggctgaagggtgaagctgccgagaaggatgagacgacgaaagcatccaaagctcggttcaagatggcccagaagaaggaggagaacgaagaggagggtgacacgaagaagaagaagctcttcttctccaaggccgacaagctcagctcagacgagatgaatgaactgttagctgagatgcttgagatcaagaaggaactcaacgtgcggctacccccgctacgtcgtcgcggtggcaagcggccaatccagggctctagcgtgccacctccaccgccgccgccgccaccaccgccgcagccggagcaacagctgcagctgccgcaatggccgaatctgtccggtcctcataaccagttgcttcctgtggcgccgccgccatttgtcgctgatcagccacctccacctccaccgccagcagcaggagggtctctctggatccctgagctgcctccacctccggtggaggggtcgccatgggctggtctgcttccgctgcgaccaccacggtttgccgggatggagccatcctttcttgaatcacagcaagctccgcctccggcacaggtcagcacacagctagcaccactacctctgatacgggaggaagctccattgctgcaggagccatttctgtttgctgatcaagcaccagtacttgctcctctgccggcgccattgcagatgcctgtggcagaaactcacttgccactgcaggctccattgctgcaggagccatttctattctctgatcatgcaccgacgcttgctcctctgccatcgccattgcagatgcctgtggctgaaactcacctgccactgcaagtgcaggctccgttcatgcaagaaccatttctgttttctgatcaggcaccagtgcttgctcctccgccgacgccattgcagatgccagtggaagctcacatgccactggaggctccatggatccaagaaccatttctcatgcctgatcaagcaccggtccatgctcctccaccaacgccattgctgatgccagtgggagctgatcacttcccactcgaggctccattgttccaagaatcacttataatggctgatcagaaatctgtgcatgctcttcctccacctccattgcagatgcctttggaagctcacctgccacctgcagcacaagagtataaccaagatctggccgtgcagcagcaaccccaagagtatgaaaactatgactacatgtttgagaacgtggggctctcacaggcacagccggtggccgctggcgccggcgacgcaggctttgcagctataggcaacgacgacaacccgttcggctaccaacagttggttgcctctcctctctatgatggacagatctacttcggctccggggttgataacatgggcgttcctcctgctggtgattttggtggtgttcctgaagctgctttgccggaagtcgagcatgcgtcttcgtccggttggggaaacaacattactggtgatgctggtgcatggttctga

SEQ ID NO: 12975 - DNA, 234 bp, Oryza sativa
  Clone ID: TFbOSC900209j.C1.o10.fg
atggttcgtgggaagaccgtcatcagcaggatcgagaacacgacgagccgccaggtgaccttctccaagaggaggagcgggctattcaagaaggccaaggagctggccatcctctgtgatgcccaggtcggcgtcctggtcttctcaagcactggccgtctctatgactactccaactccagtaattctcgcaatcttacctatgatcagttattgggggataccgtctgttaa

SEQ ID NO: 12976 - DNA, 1353 bp, Oryza sativa
  Clone ID: TFbOSC419793j.C1.o3.gm
atgacgctcatgtcagcgatgacatggctgccacgcaagatcgacgcccgcaagcacgggaacggcagttaccagcgaaccacgcaaccgaggggcggacggtcttcacctcgctcctgcgatcccgagggtggcgacggtgaacgaaggcggcgatggacggcgacgaacggcgcggctgaagatggaacaaatcggcttcacggtgacgacggtgctccgatggcttgcgtcttcgcggaggtggctgccgggcttctcctcactgctgcgatgccaacagtggatacggcgaggtccggcgaccacggagtcgacgatggatggttgctggaggcgtggcaaagaccgaaagcgtcggctctcacccttgcgaagccgagggaggcgacggcgcagggagggcacggcggccagtgggccgtgctgaggaggactatggaggcagcaagcggcgaagaggaggacggtggaggcagtggatatgaacggagaatcgtgctggccatagctcgtcagaaggtgaacctacagcggctcgccaactacacaattcgtcgggcgatgttcaagaagcggcaaaagagcctaatgaagaaggcaagcgagctctcgacgctatatggcgtggatgcatgcgttgtgatgtatgctgaaggcgaggcgcaacctatgatggtgtggccatcggtaccagaggcaaggcgtgtgatcgagcgcttcagggccttgccgcagaaggaccaatacgagaacacgactaacctggagggcttcctcaagcagcgcatcgccaatctccaagagaaggtggataaggcaaagcatgagaacgatgagctcgagacaaagctcctcctcctcaacagccttgactgctgcctccctagccttgtgggcctcacggtcaagcagattactagcctcaactcgatggtagaggaacgcctcaagaagctccgtgggaatggtctcctggcgacaccagtcccaaccagctcgaagaagaaaattatatgggatgtccggtacaacctcaaagcgaggtatgtcacggatgattctgccaagaatgggccgccgtcgcgccaatccaccgccatccccagcttcgccgccccgcaggcaagctcggccaccacactgctcctccattccatccccctagccgccctctccactatgaacccaagccgccaccaactctaccgcctccggccgctgttgggcgccactcctgaccacccctcgctgcgccacgccaccaatagcttcgtcgtctcgcaccgcaccttagccattgctcccccagacccaatcaccaccgaaaccctcccctccccatcaacgtga

SEQ ID NO: 12977 - DNA, 1143 bp, Oryza sativa
  Clone ID: TFbOSC102307j.C1.o3.fg
atggagagccaaatttgccaatttggtacctttctagaagtcaacaatcagcattcagcaactccaaaaggaaaaaccattccagttaaatgcacagactgcctcccaggagtggcttcccgctcgctcaccgtaatcccacttgaagttccacacgacgttcttctttctgcaagggaagccaaaactcaatacaatagcacatttgaacacaatctcagtgagaccaacttcgtaactggtacttacaatggagctcaccatgccaatgtgaaggatgtaccacctgacatttatgagacagaatttaggcatcaatttccaaggattgaaacttctttttcaatcattggagcacatttcctgtcaagtatggtgaggaggggtagaaggaaaggcgtgaggtacatcgaagaggatagagatcgcagcctcaccctcagcaagaggcgtgatgggctgttcaagcttgcaaatgacctctcccttctcactgatgcaagcgtcgcaatttgcctacatgacagcaataaggcacaattctttggggcaccatcggtgaaacctgttgtcgatgcttttgtatctgaggcagagccatttgccgatgaacaactgaaggccaagcttacgtcaatgcaaagtgagctggtccagctagagaatgaagaagaagagaaggacaagaagactgaagaatcaatccagcgcttcaaggaggcccaagaagagagcttaggtatgggtatggccaagcatctattctccaggctagaggatctcagccacgatgatatgcgtgaacttttagatgtactcttgccgctccagcaagaattcaagaagcggctgcctcccctacgtcgtgggcagcaaagcctgcccaaaaatttggggttgggggaatttccaaaaaagccacccgctgaagtgcaagcatgcactcccgtagagcaacctcaaaatgacaatgcagtccataccccaaccttcagcgacagtttccttttggagttgttggctgatgtcagcgatgatggcattgctactgctgaaccattgtgttctcctcctattgatgaccagtttttggctgacatcgactggcttgctgaattggacactatcgatggaaatttatag

SEQ ID NO: 12978 - DNA, 1449 bp, Oryza sativa
  Clone ID: TFbOSC400618j.C1.o20.fg
atggagagccaaatttgccaatttggtacctttctagaagtcaacaatcagcattcagcaactccaaaaggaaaaaccattccagttaaatgcacagactgcctcccaggagtggcttcccgctcgctcaccgtaatcccacttgaagttccacacgacgttcttctttctgcaagggaagccaaaactcaatacaatagcacatttgaacacaatctcagtgagaccaacttcgtaactggtacttacaatggagctcaccatgccaatgtgaaggatgtaccacctgacatttatgagacagaatttaggcatcaatttccaaggattgaaacttctttttcaatcattggagcacatttcctgtcaagtatggtgaggaggggtagaaggaaaggcgtgaggtacatcgaagaggatagagatcgcagcctcaccctcagcaagaggcgtgatgggctgttcaagcttgcaaatgacctctcccttctcactgatgcaagcgtcgcaatttgcctacatgacagcaataaggcacaattctttggggcaccatcggtgaaacctgttgtcgatgcttttgtatctgaggcagagccatttgccgatgaacaactgaaggccaagcttacgtcaatgcaaagtgagctggtccagctagagaatgaagaagaagagaaggacaagaagactgaagaatcaatccagcgcttcaaggaggcccaagaagagagcttaggtatgggtatggccaagcatctattctccaggctagaggatctcagccacgatgatatgcgtgaacttttagatgtactcttgccgctccagcaagatttcaagaagcggctgcctcccctacgtcgtggcagcaagctgcaaattggtggatcaagtgcgtgggcacatcagcagccctcgtgttctcgcttcttggcctcacaccgtccattcactccattacttcctggagggacatcaggagttccgatgatacctccgcctccagtgccgggctcaccatggtctcagatatttccgctacggccaccactgtttccttctccagagttagtgccatcccaacaattaccaccagtatcaccgccgcagaacacagtggcacctcctccaatgcatgctccattggtgcaacagccacttactaatcaatcatcggcggttcccctgctgacgcaatggcaaatgcgttttggggatcagccacccgctgaagtgcaagcatgcactcccgtagagcaacctcagaatgacaatgcagtccataccccaaccttcagcgacagtttccttttggagttgttggctgatgtcagcgatgatggcattgctactgctgaaccattgtgttctcctcctattgatgaccagtttttggctgacatcgactggcttgctgaattggacactatcgatggaaatttatag

SEQ ID NO: 12979 - DNA, 720 bp, Oryza sativa
  Clone ID: TFbOSC900043j.C1.o3.fg
atggcggcggcggaggcggcggcggaggcggcggcggcgctggaggggagcgagcccgtggacctggtcaagcacccctccggcatcatccccacgctccagtttagcttggggggttactacatgtttgaggttctgatttgcttgattgatgaaaaaggggggcgatctgagatccgcgagtccgaaaaagtcgagcatgcttatattgctgcttgtcatagtgtacctgcttccatgtgttctcacaaaaacatcgtgtcgacggtcaatttggattgcaaattagacctcaaagctatagctttgcaagcacgcaatgcagaatataatccaaagcgttttgctgcagttatcatgagaataagagaaccgaaaactacagctctgatatttgcatcgggtaaaatggtatgtactggggcaaagagcgaacaacaatcaaagcttgcagcaagaaagtatgctcgtattatccaaaagcttggctttgctgctaagtttaaggacttcaagattcagaacattgttggttcttgtgatgttaaatttccaatcaggctggagggacttgcatattctcatggtgctttctcaagttatgagcctgaactctttcctggtctgatatatcggatgaagcaaccgaagattgttcttctgatttttgtttcaggcaagattgttttgaccggagcaaaggtatgcagtgtgtggtag

SEQ ID NO: 12980 - DNA, 726 bp, Oryza sativa
  Clone ID: TFbOSC423203j.C1.o9.fg
atggcggcggcggaggcggcggcggaggcggcggcggcgctggaggggagcgagcccgtggacctggtcaagcacccctccggcatcatccccacgctccagtttagcttggggggttactacatgtttgaggttctgatttgcttgattgatgaaaaaggggggcgatctgagatccgcgagtccgaaaaagtcgagcatgcttatattgctgcttgtcatagtgtacctgcttccatgtgttctcacaaaaacatcgtgtcgacggtcaatttggattgcaaattagacctcaaagctatagctttgcaagcacgcaatgcagaatataatccaaagcgttttgctgcagttatcatgagaataagagaaccgaaaactacagctctgatatttgcatcgggtaaaatggtatggtatgtactgggggcaaagagcgaacaacaatcaaagcttgcagcaagaaagtatgctcgtattatccaaaagcttggctttgctgctaagtttaaggacttcaagattcagaacattgttggttcttgtgatgttaaatttccaatcaggctggagggacttgcatattctcatggtgctttctcaagttatgagcctgaactctttcctggtctgatatatcggatgaagcaaccgaagattgttcttctgatttttgtttcaggcaagattgttttgaccggagcaaaggtatgcagtgtgtggtag

SEQ ID NO: 12981 - DNA, 675 bp, Oryza sativa
  Clone ID: TFbOSC400049j.C1.o46.fg
atggctgccgcggcggtggatccgatggcgctggggctggggacgagcggaggaggaggaggaggcgagtcggcggtggggggtgatggggcggagccggtggatctcgtcgagcacccctccgggatcgtccccaccctccagaacattgtttcgacagtaaatctggactgcaggttggatctgaaaaaaatcgctctacaggctcgtaatgcagagtacaacccaaagcgttttgctgcagttatcatgaggataagggacccaaagacaacagccctgatatttgcttcgggaaagatggtttgcactggagcaaagagcgaagaccattcaaagcttgctgcgaggaagtatgcgcgaatcgtccaaaagcttggcttcccagcaaagttcaaggatttcaagatccagaacattgttggttcatgtgatgtcaaatttcctattcgcctggagggccttgcttattctcatggcgcattctctagttatgagccagagctcttccctgggctgatttaccggatgaagcagccaaagattgtgcttctcatttttgtctctggcaagattgttctcactggagctaagtaccgcaaagagatttacgctgcctttgagaacatgttcccggtgctcactgaatacaggaaaactcagcagcgctggtaa

SEQ ID NO: 12982 - DNA, 780 bp, Oryza sativa
  Clone ID: TFbOSC900102j.C1.o17.fg
atgcggcagcggcgacacgggagaagaggagggaaggcggcggcaggagcacgaggtgctaaagcagcctccattaaaatcgagcagacgaagccgaggcggatttcgcaagagctagcgcaagcgtcggccatggaggaggtcgtcgtcggcaaggagcgcaagcgcccgcgctgcgcgctcgtcggcgtcggcggccacgacagcgacgtggcggatgagcccggtggcgtgcgggcgagaaggacaagcacagcaagactgtcggtgccaacgtccatcgcgttctacgacatccaggaccgcctcggcgtcaaccgaccaagcaagtccatcgagtggctcatctgcgccgctctcgtcgctcgactcctccttcgtcctccccaacgccgcccagctcctcacccgcggaggccgtcgagcgggcagccttcggaggaacaggcgcgcacgaggaaggctacggtggcggtgtcacctgggaagtcgggggagaagaggcggaagacgaggtcggggtgtgcagcgcggaaggcggagcgcatcgcgaagttgagagtgtggagggaggggtggatgccgaggcgcgaggcgagcacctcggcgacgtcgggcggccagagctggatcaggaagccgtcgacgccagggagcggcgactcgtgctcgtgctccgatgcgaagccggggaagcggcggtgggcggagaaggccggggaggtggtggcgcgggaagccgatggcgcggagcggggtggtggcggacgacgacgatga

SEQ ID NO: 12983 - DNA, 1089 bp, Oryza sativa
  Clone ID: TFbOSC400226j.C1.o13.fg
atggcggctactacgacgggacgagttgttgcactcggcgcggtggccgtggtggtggcgctgacattcctcgccggcggcgcggacgccgactgctacgacttctgcttcaaggactgcatggccagggagaacaacatggtcgactactgcagctacgcctgcgacaagacgtgccagccggacaagcccacgctgtactcgtcgtcgtcgtcgtcccgcctcgccggcgacatggagtgccaactctcctgcgccttgggctcctgccaccgcctccttccggacggcaagggcgccgtggaggcctgcttcgggcagtgctacgacggctgcaagaccacggcggcggccagactgccgaggcctctccgcgccggccactacgtgctctctagtccccctgatgacgtagaccatgatccggaccaccgctacgtgttctctagcccccatgatgacgtagaccatgatccggaccaagtgttcgctagtccacctgacgacatagaccgccatgtattcgctgctcctcctgatgttctcgctgctcttcctgtggttttgctgacgtggcatcctagtcatcgaaaaaaattaaaaaaaatacatgagggcccacatctaacgcgggagctcggccacaagtccgacggtgaaaccgtccagtggctgctccagcaggcggagccggcaatcgtcactgccatggggacgggtgtcggcgctgacatccgtcgcaccctccctcccttccccaaactgcgccctctccaggttgcaccaccaccaccaccacatgtgggctgccgccgcggcgttcgccggtgccacatcgggttcgcgaccatgttcgccgcccacgtggcggcggccatgccggggctagagctaggacactcacaggacggccacattggcgtgctcttcgcccggtcgctcagccagttctaccaccaggtcggcggcgccagtgccactggtcaactgccacacccgcaccaccatcaccaacaccatcaacagcagcaggaggacggggaggatgaccgcgatgacggcgagtccgatgaggagtccgggcagtag

SEQ ID NO: 12984 - DNA, 837 bp, Oryza sativa
  Clone ID: TFbOSC100867j.C1.o5.gm
ttctacgacctccaggaccgcctcggcttcgaccagccgagcaaggccatcgagtggctcatcaacgccgcctcccccgccatcgacaccctcccgtccctcgaccccgccgccttcgccgccattccccacgccgccgccgacgccgcgcccacgcggcggcgttcgcagcagcagcagcagcagctcagcaacaagtccggatgcagtagcacgtcggagaccagcaaggggtcggacaaggaggtcaccgtggcgagcgccccggcgcaggccgcgtcgttcactgagctgctcattgctggggtggcggcgtcgtcggcggggggtggcgccattggcaacggcgccgactgcgtgggcatcgcgcaccccgggaaaggaggcgcggagggggcgtccacgtacggcttctccgccgcctcgagcttcggcgacgcgccaccgatcggcatggtgccggcgccgccgttcaacttctccgcccccggcgccgacatggcggcgcactactcgctcgcccaggaccagctggcggcgcctccgcctcctgccggaggcgactacaacctcaacttctccatgtcctcgggtttcttgggtgccaatagggggacccttcagtccaattcgccgtcgaacatgtccggccaccaccaccaccaccatcagcagcagctccagaggctggacggctccaccatttccttcctgcttggccacgccgccgcggcggcgcacccggcggcgtccgagggccagatcaccagcaccgccgcgttgcagctgtgggatggattccgccactccggcatgaaggagaagagcaagaactga

SEQ ID NO: 12985 - DNA, 485 bp, Oryza sativa
  Clone ID: TFbOSC401000j.C1.o10.np
agagcacggccaggggaggcgccggaggtgcgtgaggtgtggggaccgtcggaggatgcggcgggtgcacgccgcgagggagaggatccgctgtcagtagcagtagatgcaggtggtagcggtggcggtggaggagaggaggatctgacgcgggagctcagccacaagtctgacggcgataccgtccagtggctgctccagcaggcggagccggcaatcgtcgccgccacggggacggggaccataccggtgtcggcgctgacatccgtcgcaccatgccagggctagagctaggactctcataggacggccacatcggcgtgctcgccgcacagtcgctcagccagttctaccaccaggtcggcggcgccggtgccaccggtcaactgccgcacccgcaccaccatcaccaacaccatcagcagcagcaggaggaccgggaggatgagcgcgacgacggcgagtccgatgaggagtccgggcag

SEQ ID NO: 12986 - DNA, 757 bp, Oryza sativa
  Clone ID: TFbOSC401539j.C1.o115.gp
cggggagctcgtcgatggcggccttggcgttgcgcatgagccagtcgacggccttgctgggccggtcgtagccgaggcggtcctgcacgtcgtagaaccggatggcggtgtgcgcggcgaggcggacgcgccggtcccgcagcccgcgcgccgtgcacaccttgctgtgccggtccttgcgcccggccgcggaccgcacgatgcggcctgccccgaatgcagtggccagcgcttcgacgggcgtcgactcgccgctgctgccgccgccatcgccgccgccgcctccacctcccggcccccggctcgccggctgcctgatccggtgttgcaggaagctgccgaatccctgctgctgctggtagatctgaagctgctcatgcgcttgctgcgccctctccttctcctggagcaggtagtgcaaggtgctcgcgctggcggtagggttgctcgtccaagggtctaagcccttggacaactggttcttgtcttcctccagcttgagctccctctcacccacagttaaccggaaaggagaagagcgaaaattaaaacaagaagctaaattctattcctgcatggggtttgccaagctcagctcagctcagctcagctcgccatcctgatgagagggaaaaaagatacagtggccatgggaaccccacagctccatgggcagagcaagcacgcacacacacagtcgcagcagcttaatagctatagcggcgcccagtgcagccgcccggccggcctctctttt

SEQ ID NO: 12987 - DNA, 711 bp, Oryza sativa
  Clone ID: TFbOSC401978j.C1.o39.gm
atgacgaccaggccagacggcggcggtggcggtggcggcgctccggacaagcagctcgtcccggcctccaacgccaatggcaccgccctcgccgttcgcaagcctccctccaaggaccgccacagcaaggtcgacggccgcggccgccgcatccgcatgcccatcatctgcgccgcccgcgtcttccagctcacccgcgagctcggccacaagtccgacggccagaccatcgagtggctcctccgccaggccgagccctccatcatcgccgccaccggcaccggcaccaccccggcctccttctccacctcctccccttcctccctccgctccaactccacctccaactccaacgacctcctcctcccccgcgccgcccccttcatcctcggcaagcgcctccgtgccgccgacgaccacaccacttcgcccgcgcccgctcccgacgccaccgcccccacccaggccttctgggcgctcccggccagggctgacttcggccagctctggagcttcgccgccgcgccggagatgatggtcgccgccgccgccgcacccgccatgcctggggaggcgtccgccgccagggtcggcaactacctccccatggcgcagggcaacctcaaccttctcgcctccttctccggcggcccaggaggcgccggggccacggcggcgaccggccgacccgaggaggagagcgcccgctga

SEQ ID NO: 12988 - DNA, 1227 bp, Oryza sativa
  Clone ID: TFbOSC900102j.C1.o14.fg
atggacgtcgccggagacgccggaggtggccgccgcccaaacttccccttgcagcttcttgagaagaaggaggagcagccgtgctccagctcggctgcaggaggtggtactgggccatcatcggcgggtggcaacgggaacaatggatcgggaccgggcggtgccggaggggagatgcagctgcggaaggcggcgccgaagcggagctccaccaaggaccggcacaccaaggtggaagggagggggcggcgcatccggatgccggcgctgtgcgcggcgagggtgttccagctgacgcgggagctggggcacaagacggacggcgagaccatcgagtggctgctgcagcaggcggagccggcggtgatcgcggccaccggcaccggcaccatcccggccaacttcacctcgctcaatatctccctccgctcctccggatcgtcgctgtccgccccggcgcacctccgcgcgttacctagccccgccgccgccgcccggttcggatcccgtgcggacgcgtgggaccgggttgtcagcctcgggttcccgtccgagggccccgcctcgtcgtcctcgtcgccgtccccgcttctgttgaacttccactcgggcagcgtcggtctcgatgtgcaaccttcgccttccgccgctgccgccgccgccgacctctccaggaagcggcgctgggagcaggaaatgcagcagcagcaacagcaacaacagcagcagcagcagcagcagcagcaacagtaccagcagcagatggccgggtacacgcagagccaaatgccgggcaccgtgtggatggtgccgagcaacagcacgcaaggaggtgggccgtccggtggtggcggtggcggcggaggaggcagcggggagtccatttggacgttcccgcagatgagcagcgccgccgcggccgccgccgtgtaccgggggagcgttccgagcgggctacatttcatgaacttccctgcaccgatggcgctcctaccgggacagcagctggggctcggcccagttggaggcggcggtggcggtggaggaggcggggaggggcacatggggatccttgccgccctcaatgcttaccggacacaggcggcgacggatgccgccggtcagcaaggcggaggaggaggtggaggaggatctagccagcagcaacacggaggcggcggcggcggcggcgagcggcatcagagcataagcaccagcgactcgtag

SEQ ID NO: 12989 - DNA, 981 bp, Oryza sativa
  Clone ID: TFbOSC900234j.C1.o8.fg
atgggcgcgggctggcagtggccggccggcggtggcgggatggaggcggccgggcgcgggctggcggcagccaggtctaatcatgagcagctcaagatgacaagcaataacagcacgaatgaggagctcggcggcggcggcaggaaggcggccgacaagccgagcggcggcggcggcgccgccgccgccgtggcgagctcgcggcactggtcggcgtcgacggagtcgcggatcgtgcgcgtgtcgagggtgttcggcggcaaggaccgtcacagcaaggtgaggacggtgaaggggctccgcgaccggcgggtgcggctgtcggtgccgacggcgatccagctctacgacctgcaggaccggctggggctcagccagccgagcaaggtggtcgactggctgatcaacgccgcccaggccgagatcgacaagcttccgccgctccagttcccgccgcacgaccacgacctcgtcgccgccgccgcctcgtccatggcgccgccgccgttcgcgaacggaggcgacggccaccacggcgcctccgcgtcgtcgatgctggaggacggcgacaaggccgccggcggcggcggcatgaaggcgttcatgagcctgagcaactccctcggcctgctcaacgccgccaccatgccggcgacgttggccgctcaccaccaccaccatcatcacgccgcggcgtactacgccgccgccgaatcttggggcaacggcggcaatggtggccaccaccatgatgtcagccatggcgtctcgccttcggctcacaactcgccgttcccgtcgctgctgtccttggcaccgggctctcatcatcagttcgtcttctactcgccggaaggcggcggattcgccgtgaaagaggctgcagccgagcagtttcctgtagatagcctcgaccactcgcaagggcagctcacactgagctcagcaagaagcttccttcactctggaagccagggatga

SEQ ID NO: 12990 - DNA, 1374 bp, Oryza sativa
  Clone ID: TFbOSC401539j.C1.o92.fg
atgtcgggatttactaacaaagatggcaggcagaatttagcttcttgttttaattttcgctcttctcctttccggttaactgtgggtgagagggagctcaagctggaggaagacaagaaccagttgtccaagggcttagacccttggacgagcaaccctaccgccagcgcgagcaccttgcactacctgctccaggagaaggagagggcgcagcaagcgcatgagcagcttcagatctaccagcagcagcagggattcggcagcttcctgcaacaccggatcaggcagccggcgagccgggggccgggaggtggaggcggcggcggcgatggcggcggcagcagcggcgagtcgacgcccgtcgaagcgctggccactgcattcggggcaggccgcatcgtgcggtccgcggccgggcgcaaggaccggcacagcaaggtgtgcacggcgcgcgggctgcgggaccggcgcgtccgcctcgccgcgcacaccgccatccggttctacgacgtgcaggaccgcctcggctacgaccggcccagcaaggccgtcgactggctcatgcgcaacgccaaggccgccatcgacgagctccccgaccgcgccgaggccccgccgccgcccgccgcggcgtcgacggagcagcccgaggccaccgagcaggcgacctcgacgtcctacgggttcggcaacactaccggcggcaccatgaccagcgccgcgtcggccgctgctggctccttccttccacattcgctgggggcagatcgagtctccgacagcgtcaagtccctgttcccctcctcgtccacagccagcggcgccgcctccgccggacacgacgagtacaggggatccccgccggacctcctgtcgcgcacgacaagcaaccagcagccgcaggagctgtgcctcaccctacagtcgaaccagcaccagatcttcagccatgtctcgtcgaaccaccacggtatgatctcgagtgcaggcgttccaggttggcccgaccacagccagagaatgcaggcatggcatgccccggagaacagcacaggagacggccgcggcggcggcaatggcgacggctacatgttcgccatgccgtcgcggcaagggctggaccagagccagctcttctcgcatggggaaccccttcagtccagcggtcgcgggtgggcgtcagcccgcgcatggctagaccccctcgcagtcgcagccatccaccaccagccgtcgacaatggctgccggacaggtcggcttcggccatctcgttggcggcgccggtggcggcggcgggtttatggggtttctcgcgccggcggcgcagcggcttgagggcgaggaggagcacggaagtgaggtgatcaggtga

SEQ ID NO: 12991 - DNA, 423 bp, Oryza sativa
  Clone ID: TFbOSC2212j.C1.o2.gp
gccgccgcgacgtggtacttatcgtcgtcggcgtggtggtggtggccgtggtggtgcatcagcggcatggccgacggcaggtggtggtggtgtcccatgcagaggtggtcctgcggcgggaactgcagcggcggcagcttgtcgatctcgtggcgcgccgcgttgagcagccagtccaccaccttgctgggctggttgagccccagccggtcctgcaggtcgtacagctggatcgccgtcggcaccgacagccgcacccgccggtcgcgcagccccttcaccgtcttcaccttgctgtgccggtccttgccgccgaacacccgcgacacgcgcacgatccgcgactccgtctgcgccgaccattgccgcgacgtcgccaccgccgccgtgtgcttcctcgctagctccgccgcctcctcctcc

SEQ ID NO: 12992 - DNA, 924 bp, Oryza sativa
  Clone ID: TFbOSC401539j.C1.o32.fg
atgatactaggaagcaaccaagcggccgccgccgcggctgcggcagctgcggcggaggaggaggcggcggagctagcgaggaagcacacggcggcggtggcgacgtcgcggcaatggtcggcgcagacggagtcgcggatcgtgcgcgtgtcgcgggtgttcggcggcaaggaccggcacagcaaggtgaagacggtgaaggggctgcgcgaccggcgggtgcggctgtcggtgccgacggcgatccagctgtacgacctgcaggaccggctggggctcaaccagcccagcaaggtggtggactggctgctcaacgcggcgcgccacgagatcgacaagctgccgccgctgcagttcccgccgcaggaccacctctgcatgggacaccaccaccacctgccgtcggccatgccgctgatgcaccaccacggccaccaccaccacgccgacgacgataagtaccacgtcgcggcggcggcggccgcgctggccgcggagaaggaggcggcggcggccggcggcggaggaggaggagggggagacgacgtcgacggcgggggcggcggcggagcggcgcacatagtggggaggttccccgccggtggctaccaccggttcatggggctgaacaacccgctggggatggtcaacagcgccgccggcgccgccatgccgttccactacgccggtgagtcatggaataatggcagcgtgcaagacagcggcgccggctcgccgcaggtggccgccgccgcggctcaccacacctcgccgttcccttcactgctttccttggctccagggccgcatcatcagctggtgttctactcctccgaggccgagcagttcacagtagacaaccttggctcgcagggcttgtccctgagctcggcgagagctttccatgatcagacaggaagctaa

SEQ ID NO: 12993 - DNA, 621 bp, Oryza sativa
  Clone ID: TFbOSC400220j.C1.o52.fg
atggcctcccgcgacgccgccaccttccaggtctaccggcccatggcaatgccaacgccggcggcgctgccaccgtcgtcccagcagatcacaatgccgttcacggcggcgctcgtggacgccgtgctcccagctccccgaaaggcggcggcgacgcagggcggcaaggaccggcacagcaaggtgaacgggcgcggccggcgcgtgcgcatgccgatcgtctgcgcggcgcgcgtgttccagctcacccgcgagctggggctcaagtccgacggccagaccatcgagtggctgctccggcaggccgagccgtccatcctcgccgccaccggctccggcaccaccccggccgtcttctcctgctcgtccgccccctccaccgcctcctcctccttcctcctcggcaagcgcccgcgccaggaggaccacgaggcgccgacgttctgggaggcgctgcagcaacagccgcggcccgccgtgtcgtcgtggggtgccctcgtctcgccgtcgcaggaggcgcaggcgtacgcgtcgtcggtggcgcaggtccaccacctcaacctactctccgcgctctccggcgccgccacgagacggccagcacaggaggagtcccggtga

SEQ ID NO: 12994 - DNA, 1014 bp, Oryza sativa
  Clone ID: TFbOSC401583j.C1.o12.fg
atggaccccaaattccccccacccccaccgctaaacaaaacggagcccaccaccaccaccaccaaccagcagcatcaccacgatgagcagcagcagcagcatcgcctccagattcaagttcatcctcagcagcaggagcagcaggatggaggtggaggaggagggaaggatcagcagcagcagcagcagatgcaggtggtggttgcggcggcggcgggggagaggaggatgcaggggctagggccgaagcggagctcgaacaaggaccgccacaccaaggtggacgggcgggggcggcggatccggatgccggcgctgtgcgccgcccggatcttccagctcacgcgggagctcggccacaagtccgacggcgagaccgtccagtggctgctccagcaggcggagccggccatcgtcgccgccacggggaccgggaccatcccggcgtccgcgctcgcctccgtcgccccctccctcccttcccccaactccgccctctccaggtcgcaccaccaccaccaccacatgtgggcggcagcgccgcccacggcgtccgccgggttcgccggtgcagggttctccggcgccgactccggggtgatcggcgggatcatgcagcggatggggatccccgccgggatcgagctccagggcgggggagcgggggggttggggggtgggggtggcggcggcggtggccacatcgggttcgcgcccatgttcgccagccacgcggcggcggcggcggccatgccggggctagagctagggctctcgcaggacggccacatcggcgtgctcgccgcgcagtcgctcagccagttctaccaccaggtgtataatagccgagagctggatggactggatcatcgctgtcgagtgagtgctttatttgttattgcaggtcgttgtgtagatattcaggtctctagccactactggtatatcaacagaagttgtgaggagatgccagttaagtgtagtgttagggagaacctttaccatctcatctaa

SEQ ID NO: 12995 - DNA, 981 bp, Oryza sativa
  Clone ID: TFbOSC401091j.C1.o11.gm
atggcagatgcttctcgacttctggcgagtgagattgagatgataatgatattagttcaaggtggaatgggtatggttgcagcttcactaatgatacctccttaccctaacaacaaccttcaccatcaccaccaccattgcagctcaaaccaagaaccacacttaccattacatccaccagctttcctcatgtccgcgccgtcgtcgtcgtcgtcgccgtcgacgctggacgagtacgacgcgcgcttcttcttccccggcgccgacgcgtacaccgccggccaccggcaggatgaggagacgctggaggccgtgctgcggcagccggtgacgacgacggccgcggcggcggcggcggtggagggaggtggcggcggtggaggaggaggcgccgggggatcccccgcggcggcggcggcggcgacgcggaggcggccgttccggacggaccggcacagcaagatccgcacggcgcagggcgtgcgggaccggcggatgcggctgtccgtcggcgtcgcgcgcgacttcttcgcgctgcaggacaagctcggcttcgacaaggccagcaggacggtggagtggctgctcacccagtccaagcacgccatcaaccgcctcacccttcccgactccgccgacgcggcggcggcgcccgcgttcgccgccgctccaccgccggcggatcagcattcctcggccatggccgccgccgcagcatcggctgcgaaggagaaaggggaggcgagctcgtcgagcaccaccaatgcgtcgtcggcgcgggcgagaaacagagaccacgacggatcatcgccggtggcgcccatggacgagcgcgggcgccgcggtgtcgagctcgactggacggcggcggcggcggcgagcaccgagcagccgatggacggattggagtactacttccaatactacaatcatctggaggagataatgagctgcgacccaacgacgacaacggatgagtaa

SEQ ID NO: 12996 - DNA, 426 bp, Oryza sativa
  Clone ID: TFbOSC935j.C1.o4.fg
atggcagcagcatggcggacgagccgggtggcgtgcgtggtggcgggcgagaaggacaagcacagcaaggtggtgacgtcgcgggggctccgcgaccgctgcgtcaggctatcggtgccgatggccatcgcgttctacgacatccaggaccgcctcggcgtcgaccaaccaagcaaggccatcgagtggcacatccgcgccgccgccgccgccatcgacgcgttcctgtcgctcgactgctctctcgtcctccccaacgccgcccagctcctcacccgctggaggcggaggccgtcgagcgggcagccttcggaggagcaagcacgcacgaggaaggctacggtggcggcgtcgcctaggaagtcggggaagaagaggcggaagacgaggtcggggtgcgcggcgcggagcgcatcgcgaagttga

SEQ ID NO: 12997 - DNA, 1260 bp, Oryza sativa
  Clone ID: TFbOSC411819j.C1.o1.np
ccaagctcgccacgccgtcggcgagctcgttcgcaccgtcgtggggggaggaggacggcggcgtcaaggaaccacagtcgcgttgtggccgccaccgccagatccggcgagcccgccgccaccactgcctcctgccgccgccagatccgccgccgccgccaccgatgctccccacccgcaccacccgttctactactccggtccggctgccgccgccgcggcggcggcggcggcgcagcagcagcagcagacgttcatgggcgcgctggcgataacgccggtggtcgctgagcagccgcaggggtcgtctggtggtggggagaagaaggtggtggcgccgacgaccccggcggcggcgggggcggcggcgacgacgacgctggcgaagcggccgtcgaaggaccggcacacgaaggtggatgggagggggaggaggatacggatgccggcgctgtgcgcggcgcgggtgttccagctgacgcgggagctggggcacaagtccgacggcgagaccatcgagtggctgctgcagcaggcggagccggccatcatcgcggcgaccggcacgggcaccatcccggccaacttctcctctctcaacatctccatccgctccggcgccgcctccgcctcctccgcctccaaccccaaccgcgcctcccccttcccggcgctggctcttcacccgcaccaccagcagcacgacgtgtccgccatgctcggctaccaccaccacctcctcccgccgccgcagcagcagcaggagtcgccccaggatcccggcggcgcgggcgcgttcatgaggaagcgatacagggaggacctcttcaaggagacgacgaccgccaagatcccagcgcgcccaaggcgcgcgagcagcagccgacgacgccgcaggcggcggcggccgccgccgcggcggcggcaatgtgggccgtcgcgccgaacaccgcggcgcccggcggcgcgttctggatgcagcccatgtggtccttcgccggcggcggcggcggcgccgccacggtgcaggcgccgctccagttcatgtcgacgcgtgtcaactaccccggcagcgccggcgccggcatgtcggacaccaacctcggcatgctcgccgcgctcaatgcgtacaaccgcggcggcgccggagaccagcagccgcagcagcaaccggagatggaccagcagggccgcaacgacgacgacgacgatgacggcgacgacagcggcgacgaagacaacggcggcgcaaacaacaac

SEQ ID NO: 12998 - DNA, 1164 bp, Oryza sativa
  Clone ID: TFbOSC4514j.C1.o3.fg
atggatgtcaccggagacggcggaggaggagggcaacggcccaatttccccctgcagctcctcgggaagaaggaggagcagacgtgctcgacgtcgcagactgccggggcgggcggcggcggcgtcgtgggcgcgaatgggtcggcggcggcggcgccgccgaagcggacgtcgacgaaggaccggcacacgaaggtggacgggcgggggcggcgcatccggatgccggcgatctgcgccgcgcgggtgttccagctgacgcgggagctcgggcacaagaccgacggcgagaccatcgagtggctgctgcagcaggcggagccggcggtgatcgcggcgaccgggacgggcaccatcccggccaacttcacctccctcaacatctccctccgctcctccggctcgtcgctctccatcccttctcacctccgccttgccggcttggctggccctcgcttcggcggcggcgcgcgggcggcggacgcgtgggaccgcgtcgtcggcctcgggttcggcggtgcggccgacgccccgtcctccgccacctcctcctcctcgtcgccgcttctgctgagcttccactccggtagcgtcggccttgacgtgtcgccgccgtcggcgtcgacctccccggccgccgccgacctctcccggaagcggcggtgggagcaagaaatgcagcagcagcagcagtaccagcagcagatggccgggtacacgcagagccaaattcctgcgggcacggtgtggatggtgccgagcagcaacgcgcaggccgccggtggcggcgctccgccgggaggcggcggcgagtcgatttggacgttcccgcagtcagggagcggcggcggcggcggcgcggcgacagtgtaccgtggcgtgccaagcggactacatttcatgaacttcccggcgacaccaatggcgctgctccccggcgggcagcagctcggcctcgccggcgccggcgggggtggcgaggggcacccggggatcctcgccgcgctcaatgcctaccgcgcacaggccgcgcagccggacgccggcgcggcggcgcagaatggagcgcaaggctcaagtcagcatcgtcagcatcagcatcacggcggcggcggcggcggcggcgacgagcggcatgagagcatgagcgccagcgactcgtag

SEQ ID NO: 12999 - DNA, 678 bp, Oryza sativa
  Clone ID: TFbOSC401780j.C1.o3.gm
atgtcgcgcgcgctcaactccggctgtggtccttcttcaggtcgtgcgagccgcgaaatcacaacgtggctccatggatctctgcgagacactgtcgggaggcgccggaggcgcggaagatgtggggaccgccggaggatgcgagcgcacgccgcgagggagaggatccactatcagcagcagcagatgcaggtggtggcggcggtgacggggaataggaggatgcaggggctagggccgaagcggagctcgaacaaggaccggcacaccaaggtggatggccggggacgacggattcggatgccggcgttgtgcgccgcctggatcttccagctaacgcgggagctcgaccacaagtccaacagcgagaccgtccagtggctgctccagcaggtggagccggcaatcgtcaccgccatggggacgggtgtcggcactgacatacaggggccctccctcccttccccaaactgcgccctctccaggtcgcaccaccaccaccaccacatgtgggctgccgccgcggcaccgcccgccgcgtccgcggcgttcgccggactctcacaggacggccacatcggcgtgctctccgcccggtcgctcagccagttctaccaccaggaggacggggaggatgaccgcgatgacggcgagtccgatgaggagtccgggcagtag

SEQ ID NO: 13000 - DNA, 573 bp, Oryza sativa
  Clone ID: TFbOSC412575j.C1.o3.gm
atgcaggtggtggcggcggtgacggggaataggaggatgcaggggctagggccgaagcggagctcgaacaaggaccggcacaccaaggtggatggccggggacgacggattcggatgccggcgttgtgcgccgcctggatcttccagctaacgcgggagctcgaccacaagtccaacagcgagaccgtccagtggctgctccagcaggtggagccggcaatcgtcaccgccatggggacgggtgtcggcactgacatacaggggccctccctcccttccccaaactgcgccctctccaggtcgcaccaccaccaccaccacatgtgggctgccgccgcggcaccgcccgccgcgtccgcggcgttcgccggactctcacaggacggccacatcggcgtgctctccgcccggtcgctcagccagttctaccaccaggtcggcgacgctagtgccgccgttgttactcctgctgctccatggatggtcgccggtttatccccctccaagtgtttaggtgaaagctcaatctttttcactccacagtcagcacatgacatgctctttgaaaggtag

SEQ ID NO: 13001 - DNA, 498 bp, Oryza sativa
  Clone ID: TFbOSC21368j.C1.o2.fg
atgccggcgttgtgtgctgcccggatcttccagctaacgcgggagctcggccacaagtccgacggtgaaaccgtccagtggctgctccagcaggcggagccggcaatcgtcactgccatggggacgggtgtcggcgctgacatccgtcgcaccctccctcccttccccaaactgcgccctctccaggttgcaccaccaccaccaccacatgtgggctgccgccgcggcgttcgccggtgccacatcgggttcgcgaccatgttcgccgcccacgtggcggcggccatgccggggctagagctaggacactcacaggacggccacattggcgtgctcttcgcccggtcgctcagccagttctaccaccaggtcggcggcgccagtgccactggtcaactgccacacccgcaccaccatcaccaacaccatcaacagcagcaggaggacggggaggatgaccgcgatgacggcgagtccgatgaggagtccgggcagtag

SEQ ID NO: 13002 - DNA, 783 bp, Oryza sativa
  Clone ID: TFbOSC405018j.C1.o5.gm
atggcaattaaggaccggttcacgggaaaccctaggagacttactgtgcttaccacaagcggaagtggagctgaagatcttcctagtgggagctgtcctgttgaagttggtttcgtcgctgccgtcaaggattgcctgtggagtggagtccccccgctgcagaacgaggcaggcgttatgccttgtcatatccatggcggcgccgctctggacaagcaactcgtccccaccgcctccaaagccaatggcaccaccctcgctgtccgcaagcctccctccaaggaccgccatagcaaggtcgacggccgcggccgccgcgtccgcatgcccatcatctgcgctgcccgtgttttccagctcacccgcaagcttggcctaaagtccgacggccagactatcgagtggctcctccgcgaggctgagccatccatcattggcgccactggcaccggcaccaccctagcctcctcctccccacgccgcccccttcatcctcggcaagcgcctccatgggctgacttcggccaattctggagctttgcggccgtgcgggagatgatggccgccaccgcggcgcccgccatgcttggggaggccttcgccgccacaaagcagcaacctggaaggagccaaccaaggaggaggatgtgctccaccaccggtgaggtcacggccgccgcctccgcacctcgcggactgctcgccggcgcggccggtgcccggcggctctcggttcctgccgcgacctcaccgctcagcccggatgtcctcctctacggataa

SEQ ID NO: 13003 - DNA, 777 bp, Oryza sativa
  Clone ID: TFbOSC400621j.C1.o28.fg
atgcagcagcagctggatcagcagcagcagcagcagcagcatcagtacgaccacttcttctccggccacggccagttcaactccgagacgctggaggccgtgctctgcaggccgccgcgcggcgccgccgcggatcctgctgttccggcggcggcggcggcggcggctgttctgacggcggcaagaaacggtggcggcggccatggcagggcgaggaagcggccgttcaggacggaccggcacagcaagatccggacggcgcagggggtgcgcgaccgccggatgcggctgtcgctcgacgtcgcgcgcgacttcttcgcgctgcaggaccgcctcggcttcgacaaggccagcaagacggtggactggctgctcacccagtccaagccggccatcgaccgcctcgccgccgacccctcctcctcctcccaccgcgccgccggcgacacccgcatgtcgtcggccgagcgcggcggcgatcaccacatggtcgcggtcggcgccgccggatcagggaaaggagacgcggacaaggcgaggggccccagaggtggtagatcggcgcccatggagctcggctgcgagctcggccgcctcgtgccggcgccggtgctcggcgagtactactacgagctcgccgagatgatgagcaacaacaccggaggagaaggagacgacgacggcgactacgacgacgacggcgatttcttggacgactctgggtttctctgccactatcgatcgaagaagaaatttagcataaaggacatttcttaa

SEQ ID NO: 13004 - DNA, 963 bp, Oryza sativa
  Clone ID: TFbOSC419993j.C1.o2.fg
atgcaccccttcatggacttggagttggagccgcatgggcagcagctggcggcggcggaggaggacggggcaggcgggcaaggcgtcgacgccggggtgcccttcggcgtcgacggagcggcggcggccgcggcggcgaggaaggaccggcacagcaagataagcaccgccggcgggatgagggaccggcggatgcggctgtccctcgacgtcgcccgcaagttcttcgcgctccaggacatgctcggcttcgacaaggccagcaagacggtgcaatggctcctcaacatgtccaaggccgccatccgggagatcatgagcgacgacgcctcctccgtctgcgaggaggacggctccagcagcctctccgtcgacggcaagcagcagcagcacagcaacccggcggatcggggcggcggcgccggggaccacaagggcgccgctcacggccacagcgacgggaagaagccggccaagccgagaagggcagcggccaacccgaagccaccgcggcggctggccaatgcgcaccccgtccccgacaaggagtcgcgcgccaaggcgagggagcgggcgcgggagcggaccaaggagaagaaccggatgcggtgggtcaccctcgcctcggcaatcagcgtcgaggcggccaccgcggcggcggccgcgggggaggacaagtcgccgacgagccccagcaacaacctgaaccactcatcgtccaccaatcttgtgagcaccgaattggaggacggctcctcgtcaacgcgccacaacggcgtcggcgtcagcggcggccggatgcaagaaatctcggcggctagcgaggcgagcgacgtgatcatggcgttcgccaacggcggcgcgtacggcgacagcggcagctactacctgcagcagcagcatcagcaggatcagtgggagctcggcggcgtcgtctacgccaattcgcggcactactgctga

SEQ ID NO: 13005 - DNA, 996 bp, Oryza sativa
  Clone ID: TFbOSC401008j.C1.o9.fg
atgagcgccatccccatgaacagctggctcgtgcccaagcccgaaccggtggagttcttcggcgggatggccatggtgcgcaagccgccgccgaggaaccgggaccggcacaccaaggtggaggggcgcgggaggcggatccgcatgccggcggcgtgcgcggccaggatcttccagctcacgcgggagctagggcacaagtccgacggcgagaccatccggtggttgctgcagcagtcggagccggcaatcatcgcggccaccggaaccggcaccgtcccggcgatcgcgaccaccgtcgatggcgtgctccgcatccccacccagtcgtcgtcgtcctctggcccggcgtcctccgcggtggtcgacggtgaggagtcctcggccaagcgacgccgcaagctgcagcccacgcgcgcggtggctggcgcgtctccgctggccacggcggcgcccgcggcgtactacccggtcatcgctgaccctctcctgcaaggtagcggcggcgcggcgatttcagtcccgagcggcctcgctcccatcaccgccaccggcgctccccaaggcctcgtgcccgtcttcgccgtcccggccactggcagccccgcggtcgccggcggcaaccgcatgatcccgcaagccaccgccgtatggatggtcccgcagcccgcaggcgccgcgggcgcgggcaaccaacccacgcaattctgggccatccaatccgcgccccagctcgtgaacttcgccggcgcgcagttcccgacggcgattaacgtcgccgacttccagcagcagcaacaacagcagccggtgtcaacaaccatcgtccagaacagcaactcgggcgagcacatgcacttctccggcgccgactcccacgagcagcagcggcgcgggcggaaggaaggcaacagcggcggcgtggtggaccacccggaggaggacgaagacgacgacgacgacgagccggtctccgactccagcccggaagagtag

SEQ ID NO: 13006 - DNA, 1338 bp, Oryza sativa
  Clone ID: TFbOSC407741j.C1.o10.fg
atggagctcgccggcagcaacaacaagcgggggagggtgagggggcccaacgacgacgacgacgacgccggggagccggacgccaagcgccatcaccaccagctgctgttgccgtggccgcagcagcagcagcagcagcatccggcgtcgcggatctaccgggtgtcgcgggcctccggcgggaaggaccgccacagcaaggtgtacacggccaagggcatccgcgaccgccgcgtccgcctctccgtctccaccgccatccagttctacgacctccaggatcgtctcgggtatgaccagccgagcaaggccatcgagtggctcattaaggccgccgccgccgccatcgacaagctcccttcgcttgataccgcttccttccccaccaaccccgcctcctccgccgctgttgctgctgctgctgctcctcctcttccccatgccgaacgcgagcagcagcagcagctcaccaagtccggatgcagtagcacgtcggagaccagcaagggctccgtcctctccctctcccgctccgagagccgcgtcaaggccagggagcgcgccagggagcggagcagcgcggccgccgccgcggcatccaaggacgccggggacgacgccgccacccccaccgcgcccaccgccgcgcccgcctcctcgcaggcggcttccttcaccgagctactcaccgggatggccgcagccaacgcctcacccgctgaccacaagcagcagcaggcgtggcagccgatgaccgtcgccgcggccaccgccgactacatcggcttcgccgccgccgccgcgccgcatacgcagccgcggaaatccgccgcgggccatcactccgcgatgccgcacaccttcgcatcacccgctccccacctcgccaacatcacccccatcgccatggcgcccgcgcagcacttcaccctcacacccgccgccgccgagcaccacgcggagatgacgcactactcgttcgaccacttcatgcccgtccacgcggcagcagcggcggcggcggcggcctccaccccggccggcggcgactacaacctcaacttctccatgtcctcgggtcttgtgggtgtccacagtagggggacccttcagtccaattcgcagtctcacctctccagccatcaccaccaccatcaccagcaacagcagcagcagcagcagctgcagaggctgtctgctccgctggatgcgcccaacattccgttcctcttcagcccggccgccgcgcccaccgccgcggacacccagttcgccgccgcattgcagctctgggacgggttccggcacgccgacatcaaggagaagggcaagcactga

SEQ ID NO: 13007 - DNA, 666 bp, Oryza sativa
  Clone ID: TFbOSC418457j.C1.o6.fg
atggcggcggcgggcgagaaggacaagcacagcaaagtggtgacgtcacgggggctccccgaccgccgcgtcaggctgtcggtgccgacagccatcgcgttctacgacatccaggaccgcctcggcgtcgaccaaccaagcaaggccatcgagtggctcatccgcgccgccgctgccgccatcgacgcactcccatcgctcgactgctccttcgtcctccccaacgccgcccagctcctcacccgccggaggcggaggccgtcgagcaggcggccttcgacggagcaggcgcgcacgaggaaggctacaatggcggcgtcgcctaggaagtcgggggagaagaggcggaagacgaggtcaaggtgcgcggcacggagggcggagcgcatcgcgaagttgagggcacggagggaggggtggatgccgaggcgcgaggcgagcacctcggcggcgtcgggcggccaaagctggatcaggaagccgtcgacgccgaggagcggcggcttgtgctccggcacgggagaaggagaggaaggtggcggcaggagcatgggggagataaaagaggacgagctcaagcatggcggcgagaggagtggggcgacggcgggcggagaaggccggcaaggcggtggcgcggagcgaggtggtggcggacgacgatga

SEQ ID NO: 13008 - DNA, 636 bp, Oryza sativa
  Clone ID: TFbOSC407361j.C1.o2.fg
atgagctcccgcgacgccgccgccacgttccatgtctaccagcccgtgcagatcccgacggccacggtggcgcccgctgcggcagtgtcggcggcgccggcagaggccgtcgcccagctggtcccggcgccgagcaagaaggcggccggcgcggcgggtgggaaggaccggcacagcaaggtgaacgggcgcgggcggcgcgtgcggatgccgatcgtgtgcgcggcgcgggtgttccagctcacgcgggagctggggctcaagtccgacggccagaccatcgagtggctgctccgccaggccgagccgtccatcctcgccgccacggggaccggcaccaccccggccgccttcgtctcctcctccgcgccgtccacctcctcctcgcaccagcacaccctcctcggcaagcgccagcgccaggagtccgccgccgccgacgccgtctccgtcgccggcgccgcgtccgcgttctgggcggcgctgcccgcaccaggccggcccgacgcctggggcttctccccgctggacgcgcagccgacgtacgtgccgatggcgcaggcgcaccaccaccacctcaacctcctcgccgcgctctccggcgccgccaggcgcgccgaggaggagtcccggtga

SEQ ID NO: 13009 - DNA, 936 bp, Oryza sativa
  Clone ID: TFbOSC400800j.C1.o53.hg
atgagggtctctaccgttggtggagagggatccggtaggtccgaaggtgggatcgtcgccgatgaacggtgggggggaagggaagggaaggggcgacggcggggcgaggagtttcatcggcggtgggggaaagggaaggggcgacggcggggtgaggagattcgtcggcggcgacacactggagatggggcagtgcgagagaaagagacggggagagggatgtgcgtgtgggatgaggatctggaaggcgagaaagagagggggggaccgccacgtagaccaaaactggggtcaaaaccaccaaaggacctcggccaccccaccccgaccgacgccgaccccacctctcagaatccccccaccccaccaccaccaccaccaatgatggcttcttcctccgacctcatcctctacaacctcgtccccgcccaacccctaaaccctagcgccatccccaaccctaaccccgacctctccatcgccgccgccgagcccccctcctccgacggcgccacccctcgccgcgtcaggcccaggaagtccccctcctcctccgaccgccactccaaggtcgccggccgcggccgccgcgtccgcatcccggccatggtggccgcccgcgtcttccagctcacccgcgagctcggccaccgcaccgacggggagaccatcgagtggctactccgccaggccgagccctccatcatcgccgccaccgggacgggcgtcaccccggaggaggcgccccccgccgccgtcgccatcggctcttcctcggtcgccgccgccgccgccgccggcgggcatgggggcgcgttcgtccatgtgccttactacaccgcgctcctcatgcagccgcctaacgcggacgagccccccatggcatccgctgcctccgcctcgggcaccaccgccgccgacgagaacaataattaa

SEQ ID NO: 13010 - DNA, 1104 bp, Oryza sativa
  Clone ID: TFbOSC400348j.C1.o2.hg
gcgcatcagcaccacccgttctactacgccgccgctcagggtggcgcgaataccatgccggcgccggcgtcgttcatggggtcgctggccatagtgcccgctgctgctgctccgggtggtggtggtgggcaggtgcaggcggcggcggctccggtggcgtcgtcggagaagaaagcggtggtggcggcgggggcgggggcgaagcggccgaccaaggaccggcacaccaaggtggaggggcgcgggcggcggatacggatgccggcgctgtgcgcggcgcgggtgttccagctcacgcgggagctcggccacaagacggacggcgagaccatcgagtggctgctgcagcaggcggagccggccatcgtcgccgccaccggcacgggcaccatcccggccaacttctcctccctcgccgtctccctccgctccgccgcctcccactcctcctccccgcgcgccgcgccgttccaccacctccagcagcagcagcagcacgacgtcgccgccatgctcggcttccaccaccaccaccaccagctgctccctcctccgccaccgcaccagcacccggagccgacgccccaagatcccggcgccggcgagttcatgcgtaagcgctacagggaagccgacgacctgttcaaggacacctcacgccaagaccccgtcgatggcgccaccggcgaggccgagcagaaggcccgtgcggccgcagcagcggcggcgccgccgccaaccgccccgtcagcaatgtgggccgtggggccgaacaccaccggagccaccgccgccttctggatgcagccggcatgggcattcccccacggcgccggcgccggcgccgccggtaacacggtgcaggcgccactccagttcatgtcgcgcagcagctttcccacggcgatgaacgtcaccatggcggacaacaacaacagcagcaacaacaacctcggcatgctcgccgcgctcaacgccggcggcggcggccgctccggcgagcaccagcaccagcatgaggggcagtcgccggcggagatggatcatcagcgccgcgccaacggcggcggcggcgaggctggcggcgcggcgagctcgcagtga

SEQ ID NO: 13011 - DNA, 1722 bp, Oryza sativa
  Clone ID: TFbOSC401369j.C1.o12.fg
atggagactaggttatgggatccggcgaggtggatggacgcgcattggagcagcaacagtagcggcggggaagaaggcggcgggggatctggatccgaggcaccaccaccaccgggtcacccacggcggcgacggcggcggcgtaggaggaggaggaagcggggacaggaggaggcagatgagcagcagcagcagcagcacgaccaccaccggcttctccagctccaccaccaccagggtgtgcagcaggaccaagaaccgccgcctgttcccgtcttccacctccagccggcgtccgtgaggcagctgtcgggctcctccgccgagtatgcccttctctcgcccatgggcgacgccggcggccactcccaccaccaccaacacggcttccagcctcagctcctctccttcggtggcgtcggccaccaccaccacctgcatcagttcacggcgcagccacagccccccgccgcgtcccacactcggggtcgtggaggtggaggtgagattgtccccgcgacgacaactccacggtcgaggggcggaggcggcggcggcggcggggagatcgtggcggtgcagggcgggcacattgtgcggtcgacagggcggaaggaccggcacagcaaggtctgcacggcgcgcgggccgcgcgaccgccgcgtgcggctgtcggcgcacaccgccatccagttctacgacgtgcaggaccggctgggctacgaccgcccgagcaaggcggtggactggctcatcaagaacgccaaggacgccatcgacaagctcgacgtgctgccggcgtggcagcccactgccggcggcgcaggcgcgggcaatgccgccgcgccgccgtcctcctcgacccaccccgactccgccgagaactccgacgaccaggcgcaggccatcaccgtcgcgcacaccgccttcgacttcgccggcgggggcagcggcgggaccagcttcctcccgccgtcgctcgactcggacgccatagccgacacgatcaagtccttcttccccatgggtggcaccgcaggcggggaggcatcgtcgtccaccacggcggcgcagtcgtcggccatgggtttccagagctacacgcctgacctcctgtcccgcaccggcagccagagccaggagctccggctgtcgctgcagtccttaccagaccccatgttccaccaccagcaacatcgccatggcggcggcggcggcggcggcaatggcaccacgcagcaggcgctcttctccggcgccgccaattactcgttcggcggcggagccatgtgggccaccgagcagcaggcgcagaaccagcgcatgctgccgtggaacgtgcccgaccccggcggcggcggcggcgccgcctacctgttcaacgtgtcgcagcaagcggcgcatatgcaggcggcggctgcggcgctgggtggccaccagagccagttcttcttccagaggggaccccttcagtccagtaaccagccctccgagcgaggatggccggagaccgtcgaagccgacaaccagatgagccaccaccaaggagggctgagcccctccgtgtcggcggccatcggttttgccgctcccggcatcggcttctccggcttccgcctccccgcgaggatacagggcgacgaggagcacaacggcggcggcggcggcaatggcgacaagccgccgccgccgtcgtctgtctcctcggcttctcaccactga

SEQ ID NO: 13012 - DNA, 2658 bp, Oryza sativa
  Clone ID: TFbOSC100626j.C1.o2.fg
atggaggcgcaggcggacgccggcggcgacgacctcgccgccatgcgggagcagtgccggagcctggaggaggccatcggcttccgccgggagacgcagatgggcctcgtcgcatcgctccagcgcctcgtccccgacctcgtcccctccctcgaccgctcgctccgcatcatcgccgccttcaacgaccgccccttcgtccccaccccgaaccccgacggcggccacggtaagagccccgccgccctcaagccccaccaccgccgcgccctccctgacccggcgcgctccacccgccgcaagacctcgcccggatcctcccctgcctccgtcgccgctgcccccggcggcctcgacgccgtgcgcaccatggtcgccgtgtgcctcctggagctcgtccccttcgccgagatcgacgccgccgcgctcgcccgccgcctgcaggcggagagctcatccgccagcgaggccgagcggactgctctcgctgacctagccgccgaactcggcggctcggcggcctccgctgtagtcctcgccctccgccgcatagccgaggacaccggcggtgtgcagatcgaggaggccatgattgggggcaagtcgatgacgatggtctgggccatcgaccggaacaagctcctcaaggagctgccagaatccgctactttgccgctactccaacctcctccagccccccagatgcccccctctgagaccgatgccggcagcgcaatgataccaagaacaccgcagcagcagcagccgcagccggatatgtggccgcattcgatgcctccgatattcccacggccaaggggcatgacgatgcaggggatgcagagggtgcccggcgtgccaccagggttgatgccgctgcagcggccattcatgggaccagctggagttatcacaatgggtgggggtgtggggcctagccctaaccagcagaagcagaagagcgaggaggacgaacttaaggatcttgagttgctgctgaacaaaaagacatatagagagaagcagaacaccaagaccggggaggaacttttagatctcattcaccggcccacggcgaaggagacggctgtggcagcgaagtctcacactgttagtcctgtagtagtaaatgagctggcagtggcggacctaggatttgaacccaggggactaaatgtaaagaccattgcatacaaggagatgggggacaccaggtccaaatcatccaaaatttacagcatgtttaaaacaaaaggtggttcccagctgaaggaatattgtaccaacttaactaaagaagattgccgacgccaaagtggatcttttgttgcctgtgataaggtccatttccgccgtattattgctcctcatactgatacaaacctaggagattgttcttttctcgacacttgccgtcacacaaagacctgcaagtatgtccactacgagcttgaccaaacaccagatatacctccaatgatggctggtgctcttgcacccccaaggcaaataaggctccagagagctgaatattgttcagaagtagagcttggagaagctcaatggataaactgtgacatccgaaacttcagaatggatatcttaggacagtttggagtaattatggccgatcccccttgggatattcatatggaattgccatatggcacaatggctgatgatgaaatgaggacccttaatgtccctgctttacaaactgatggattaattttcttatgggtcactggtcgtgcaatggaacttggtcgggagtgtttggagctctggggttacaaacgtgtggaggaaattatttgggtgaagaccaatcaacttcaacgtattattcgaactggacgcactggtcattggttgaatcatagtaaagagcattgccttgttggaataaaaggaaaccctttagtcaacaggaacattgacactgatgttattgttgctgaagtccgtgaaacaagcagaaaacctgatgagatgtaccccatgctagaaagaataagcccaaggacaaggaagctggaactgtttgcaagaatgcataatgcacatgctggatggctttctctgggtaaccagttaaatggagtaaggcttgttgatgaagggttgagagcacggtacaaggctgcctatcctgattcagaggaactcctagaaggcgcgcacacgggaagcccaatgcgaccacgaggaggcgaaggtgtggcagtgtcgcttcccggtgagacccacacaacggtggggtttcccggtagaattagggctccaaatccgatgggattgtcaggtgctattgggctgcaccttgggccgtgccagctattctccaagttgagcccaaggatgacaatttcccccgcggggccgggtcccctgcggggacccgaccctacgggggcaggggccatttctgacccgtggatcgtgaagaaggcgagactagtgaagaaggaggtggagcccatcttcagcgacagcgacgccatgaagaatgcccctaagaccaccactacatgcccaaggtgccaaaatggagaagcatactacaggcagatgcagattcgatcagctgatgagccaatgtctacattttacaagtgttgcagagaagaatgccaatttgattggagggaggactga

SEQ ID NO: 13013 - DNA, 471 bp, Oryza sativa
  Clone ID: TFbOSC26017j.C1.o3.fg
atggccttctggcaggcgcgggacttcctcttctgcggcgtgtgcggcaccctcctcaaattcgactccgtccgctccgcctcctgccccctctgcggcttcaagcgcaaggccaaaggtcgtcgtcttccccatctctctccctgcaaagccctgggctgtgttcttcttgcggctgatgccttcgttctctttttttacggcgcagatatcgaagggaaggagacgcggtacacggtcacggctgaggatattagaagagagctaaaacttgatccatatgtgattcttgaaacaacactgaaggaggaagacgtaattgtcgaaagagctacagtaaataaagagtgtgaaaaatgcaaaaatcctgaacttcagtattacaccaagcagttacggtcagcagatgaggggcaaactgttttctataagtgcgcaaactgcaggcatgagttcaatgagaaccagtag

SEQ ID NO: 13014 - DNA, 360 bp, Oryza sativa
  Clone ID: TFbOSC645j.C1.o1.np
tttaattttatggaccacaggtcctgcctttttaatgaactgtgcggtttcttgaatcttgtcccaaccatttatatcagatatgaaagaagatttccatggctatttatatgtagttgacattttgcatgctgttgacaggatattagaagagagctaaaacttgatccatatgtgattcttgaaacaacactgaaggaggaagacgtaattgtcgaaagagctacagtaaataaagagtgtgaaaaatgcaaaaatcctgaacttcagtattacaccaagcagttacggtcagcagatgaggggcaaactgttttctataagtgcgcaaactgcaggcatgagttcaatgagaaccag

SEQ ID NO: 13015 - DNA, 1104 bp, Oryza sativa
  Clone ID: TFbOSC900118j.C1.o24.fg
atggagagggagctgctggagacgttcgaggccgccaagaaggcggccgacgcggcggccggggcggacgactccccggaggccgaccgctgcctcgacgcgatgcggcggctgcgcggtctccgcgtcaccaccgacgtcctcgtctccacgcaggttggaaaacgtcttcgttaccttactaagcaccctcactcagacatacaatccatggctacagatcttctggggtactggaaaaaggttgttatcgaagaaggaaagaaaaatggtaccacagaaaatgttggatcaaccaactcagccgccagagctgaaaaggctcagcccatgaaggttgataagagttctgcatcaggaagtgtgaagcctgagaaaagagaagtcaatgttaggggccagaagcctgagagcatcaaggttgagaagatcaccaataatgattccaaaaaccaacaagtcaaggtagagagggctccaaaggaagccactagaactcctgatacaaagaagccatcttctgttccaaatggccccccaaagctgacatctcttgtcaaatgcaatgatcccactagagataaaatccgggaactacttgcagatgccttctccagggttcatggagagactagcaaagatgacagggaggaagtgagaaacatcttagatgaagtggatgcacgagatccattcagagttgctgtgaccgttgaatctgcgttatttgagaggctgggacgttcaactggggctcacaaggcaaaatacaggtcaataatgttcaatcttagagctgacaacaacactgatttccgaagaagggttctccttggccaagtgaggcctgagaggcttgttgacatatctccagaagagatggctagtgacgcgaggaagcttgagaataagcagatcaaggagaaggctttgttcgattgtgagcgtggaggagccccaaaggcgactactgatcagttcaagtgtggcaggtgtggccagcggaagacgacttactaccagctgcagactcggagtgctgatgagccaatgacaacatttgtgacatgcgtgaactgcaacaaccactggaagttctgctga

SEQ ID NO: 13016 - DNA, 1122 bp, Oryza sativa
  Clone ID: TFbOSC900397j.C1.o13.fg
atggagagggagctcctggaggcgttcgaggcggcgaggaaggcggcggacgcggtcggggaggcggcggcggcggccggggccggggaaggggagtcgccggaggccgcgcgctgcgtcgacgcgctgcggaggctgcgcggggctcgcgtcaccaccgccgccctcgtctccactcagatcggcagacgtattcgctatctcaccaagcatcctcactcaagcataaaagcaacagcttcagacctgttaggacactggaaaaaggttgtcattgaagaagacaagaaaaatggggcactgcagaatggaaaatcgagttctactgtggtaaaggttgagaaggtggagcctatgaaagttgaaaaggcatcaccaagggctactgtcaataataataatatggataccagagttgtgaaccacaaaggtggaaaggttgagaagttttctaatgctgagctgagaacccaatctatcaaggttgagaaagtacaaaaggtagttcacaaagtatcttctgttgagaagccgtctcctgtccaaggtggtcctccaagactgacatccgttgttaaatgtggtgatgctagtcgagacagaattcgggcgatacttggtgatgccttctccagagtttctgaagagactagaaaggatgacagggaggaagtgaggaacatcatagaagaagtaaaagcatgtgacccattcaggattgctgtgatggtagagtgtgccttgtttcagaagctggggaattttaatggacctaataagcaaaggtacagatcattgatgttcaatctgaaggatgatcacaacacagacttccggagaagggttcttctaggacaagtgcagcctgagagaattgctgacctaaccccgacagaaatggctagcgacaccaggaagcttgagaacaagaagatcgaggagaaggctctgttcgagtgcgagcgtggaggagcaccgaaggccaccactgatcagttcaagtgtggcaggtgcggccagcgcaagactacctactaccagctccagactcggagcgccgacgagccgatgacgacgttcgtgacctgcgtgaactgcaacaatcactggaagttctgctaa

SEQ ID NO: 13017 - DNA, 939 bp, Oryza sativa
  Clone ID: TFbOSC900356j.C1.o20.fg
atgagcgactcgttctgcccggactgcaagaagcacacggaggtggcgttcgaccactcggcgggggacacagtgtgcacggagtgcggcctcgtcctggaggcgcactccgtcgacgagacctccgagtggcggacgttcgccaacgagtccagcgacaacgaccccgtccgtgtcggcggcccgaccaacccgctcctcaccgacggcggcctctccaccgtcatcgccaagcccaacggcgcccagggggagttcctctcctcctccctcggcaggtggcagaaccgcggctccaaccccgaccgctccctcatcctcgccttccgcaccatcgccaacatggccgacaggttaggtcttgtggctacaatcaaggaccgagccaatgaaatatataagaaggtggaagatctcaagtctatcaggggaagaaatcaagatgccatattagctgcctgtttgtatattgcttgtagacaagaggatcggcctagaactgtaaaagaaatatgttcggtcgctaatggagcaacaaagaaagagataggccgagcaaaggaatttatcgtgaagcaactggaagttgaaatgggtcaatctatggagatgggaaccatccatgctggagatttcctgaggcgtttctgttcaactcttgggatgaacaatcaagctgttaaagcagcccaggaagcagttcagcgttcagaggaacttgatataaggaggagtcctatttccattgcggctgctgtcatttacatgataacccaactctcagatgataagaagcctctgaaagacatatccttggctactggtgtggcagaaggtaccatcagaaattcatacaaggatctgtatccctatgcttcaaggctcatcccaaacacctatgccaaggaggaagacctgaagaatctgtgcacaccatag

SEQ ID NO: 13018 - DNA, 633 bp, Oryza sativa
  Clone ID: TFbOSC422155j.C1.o6.fg
atggcgtcccggatggggctcgcgggcaacgtgcgcgaccgcgggaagaacgtgctgaggaaggtggaggaggccaaggtttgcgccagggggcggagccgggacgcgctatacgcggcgtgcctccacaccgcgtgccgcatggagggcgcgccgcggacgctcaaggagttcatcgccgcgacgcccgacgcggcggcgacgaagaggaacctgggcaagttcatccacgcgatcaagaggctcctcgggagcaacgatgaggaggccgaggccgggcaggatcaagcgggcagcaaggcgacgaacggctgcggcggtggcggcggcgccggcgcggtggtgcgcgccagcaactacttgctccgatacgggtcggcggtcgggatgagcggccaggaggtgagcgcggcgcagcgcgcggcgagcaggctggacgagagcctcgacgtgcggcgaaacccgcagtccatcgcggccgccatcatatacatggccgtgcagcgcgccggcggcggcggcggcaggagcaagagcgtccgcgaggtgtccgccgccacgggcgtcagcgaatcgaccatcaaggacgcgtacaaggacctgtgccagcacgccgaggtgctcttcggctaa

SEQ ID NO: 13019 - DNA, 1689 bp, Oryza sativa
  Clone ID: TFbOSC400277j.C1.o29.fg
atgtcgcagccgacgcagtgcccctactgccgcgcctccggcccggcgcgctgcgtcacgacgcagccgccgctctcccgcgccgtctccgagtgctcctcctgcgcccgcctcgtcctcgagcgccacctccacacccaccccttcttccccctcctcccctcgctccacccgctccccctcgtcacccccgacctcgccgacgccgcgccgtcgccgtccccctcggccgcctccgcctccggcgacgacgacgacgacgacgaccccttcctcccggccggcttcgtctccgccttctcggccttctccctcgagcgccaccccgtcctcgcccgctccgcgtccgccttctccggccaactcgccgagctcgagcgcgcgctcgccgtcgaatccgcggcctcctccactccggaccccgcggggcctatggtctccgtcgacagcctccgcgcctacgtccagatcgtggacgtcgcctccatcctgaggctggaccgggacatagccgaccacgccttcgagctcttcaaggactgctcctccgctacgtgcctcaggaaccgcagcgtcgaggcgcttgccacggccgcactcgtgcaggccatccgcgaggcgcaggagcccaggaccttgcaggaaatctctactgctagcaatcttccccagaaagaaattggaaaatacatcaaaatacttggtgaatcactgaaactgagccaacctcttaacagcaactcaatagcagttcatatgcctcggttttgcagcctactccagctcaataaatctgctcaggaacttgcagcccatattggtgaggttgttgttaataaatgcttctgcacacggaggaatcccataagcatatcagctgcagctatctatcttgcgtgtcagcttgaagacaagcggaaaactcaggcagagatctgtaaggtaacaggccttacagaggttactctgcgtaaagtgtataaagaactgttggagaattgggatgatttgctaccccctaactatacaccagctacaccaccagagaaagctttcccaatgaccaccatttattcatcgcgctcatcgtctggtaaagatctttatcaagataagcagttagacagtgctaagctaaagagctcagaagctgcagagcctgatcacatggtcattgtaaaagaggaggaagacaagaaaattggtccatttagtcgaccgagtgcaaaaaccgagacccatgacttgaatcaagcaatttggacgccaaatgtctcttcaacaccattctcttcatcaccgaaattggatcatgacaagacggaaacaagcgtccgtgggataaaccttaacgaggcatcctgcacaatggatactgacagaccagacatgcctgtgaagtcaccctttgctgagaggtggctaaatgaatcaaaggtgatcccttctcccagtaggcagcctgcaccatggcagcttaagcaaggagcaccatcagctgggtcctcgtatcatagtatgccgtacggcctggaccttctgtcacgtggaaaaagaaatactggagatggtggtgataaggaggggagatgtttcctagttaaatttggctcctcttgccatcctggtgtatcagtatcatgtcatgttgagtgttacaccggtacaaaatattctgtgattaattag

SEQ ID NO: 13020 - DNA, 1032 bp, Oryza sativa
  Clone ID: TFbOSC422155j.C1.o2.fg
atggtgctcgaccacgccaccggcgacgccatctgcaccgggtgcgcgttcgacctcggcaacggcgccaacgcgtgccccgagccgccgcggtggcgcgccgccgctggtcatggtgacagtgatggcgaccgtagcagcagcagcagcagcgtgggaggagacgtctcgccagctgctgccgatccgttgctccagggcggcgagggcgttgcctgctctgtcggggcgccgccggtgcagccgagggtgcgcggcgccgttgtgccgccgaagcagatgcgcgccggcggtgccgtcccgccgaaggtgcggtgcggcgtccctgacacgagcaaggcgctcgccgaggggttcgacgccatcgtcggcatggcgtcccggctcgggctcgcggacaaggtcagcgaccgggcgaaggaggtgctgaggaagctggaggaggccagggcgtgccccaagggacggagccgggacgcgctctacgcggcgtgcctccacgccgcgtgccgcgtcgagggcgcgccgcggacgctcaaggagctgatcgcggcgacctccgacgcggcggcgacgaagagggacctgggcaagttcatcaacgcgatcaagaggcacctcgggatggaggagcgcgggcaggatcaggcggcggacatgaaggcgagcggcggcggcgtcggcgtggtggtgcgcgccggcgactacctgcaccgctacgggtcggcggtggggatgagcggccaggaggcgagcgcggcgcggcgcgcggcgggcaggctggacagcctcgacgtgcggcgcaacccgcagtccatcgcggccgccatcgtctacatggcggcgcaggggagcagcggtgtccggaagagcgtccgccgccacgggcgtcagcgagtcgaccatcaaggacgcgtacaaggacctgtgcccgcacgccgccctgctcttcgcctgaaacacacggcgacggcgcgacgcgacgcggcgctacttaatttgttgtgtgtattgcgtgttgttggttactga

SEQ ID NO: 13021 - DNA, 1236 bp, Oryza sativa
  Clone ID: TFbOSC410156j.C1.o3.gm
atgccaccggatctggaggaggcgaggcccggcccgccgcctccacgccgtcctgaccgcagcgctgccggatctggcggaggggcgagagagaaagagggagaagtggagagagtgagggggtggaagggcgcgctgccgcttgcgagggggagggtgccgacgccgccgccgctcgctggggggagggcgccgccgctgcccctacttgtgtcgcgctgcaaggcgaggtggtgtgtggagacccggcgtgggcgcgacgttgtgcgggcagcactccgaggcaaggcggcgagcggaggccccgcccagtgcggcgtcgccggcaacgagcagtgttactgcccggagtgccaccgcacgacggtggtggtggtggaccacgccaccggcgacaccatctgcaccgagtgcgcgctcgtcctggaggagcggtacatcgacgagacctccgagtggcgcacgttctccgacgccggcagcggcgaggaccgcgaccccaaccgcgtcggcggctgctccgaccccttcctctcgcacgcggagctcggcaccgtcgtcgcgccggccaagcggcaagcgaaggacaccgcctccccgcctcatgtgcgcgtcgactccaagtcgggccaagacagctcgctggccgtcgcgttccgcgccatctccgacatggcggaccgcctccagctcgtggccaccatcagagaccgggccaaggagctgttcaagaagatggaggaggcgaagctgtgcgccagggtgcggaaccgcgacgccgcgtacgcggcctgcctccacatcgcgtgccgcaacgagggcaacccgcggacgctgaaggagctcgcctcggtgatgcgcgattgccaggacaagaaggagatcgggaggatggagaggatcatcaggaggcacctcggggaggaggccgggacggccatggagatgggcgtcgtgcgcgccgccgactacatgagccgcttcggctcgcggctcgggatgggcaagccggaggtgcgggaggcgcagagggcggcgcagacgctggaggacaagctcgacgtgcggcgcaacccggagtccatcgccgctgcgatcatctacatggtggtgcagcgcgccggcgcccagacgtccgcgcgcgacgtgtccaaggcctccggcgtcgccgaggcaaccatcaaggaggcctgcaaggagctgagccagcatgaagagctgctcttctcctcttaa

SEQ ID NO: 13022 - DNA, 1401 bp, Oryza sativa
  Clone ID: TFbOSC6718j.C1.o1.fg
atgtattgttctcactgtcaagataactgccccgtcgtaaaggaccctgacaaaaactacacatgttgtggtttgtgtgggaaggttcttgatgatcaggtttacgatggtgagccaactttccaaaagggcgccgacgggcaggcccggttggctggtagtattctatcaagcattgagagtggtaattcagtatcccatgaaagaactataaataaaggaagagaggagattaggcagattgtcagcagcttacatgtggctggtggagatactattattagcatggctcatcgctattatacactagctgttgacaagaattttacaaggggccgtcgaacaactcatgttgctgctgcttgcctttatattgcctgccggcaaagtaaaaaggcatatcttcttattgatttctcggaccatttgcagataagtgtctttgccaagttttgctacttgcggaacatccagttatccaaaagctcatcgaccccagccttttcatacatcgttttacagaacactgggaggaaaccaagtggattgtgtggtgcagcactatatatcgctgctctctctcatggatatgattataccaaggcagatattgttgctgttgtgcatgtttgcgaggcaacactaactaagcgcttgatagagtttgaaaatacagattcgggtagcttaacgattgaagaatttttggcaaaggctgatgaacaagtgcttgttactaaaatttcaccaaagtctggagaagtactttgcaagcacaaggataaagctgagcattttgctcatggactctgtgaaaaatgctacaacaaatttatgaaactgtctggtggactggagggtggctctgatcctccagctttccaacgagctgaaaaacaaaggttggaggctgctaaaaatgctaaaggaactgctgcatctaaagaggcagcactggaatcagtttgtgaggcacgcgaatctgatgttgagaataacattacgacaccgccaaagaatataattggagataagcattcgacaattccttctgtgaaagttgctggtgattctgtagctacagaagatcctgaaggggaaggtaaaaatgataaagcagatgaaggtcctgaaagtctctctgatattgatgatgcggaggttgatgggtaccttcacaacgaggaagaaacacagtacaaaaaaattatctgggaggaaatgaataaagagtaccttgaggaacaagcagcaaaagcagcattagcagctgagctggcagctagaggagtggttgtggaagaggggaagaggaaaagaagaagacataatgaagatggcaagaacgcaacacccgctcaaacaccagcagaagcaacacagaacatgttgaagcggaag

SEQ ID NO: 13023 - DNA, 1617 bp, Oryza sativa
  Clone ID: TFbOSC900226j.C1.o16.fg
atgtattgttctcactgtcaagataactgccccgtcgtaaaggaccctgacaaaaactacacatgttgtggtttgtgtgggaaggttcttgatgatcaggtttacgatggtgagccaactttccaaaagggcgccgacgggcaggcccggttggctggtagtattctatcaagcattgagagtggtaattcagtatcccatgaaagaactataaataaaggaagagaggagattaggcagattgtcagcagcttacatgtggctggtggagatactattattagcatggctcatcgctattatacactagctgttgacaagaattttacaaggggccgtcgaacaactcatgttgctgctgcttgcctttatattgcctgccggcaaagtaaaaaggcatatcttcttattgatttctcggaccatttgcagataagtgtctttgccaagttttgctacttgcggaacatccagttatccaaaagctcatcgaccccagccttttcatacatcgttttacagaacactgggaggaaaccaagtggattgtgtggtgcagcactatatatcgctgctctctctcatggatatgattataccaaggcagatattgttgctgttgtgcatgtttgcgaggcaacactaactaagcgcttgatagagtttgaaaatacagattcgggtagcttaacgattgaagaatttttggcaaaggctgatgaacaagtgcttgttactaaaatttcaccaaagtctggagaagtactttgcaagcacaaggataaagctgagcattttgctcatggactctgtgaaaaatgctacaacaaatttatgaaactgtctggtggactggagggtggctctgatcctccagctttccaacgagctgaaaaacaaaggttggaggctgctaaaaatgctaaaggaactgctgcatctaaagaggcagcactggaatcagtttgtgaggcacgcgaatctgatgttgagaataacattacgacaccgccaaagaatataattggagataagcattcgacaattccttctgtgaaagttgctggtgattctgtagctacagaagatcctgaaggggaaggtaaaaatgataaagcagatgaaggtcctgaaagtctctctgatattgatgatgcggaggttgatgggtaccttcacaacgaggaagaaacacagtacaaaaaaattatctgggaggaaatgaataaagagtaccttgaggaacaagcagcaaaagcagcattagcagctgagctggcagctagaggagtggttgtggaagaggggaagaggaaaagaagaagacataatgaagatggcaagaacgcaacacccgctcaaacaccagcagaagcaacacagaacatgttgaagcggaagagacttggatcgaagatcaatgatgaagctgttaacaaactgtacaataccaaagatgaagatggcaaagcagataaagagatggacttcaacgatgagtatggacaggacacaggtgatggtgaaacattcgaaggtggttatgattatcctgattacaactatgatggctatggtgatggagcctacggcgattatgatggtgttgatttttaa

SEQ ID NO: 13024 - DNA, 756 bp, Oryza sativa
  Clone ID: TFbOSC401733j.C1.o22.fg
atgggagtgacctgtgtggcagacaagagatgcaaggagaagtgggagaacatcaacaagtacttcaagaaggtgaaggagagcaacaagaagcgccccgaggactccaagacatgcccctactaccaccagctcgacgcgctctaccgcaccaaggcggccaacgccgccgccgccgcctcagcctcgccggctccggcgaccaccaccgtgcttgccccggtgccgctctcccagacgccgccgcacgtcgaccacggcggcagcaacggcaatgggaatgggtgggcgagtgccaacaacggcggcggcggcagcagctccgggggcatgcaaacgaaggctagcaacaatggcacggcgacggccggcgggctgcccgccgtttcgggatcgaagcaggtgcccgtcgcgaaggagacggcggggcagaggcagccacagccgttggccatgaaccacaactacggcaacgacagaatggccgacgacatggacagcgacagcatggacgacgacgacgacgacgacgaatttgacgacgacgaaaacgacgacgacatcggcggtggcaagatgcaggtgcagtacgagacgtcgtcccatttccaacggccgcagctgcagaaccagaacgtcgtcgtcggccggccaaacgcgagcggcggcggcggcggtggcgctccgacgacaccggcgggccctccgccgcctgcggcaacaagtgggacgtcattcttggcctgcgtccagtga

SEQ ID NO: 13025 - DNA, 852 bp, Oryza sativa
  Clone ID: TFbOSC900242j.C1.o18.fg
atggatcccttccaccacctcaactcctccttctccaacccctaccacccactcctcgcctccccgccccaccacttcgcccccgacccactccccccacctcctcctccgccgccgccgccgctgctccccgccgacccgccgtcgctcgagcgggagcgcctcccgcagtggtcccacgccgagaccgccgccttcctcgccatccgcgccgacctcgaccactccttcctctccaccaagcgcaacaaggcgactctgggaggccgcctcggcgcgcctccacgccctcggacttcgccaggacccccgatcagtgcaagtccaagggaagaatactcggttgagagggcgcgcgcattggagaggaagaaggttaaggggaaggatcctgatgatgaccacgacggtggtggtgatggggatgaggatgatgaggaggaggcggatcagcaggtcgacgaggaggacgacggggcgtccggggacacgacgagggccgggtcgaagaagcggaggaggaaggcggcggcggcggcgaggaggacgggttcgacgggcggggtggagggcgaggtggaggcgatgctgcgggagttcatgcggcggcagattgagatggaggagcggtggatggaggcggcggaggcgcgcgaggccgagcgccgcgcccgcgaggaggagtggcggaccgccatggtcgcgctcggcgaggagcgcctcgcgctcgtccgacgctggcgcgagcgcgaggacgcgtggcgcgcgcgcgccgaggagcgcgaggagcgccgccaccagctcgtcgccgcactcctcgccaagctcggcgccggcgacgcgtccgcctga

SEQ ID NO: 13026 - DNA, 1233 bp, Oryza sativa
  Clone ID: TFbOSC401599j.C1.o10.fg
atggaggggaatttgccgccgagaggagcccttgtccatggccatggcggcggcgtcggcgccttcgatctggaggcgacgatgcagccgccgccgccgttccacttcgcccaggatccgcacctccaccaccaccagggcatggtccccgtccgcgggaacccgatgctggatttgggcaatgtggtcaagacctcgccgagcgacgaggaggacgtggatgacggccaccaccatggtggcggcggcggcagcggtaaggaggcctcccagtggcaccgggtgaagtggatcagtggcatggtcaagctgctggtgtccgccgtggcctacatcgacgaggacgtcgacatggactacggcacgggcagcgccgcgaggaggaagcacgccatgctgaagaggaaggggaagtggaggctcgtctccgcggcgatgaccgagaggggcttcccggtgtcgccgcagcagtgcgaggacaagttcaacgatctcaacaagaggtacaagaggatgaccgagatccttggccggggaacggcgtgccaggtcgtcgagcaccccgagcttcttgaagggatgcggctctcgggaaagctcaaagaggaggctaggaagcacctgaactcaaagcatctgcactatgaggagatgtgctcgtaccataacaggaacaaaatgtgtctgtttgatgatcccgcccttcagaagtcattgcgtttggcgcttaggagtggagaggagcatgcaaagaagaacccgtttgggtatgatgatgaggatttttctgacgatgacgacgaagatgaagaattcgatgatctggaggtcagcgctgaagatcatcaccatggaattcatggtgccaagaggctgaagcatgatcaggaggagacgcattttgggtctaatctgtcagaagttgctgttattgacatgaacaaaatgctctctgagggatctggtggtccaactgctgaaaagagtccctctacccctggtatgcgtgatattcgacttgaaaaacgccgcctgaagatcaaagctcagatgctgaaaattgagcagaagcatttcaagtggctgaggttcagcaaggagaaggacagggaattggagaagatgagactggagaatgaaaagatgaaactggagaatgagcggttggaattggagctgaagcttaaagaaatagagatgggtatcaaaccaaagaagatttttagtgattga

SEQ ID NO: 13027 - DNA, 1644 bp, Oryza sativa
  Clone ID: TFbOSC400601j.C1.o83.fg
atggggccgaggggggtggtggggtcggcggcaatgctggggctggagatgcacctcgcccacccgcagatgcacgccgccgcgtaccagcagccggacccccacggcggcggcggcggcgggttccagcagcaggtggcggcggtgaggcagcagcagcagcagtcgtactcgccctactcggcgggggcgtcgtcgagggtgatcaaggcgcccggccatgacgatgggatgggcaacggcgccggtaagggcggcgtggtgcagcagcagcagcagcccgggtcggtggggtgcccgtggacgcggatgaagtggacggacgggatggtgcggctgctgatcaacgtcgtgtacagcgtcggggacgacggcgatggcgtggcggcgggcggcgccgcgggtgggaaggcgtccgcgggggcggcggggcacgggaaggccggcgggtccgggtcccacggcgcgcacgggcaggcggcggcgcagcagaagaagggcaagtggaagtcggtgtcgcgggcgatgatggagagcggccacatggtgtcgccgcagcagtgcgaggacaagttcaacgacctcaacaagcggtacaagcgcgtcgtcgacctgctcggccgcggcaaggcgtgcaaggtcgtcgagaaccacgcgctgctcgacgccatggacgagctcacccacaaggccaaggacgaggcgcgcaagctgctcagctccaagcacctcttcttccgcgagatgtgcgcctaccacaactctggcgcggccgccgccgccgccgcgcacggcccgcacggcgccggcgccgccggcgtcgaggccaccgcctgcttccaccacccgccgcccgcgtccatggccgccgcctcgtccgccgcgcgccaggcggcggcggcggccccttcccttgggatgaaggactcctccgcgggcccggaggacgacgaggacgacagcgaggacgtccccagcagcaacgaggtcgatgacgaggacgatgacgacgacgacgacgacgacgaggtgggcccagggatgaagtcccgccggatctacggcggccaccgcgtccaccaccaccaccaccaccacaacggccaccacaagcgccgccgtggcgacgacgtgtcgtcggcgggcgcgggggacgacgacgacgaggacggcgtgaagcgcgcgaggggggcggcctcggccgcggggggaggcgacgacgaaggcccctccgcggtgcagcagctgcagagcgagctggcggctgcggtggccggcggcggcgacccgcagcaggtgcggcagtgggtacggcggcgcacggtggaggtggaggagcagcaggtggcgcacgaggtgcgcgcgtaccacctggagcggcagcggctcaagtgggagcggttccgcgccaacaaggagcgcgacatggagcgcgcccggctgcgcaacgaccgcctccgcatcgacggccgccgcatgctcctcctcctccgccagaaggacctcgacttcgacatcgccgaggcaaactcctcctccgtcgaccacctcacctcgtccgccccgccgcccctcgccgcgctccagcagcagcagcagccgctcggctccagcccctccaccgccggcggccaccccaactaa

SEQ ID NO: 13028 - DNA, 990 bp, Oryza sativa
  Clone ID: TFbOSC404645j.C1.o10.fg
atgtctggcggcggcgaggtgtcggggagggcgccgcggctgccgaggtggacgaggcaggagatactggtgctgatagaggggaagcgggtggtggaggggcgagggagggggagggggcggggcggcggcggcggcgccgccgcggagccgaccaagtgggcggcggtggcggagtactgccggcggcacgggctggagcggggccccgtgcagtgccggaagcggtggagcaacctcgccggcgactacaagaagatcagggagtgggagcgctcgctgtcgtcgccgtcgtcgtcgtcggcggcggcggggatggggaaggaggtgtcgttctgggcgatgcgcaacgacgcgcggcgggagcggcggctgccggggttcttcgaccgggaggtgtacgacatcctcgagggccgcggcggcggtaatgcggcggcggcggcggcggcggggaaggagggggaggaggagaaggcggcggtgttcgacagcggccgcgccgcggccggcggcggcggcggcggcggggatgatgggctcttctcgtcgtcggaggaagaggaggacgacgacgaggcgaccccgccggcgaccaccccggccgctgccccggccccacctccggctccggcgccggcggtgcccgtcctgacatccgagaagaagagtgatccacctaggcaagatgcctcagagcaagcggggacgtccagagccaagcaaccggaacaaattgtcgaggactcaccagctcagggcgcgcacaagaggcagcgcagcgacgacgcctcaggagaagctcctgatctgcaggggcagctgatcgaaatcctagaccggagcagccggatggttgcagcccagctggaggcgcagaacatcaactgccaactggacagggagcagaggaaggaccaagtgagcagcctacttggtgtgcttggcaaggtggctgatgccctatacagaatcgctgataagatgtag

SEQ ID NO: 13029 - DNA, 1299 bp, Oryza sativa
  Clone ID: TFbOSC9116j.C1.o2.fg
atggaaggcaacaacctaccctctggaagcttgatgcgttctaactctgggcaaatgcatgctccaaatcctggaaagcagggctttgaccatactcagatgcctggcaatttatcgatgcatgtaaaccagtctacagattctgatcacttgtcagaatttcaattcggagagcttggaaaggttgaccaccaccaccaccatcaccatcgtcaacacgccaagaacggcatgagtgatgatgaggaacatggtgtcaacgaggatgccactgatagccagagcggcaagggaaagaagggcgctgcatggcagcggatgaagtggactgattcaatggtcaagcttttaattactgcagtatcttacactggggaggatccaggagctgattcaggagctgggaagagaaactctgcaataatgcagaaaaagggcaagtggaaggcaatatcaaaggtcatgggtgagcgaggctgcagtgtatcaccgcagcaatgtgaagataaattcaatgatctcaataagagatacaaaagacttacagatatccttggccggggtacagcttgcaagattgtggagaatcatgctctgctggattgcatgagtaatctgtctgacaagatgaaagatgatgcgaggaagatactgagttcaaagcacttgttctacgaggagatgtgctcctaccataataacaatcgagtgagtttgcctgaagatcctgcccttcagcgttcactgcagcttgcccttagatgtaaagatgagcatgatctgaggaggggaacaagcggagatgccgatgaagatgatcaaagtgtagactctgattccgaggaggagaatgatgaggaaaattacacattacaaggtgataagagtgccctgcccatgcataaaagattgaggcttatgacagatcaggaggatgtgggttttggcaactcttccagctcacatggatgtagcaggaggtctgattcccatggcatatcactggatatcaacaaagcatttcctgatggaaccaacttggctttggcgcaaaaggatttggctacacaatctgcagatcttgaggaacaaaggttgcagattgaagtccaggcagtctatcttgcaaaacaacggctcaaatgggagcgcttcagtaaaaataaggatagagaactggaacagatgaggttagagaatgaaaaaatgaggcttgagaataagcgcttggagctggaggtaaggcacaaagagttagagcttgaactcaagcaaaaaggcagtggcaatcatgcatga

SEQ ID NO: 13030 - DNA, 1452 bp, Oryza sativa
  Clone ID: TFbOSC400355j.C1.o16.fg
atgtgggccccctggtcggtgggccccctgtcggtgggccccgcgtgtcagcggttatattcatgtgcatcctcgtgcactcctgtgtccatcttatatggtaccaacaagaagttgaagtgtttgggtgatcgctttggggaaatggaaggcagcaacccacctggtaatatgacacagggaccttcctatgggagtttagatttgcatggtatctccaagcaaatgcatcctccaaactcaggaaatcagggcttcaaccagcctcagataccagggaattttaccattcctatggatagggttacagagcctgataacatctctgatggagttcagttaggacaacatgggaagattgcccatcatcaccatcaccacagacaccactcaaagaaccatgggagtgatgaagaggagcacgatatgaatgaggatgctgctgatggcaaagacaagaagggctctccatggcatcggatgaagtggacagattcaatggtgaagcttttgattactgcagtatcctacacaggggaggatcctggagctgatttaggcggtgggaggaggaactattcaatgatgcaaaagaagggaaaatggaaagcaatatcaaaggtcatgggcgagagaggttgccatgtgtcgccacagcagtgtgaggataagttcaatgaccttaataagagatacaaaagactaacagatatccttggaaggggtactgcttgtaatgttgtggagaatcactcacttcttgatcacatggatatttctgagaagatgaaagaggatgcaaggaagatactgaactccaaacacttgttctatgaagagatgtgttcctaccataataataaccgtataagtctgcctgaagatcccgcacttcagcagtcactacagcttgctcttagatgtaaagaggataatgatttcatgaggcatgcaagtggagatgctgaactagatgatgatcagagtgaagattcagattatgaggagaatgaggaagaacatcgagcagttgataccaatataaggggcccctcaatgcataaaaggatgtggcatgttgtagatcatggtgatgtaggttttgtcacctcatgctcgaatgatggtagtgggaggtctgatccctatgacgtgttggatatcaacaaaccctttccagatggatgtgatttggctttggtgcaaaaagacttggctctgaaagcagcagagattcaaaaacatcgtttgcagattgaaaccaaggctgtgcaactcgcaaagcaacgtctcaagtgggagatgttcaggaagaacaaggacttggaattggaaaagttggcgttggagaatgaacaaatgatgcttcagaataagcggtttgagcttgacctaagacacaaggagctagaacttgagattaagataaagggcaatgctaatcatccatga

SEQ ID NO: 13031 - DNA, 834 bp, Oryza sativa
  Clone ID: TFbOSC400920j.C1.o34.fg
atggagcccgggtgcggggaaggaggaggaggaggaggagggagggatgagcgggtgccgcagtggggcgcgcaggagacgcgggagctgatcgcggcgcgcggggagatggagcgggagtccgccgccgcggccgccgcgcgccgcagcgccaagacgctgtgggaggcggtgtccgcgcgcctccgtgagcgcggctaccgccgcactgccgagcaatgcaagtgcaagtggaagaacctcgtcaaccgatacaagggaaaagaaacatctgatccagaaaatggtagacagtgtcctttctttgatgagttgcatgcagtcttcactgaacgagctagaactatgcaacaacaactccttgagtctgaatctggaccatctgttaaaaagaaactaaagcgaccaagtggtgacctgtcatcggaggactctgatgatgaggaagatggcagtggagatagtggcgatgagaaacccataagaagcagaaagaggaaaattgctgacaagaggcaacaatcgcaacgaatggcagaaaagtcgaggactagcatttcaagcatccatgaattgttgcaggatttcctggtgcagcagcagcgcatggatattcagtggcatgagatgatggagaggcgttcccaggagcggattgtttttgaacaagaatggcgtcagtcaatgcaaaagctagagcaggagagactgatgctggagcacacatggatggagcgagaggagcaacgaaggatgagagaagaagcacgagctgagaaaagggatgccctcctgaccacactcttgaacaaagtcttacaggaagatttatag

SEQ ID NO: 13032 - DNA, 270 bp, Oryza sativa
  Clone ID: TFbOSC900104j.C1.o3.fg
atgccattgacgttgctctgtctcgccttttcaccgtttgcttggcccccttccctcccccctccccctcaaaccccagacgccatcgctggctgtaagaacaaggcagaagcaggagcaggcaggtggcttcggcaggatacactggagctgctcacgatccgacccgagatggacacggtgttgcaggaagcgaccctcaacggggccatttgggaggaaatctccaggatctgtgatgtattttttgttggagattttgtgatgtga

SEQ ID NO: 13033 - DNA, 1062 bp, Oryza sativa
  Clone ID: TFbOSC900025j.C1.o26.fg
atgacgccgcagccccagctgcaaccaccgcagccgcagagcaaggaggccaacaccgtcgtccgggcggcgccgccgccgcaagagcagcacgacacggcggcgtccggcggcggcggcggcgcgtcgtcgtcgaggtggccgaaggcggaggtgcacgcgctgatccagctgcgcacagagctggagacgaggtaccaggactcggggcccaaggggcctctctgggaggacatctcggcggggatgcggcggctggggtacagccggagctccaagagatgcaaggagaagtgggagaacatcaacaagtacttcaagaaggtgaaggagagcaacaagaagcgccccgaggactccaagacatgcccctactaccaccagctcgacgcgctctaccgcaccaaggcggccaacgccgccgccgccgcctcagcctcgccggctccggcgaccaccaccgtgcttgccccggtgccgctctcccagacgccgccgcacgtcgaccacggcggcagcaacggcaatgggaatgggtgggcgagtgccaacaacggcggcggcggcagcagctccgggggcatgcaaacgaaggctagcaacaatggcacggcgacggccggcgggctgcccgtcgtttcggtcgccggcggcaacggcaacggcaacggcgtggcggcgacgacggataacaagggatcgaagcaggtgcccgtcgcgaaggagacggcggggcagaggcagccacagccgttggccatgaaccacaactacggcaacgacagaatggccgacgacatggacagcgacagcatggacgacgacgacgacgacgacgaatttgacgacgacgaaaacgacgacgacatcggcggtggcaagatgcaggtgcagtacgagacgtcgtcccatttccaacggccgcagctgcagaaccagaacgtcgtcgtcggccggccaaacgcgagcggcggcggcggcggtggcgctccgacgacaccggcgggccctccgccgcctgcggcaacaagtgggacgtcattcttggcctgcgtccagtga

SEQ ID NO: 13034 - DNA, 2064 bp, Oryza sativa
  unsure (1)..(2064): unsure at all n locations
  Clone ID: TFbOSC900025j.C1.o23.fg
atgccgccattctcggcagccggcggcgagggggcgccgtcgccgatcagcagccggccgccgccgccggagcaggcggcggcggcggcggcggaggagcagctcaacgggagctcactggagcacgacggggtgctgggcggcgaggagggcgaccggggcgggtcgtcggcgggcaaccggtggccgcggcaggagacgctggcgctgctcaagatccggtcggagatggacgccgccttccgggaagccgccctcaagggccccctctgggaggaagtctccagaacccaaaaagtaatagagaattcagaaggaaccagtacaacccctccagtagttgctttcaatcagaagggagagctacttgttggaacaccagccaagcgtcaagcagtgaccaacccacagaacactttctttggtacaaagcgtctgatagggcggcgctttgatgacccgcaaactcagaaagagatgaaaatggtaccatataaaattgtgaaggctctgaatggtgatgcttggctcccccccccacatggcaagcagtactcaccgagccagattggtgcctttgttttgaccaagatgaaggagacagctgaatcttaccttggaaaatctgtttccaaggctgtgattactgttccagcttatttcaatgatgctcagcgtcaggctaccaaggatgctggtcgcntcgntggtttggggggcgggggggaagaagccattggagctgtgcagctgcgtctcagctttcgctgcttgctcagctgtacaccttccctcagatctgccatttgcgtgaactgcgtggtggacagcctacagttctcatcccatcatgatgttgccatggacttgataaatagtgtcactggagttgacgaggaaggtcgttctcgtcaacgcattctttcctttgctgccaaaagatatgttagtgccatcgaaagaaatccggaagatccagatgcatactataattgggccctagtcctccaggaaagtgcagataatgtggatcctgattctagttcttcaaaagattcattactcgaggaggcttgcaaaaagtacgctgaagctacacgactctgcccaacgctatatgatgcatattacaactgggctattgctattgctgatcgagccaaaatgcgtggacgtaccaaagaggctgaagaactctggaagcaggctataatgaattatgacaaggcagtccagttaaattggaacagcccccaggccctcaacaactggggtttgggactacaggagctgagcgcaattgttccagcccgagataaacaaacaatcataaaaacagctataagcaagtttcgatctgcaatccagttgcaatttgatttccaccgggctatttacaatcttggaactgtcctgtatgggttagcagaggatacaatgaggtctgcaggtccagatgtctctccaaatgacttgtacagtcagtccgccatttatgtcgcagctgctcatgcattgaagccaaattattcagtttatcgcagtgctctacgtctggttcgatcaatgctacctttaccatatctaaaagctgggtatctaactgctcctccagcagacaacaccattgcaccacataaacattgggaaaggtcagaatttgtcttaaaccatgagggactccagcaggtcgatgcctctgaaagcccttctagcaaaccccttggacatatggggagaagcaaaaaatatattaaagtagctgttgaagatatcgtttcagtgtctgcatgctccgatctaacactgccacctggtgctggcctttgtatagaaacaattcacgggcctttgttcttggttgctgatacctgggagtctcttgatggttggttagatgctatacgcttagtgtacaccatatttgcacgaggaaaaagtgatgtattggcagtttatcgagtgaaccatgcgggcatcgaggtcgtaagcccaagtaaaacagttgtcccttcttccataaactcattatttacatcgtttcggaggactggtgctgaataa

SEQ ID NO: 13035 - DNA, 606 bp, Oryza sativa
  Clone ID: TFbOSC101622j.C1.o1.fg
atggatcccttccaccacctcaactcctccttctccaacccctaccacccactcctcgcctccccgccccaccaattagcccccgacccactccccccacctcctcctccgccgccgccgccgctgctccccgccgacccgccgtcgctcgagcgggagcgcctcccgcagtggtcccacgccgagaccgccgccttcctcgccatccgcgccgacctcgaccactccttcctctccaccaagcgcaacaaggcgctctgggaggccgcctcggcgcgcctccacgccctcggcttcgccaggacccccgatcagtgcaagtccaagtggaagaatctcgtcacccggttcaagggcaccgagggcgccgccgccgtcgccgccgcggggacggatcagatgcagggggggcagggcggtggtgcggcggcgagggggtcgtcgtcgtcgttcccgttccatgatgagttgaggaggattttcgacgccagggttgagagggcgcgcgcattggagaggaagaaggttaaggggaaggatcctgatgatgaccacgacggtggtggtgatggggatgaggatgatgaggaggaggcggatcaccac

SEQ ID NO: 13036 - DNA, 2136 bp, Oryza sativa
  Clone ID: TFbOSC101782j.C1.o4.fg
atgcagtccggctacggcggcgtctctgagttccagcagtacatcatggaccccggcgccttcgccatgtccgcgccgccgcagcccgcccaggcggccgctgccgctgctgctgccgcggcggcggcggccggtggccaggagctgggcgcgccgttcaggtaccagccgctgcaccaccacgccctgcctcagcaccaccaccaccaccacccgccgcctcagatgcctccccacttggcgcacttcggcggcgccggtgggattcccttcacgcagcagctgctccaccaggcggccgccgccggccaccacccccacctccagctcttccacgagcagcaccaccaccagaagcaccagcagcagccaccgcccccggctaggtgggccccgcagcaccaccaccaccaccacccgcaccaccatctcggcctcgacgtcgaggcggccgttccggagagctccggtgccggcgccgggagcgctgcctccggcgccgccgcccctccgggcgtccctccgttcctggccgccgccatgagcttcaagctgggggtcgacggcggcggcggcagcggcgccaccggcggaacggacgacgcgctgaacgacgggggcggcgcgggcagcggcatgatgcttcatggaggaggaggaggaggtggtggcggggatgacgaggcggccacggagagcaggctccggcggtggccgggggacgaggaaacttccatcaaagaaccgacctggcggccactcgacatcgactacatacacagcagcagcagcagcaagagggcgccgcccaaggacaaacccgccactcccgactcccctgcgccgccgcccccagcgtattacttcaagaataagcccgacgacaatgccgccgccgcatccgccgcctccgctggcgccgtcaactacaagctcttcagcgagctggaggccatctacaagcccggcagcggaggcccccagacgggctccggctccggcctcaccggggacgacaatgccatgctcgcgccgcccatggctgacctccccgacgccgccgccgccaacccgccgcacctcaacacgtccgagacgtctgccggggaggacgcgcacgccgtggtgcagccgcagccgcagacgcagcagccgtcgggggcggacgcggcgcgccgcaagcgcaagcggcggcgccaggagcagctcagcgcgtcggcctccttcttcgagcgcctggtgcagcgcctcatggagcaccaggagagcctccaccgtcagttcctcgacaccatggagcgccgggagcgggagcgcgccgcccgcgacgaggcgtggcgccgccaggaggccgacaagttcgcgcgcgaggccgccgcgcgcgcgcaggaccgcgccagcgccgctgcacgcgagtccgccatcatcgcctacctggaaaagatctccggcgagaccatcacgctcccaccccccgccgccaaccccgctccgggcgccgacgagcaggacggcgtggggaaggaggtggtggcgtacgacggcgaggggtcgctgcagctgagctcgtcgcggtggccgaagcacgaggtggaggcgctgatccgggtgcggacggggctggaggataggttccaggagccagggctgaagggccccctgtgggaggaggtgagcgcgcgcatggcggcggcgggctaccggcggaacgcgaagcggtgcaaggagaagtgggagaacatcaacaagtacttccgcaaggccaaggagagcggcaagaagcggccggcgcacgccaagacgtgcccctacttcgacgagctcgaccgcctctactcccgctccggctccggcggcggtggtgggtcgtcctcggcgggcggcaatggcggggaggaggcgaagggcagctcggagctgctggacgcggtggtgaagtacccagacgtgcggtgcgcgccgccgggtttcccgttcgacggggagcagaacgaggaagggaggacgaaggacgacggcgacgaggcgcaccatgatggcgacggcgacggcgacgaggaagacgttggcgttggcgttgggagagcgaccgatgatcatgacgaccaagtggatgagagccatgacggccattaa

SEQ ID NO: 13037 - DNA, 792 bp, Oryza sativa
  Clone ID: TFbOSC401779j.C1.o45.gm
ctggtgcccgtgccggcgccgagagcgaaggcggaggacgcctgggcggcagcaggaggagacggcagcgggacgacggcgccgtcgcggtggcccaaggaggaggtgcaggcgctcatcgacctgcgcatggagaaggaggagcagtacaacgacatgggacccaagggcccgctgtgggaggagatcgccgccggcatgcagaggatcggctacaaccggagcgccaagcggtgtaaggagaagtgggagaacatcaacaagtacttcaagaaggtgaaggagagcaacaagcggcgccccgaggactccaagacctgcccttacttccaccagctcgacgccatctaccgcaagaagcacttcgctggcagaggcggcggcggcggcggcgtcacgatcgccgcctcccactccagcctcgccatcgtcaccgtctccgagcaggacaacccgagccagcgtgagctcgaggggaagagcagcaacgacgtcggcaacgtgcagctggcggtgcccctccttgtccacaacgccccagacaagaaggtggaaggctccgaaggcgaaccaaatgtcacagcagcagcggaggagacggacagcgacgagatgtgtggagaatacaccgacgatggcgacgacgacgacaaaatgcagtacaaaatagagttccagaagccaactgcgggcggcggcggcgacggcaacgacgcacccgtgccggcgacaactgcggcagcgacgagttcagccccaaccagcaacaccagcttccttgcggttcagtag

SEQ ID NO: 13038 - DNA, 453 bp, Oryza sativa
  Clone ID: TFbOSC900232j.C1.o13.fg
atggatcccttccaccacctcaactcctccttctccaacccctaccacccactcctcgcctccccgccccaccacttcgcccccgacccactccccccacctcctcctccgccgccgccgccgctgctccccgccgacccgccgtcgctcgagcgggagcgcctcccgcagtggtcccacgccgagaccgccgccttcctcgccatccgcgccgacctcgaccactccttcctctccaccaagcgcaacaaggcgctctgggaggccgcctcggcgcgcctccacgccctcggcttcgccaggacccccgatcagtgcaagtccaagtggaagaatctcgtcacccggttcaagggcaccgagggcgccgccgccgtcgccgccgcggggacggatcagatgcagggggggcagggcggtgaagacaatgagaggttggtcaagaaattataa

SEQ ID NO: 13039 - DNA, 421 bp, Oryza sativa
  Clone ID: TFbOSC101435j.C1.o1.fg
atggatcccttccaccacctcaactcctccttctccaacccctaccacccactcctcgcctccccgccccaccacttcgcccccgacccactccccccacctcctcctccgccgccgccgccgctgctccccgccgacccgccgtcgctcgagcgggagcgcctcccgcagtggtcccacgccgagaccgccgccttcctcgccatccgcgccgacctcgaccactccttcctctccaccaagcgcaacaaggcgctctgggaggccgcctcggcgcgcctccacgccctcggcttcgccaggacccccgatcagtgcaagtccaagtggaagaatctcgtcacccggttcaagggcaccgagggcgccgccgccgtcgccgccgcggggacggatcagatgcagggggggcagggcggtg

SEQ ID NO: 13040 - DNA, 2661 bp, Oryza sativa
  Clone ID: TFbOSC408508j.C1.o6.fg
atggccatttattacctggaaagggagggattaacccacaacatgccaatgcatggccatttttatactcctctgcccctgaaccattggcacgcggataccaccaacgcggctgacatgacacgtgggcccatgcgcatgtgggccccacatgtcagtggcatgaattttatatttttcatctcaaaagaaaaggtattgatgagagtagaaatggtgagctctcctgatgtactgatcattccatcacctccattccccagtggtaacactcgtgggggaggaggaggaggaggaggtagtagcatgcagcagcagcagccagggggaggagggggaggggtgcagcagttcggcgcggtggcgccggagatgtcgccattctcgccggcgggaggaggcggcggggggcggatctccatggcggaggccgcgtcgcccatcagcagccggccgccgccggcgcagcagcagttcgacgagctcggcgtaggcggcggaggcggaggcggaggtgggtttgacgccgaggcgctggcggcggcggcggtcggcgaggagggagccagcggcggcgcgggggggaaccggtggccgcggcaggagacgctggcgctgctcaagatccggtcggacatggacgccgcgttccgggacgccaccctcaagggcccgctctgggaggaggtctccaggaagctggcggaggagggttaccggaggagcgcgaagaagtgcaaggagaagttcgagaacgtgcacaagtattacaagcgcaccaaggagagccgcgcggggcgcaacgacggcaagacgtaccgcttcttcacgcagctcgaggcgctgcacggcaccgccgccggcgtcgtggcagcgccatcgccggtgacgtcgctggccccgccgccggcgacggctgtgggggtgtccggcggggtgcgcgcccccgccgagccgccgcccgcggtggtgatggggaacgtgatgagcttctcgacgtcgaacacggaggagtattccgacgaggaggactccgacgacgaggggaccgaggacatgggcggcggcggcggtgatgagagggggaagaggaagaggttgtcggagggtggcgccgccgcgggcgtcggtggcggcggcggaggaggaggagggagcgggaagatgatgaggttcttcgaggggttgatgaagcaggtgatggagcggcaggaggcgatgcagcagcggtttctggaggccatcgagaagcgggagcaggaccggatgatccgcgaggaggcgtggcggcggcaggagatggcgcgcctcgcccgcgagcaggagatcctcgcgcaggagcgcgccatggcggcgtcgcgcgacgccgccgtcgtgtccttcatacagaagatcaccgggcagaccatcccaatgccgcccatcatcgccgcccccgccatcaccgtcatgcccccaccggcgccatcccagcagcctcagccgccgccaccgccgtctcaccccacccccatcacctccgtcgcgccagctccgccgccgccgccaccagcagcagcagcagcagcagcatcccagccatcgccgcaggccaccaagtcgccattgccggcgacgccgcagacgcaaagcagcatggacattgtcatgacggccgccgaggcgcacgacgcggggtacgacgggtccggcggcggcggggggcagccgtcgtcgtcgcggtggcccaaggcggaggtgcacgcgctgatccagctgcggagcaacctggacaaccggtaccaggaggccgggccgaagggcccgctgtgggaggagatctccgccggcatgcggcggctgggctacagccggagctccaagaggtgcaaggagaagtgggagaacatcaacaagtacttcaagaaggtcaaggagagcaacaagaagcgccccgaggactccaagacctgcccctacttccaccagctcgacgccctctaccgcaacaaggcggctctcaactcctcctcctcctccgccgccgccgccgcaccggccctcccgccgccggagcacgcggagccggcggtgacagtcgccgcgccgatctcgcagacaccgccgccgccgccgccacagcccgtgacgacgaccaagaacggcaacggcaccagcagtacaaacggcgcgaacggcgaaggaggaggaggcggctccgggggcatgcaaatgcaggcgagcaacggcagcgtcgtcgccggcaacaagttcttcaccggcgcggcggcgaagaagccagaggacattatgaaggagatgatggagcagaggccgcagcagccggcggcggcgaacaacgccttcaaccgaacggacggcggcggtggcggcggcggcgtggacagcgacaacatggacgaggacgacgaggatgactacgacgacgatgacgacgacgacgacgacgacgtcgacggcaacaagatgcagtacgagatccagttccagcatcagcaccaccaccagcagccgccgcagcaccgccaccagcagagcgtcgtcagaccgaacgccgccgcctccgcggccgccggcggcaacccgcccggcaccgccgcccccgccacggcggcggccgcaacgacgaccaccggatctttcttggcaatggtccagtga

SEQ ID NO: 13041 - DNA, 1827 bp, Oryza sativa
  Clone ID: TFbOSC401782j.C1.o3.fg
atggccgccgcgttcgacctgcctccggtgaccacgccggcgcccgccgctccaagtgacgtcctgctgccgacgcagccgcaggtgtcgggtcccgaagaattccccgctgccgccgtcaactccaacgacgacgacatgatgatggtcgacgacgtcgtcgtcgccggcggcgtcggcgggagcgggagcaccggcaaccggtggccgcgggaggagacgctggcgctcatcaggatccggtcggagatggacgccgccttccgcaacgccaccctcaaggcgcccgtctgggaggagctctccaggaggcttgcggaattggggtaccagaggagcggcaagaagtgcaaggagaagttcgagaacgtggacaagtactacaagcgcaccaaggaagggcgcaccgggcggcaagacgggaagagctaccgcttcttctcgcagctcgaggcgctccacgccgcggcgccgccgccgccgccgcagcaacggcagggcatgccggtggaggacccgcagccgctggcgatggcgtggatgatgttgcccggggcggcggacctcgggttcttgtcgatgtcgtcggagtctgagtcggacgatgagtccgacgaggaggaggaggaggaggaggcggtggcgccgggcggcggcggtcgggaggggcttggcgatgatggtgacggtgatggcgaagggggcagcagcaccaggaagctgatggccatgttcgaagggatgatgaggcaggtgacggagaagcaggacgcgatgcagcgggtgttcctggagacgctggagaagtgggaggcggagcgcaccgagcgggaggaggcgtggcggcggaaggaggtcgcccggatcaaccgcgagcgggagcagctctccaaggagcgcgccgcggcggcgtcccgcgacgccgcgctgatcgcgttcctccagcgcgtcggtggcgccggcggggagcccgtgaggctctccccttcgtccgccggcgccacccgccacgacgcggccgcggcggggctgcagctggtgcccgtgccggcgccgagagcgaaggcggaggacgcctgggcggcagcaggaggagacggcagcgggacgacggcgccgtcgcggtggcccaaggaggaggtgcaggcgctcatcgacctgcgcatggagaaggaggagcagtacaacgacatgggacccaagggcccgctgtgggaggagatcgccgccggcatgcagaggatcggctacaaccggagcgccaagcggtgtaaggagaagtgggagaacatcaacaagtacttcaagaaggtgaaggagagcaacaagcggcgccccgaggactccaagacctgcccttacttccaccagctcgacgccatctaccgcaagaagcacttcgctggcagaggcggcggcggcggcggcgtcacgatcgccgcctcccactccagcctcgccatcgtcaccgtctccgagcaggacaacccgagccagcgtgagctcgaggggaagagcagcaacgacgtcggcaacgtgcagctggcggtgcccctccttgtccacaacgccccagacaagaaggtggaaggctccgaaggcgaaccaaatgtcacagcagcagcggaggagacggacagcgacgagatgtgtggagaatacaccgacgatggcgacgacgacgacaaaatgcagtacaaaatagagttccagaagccaactgcgggcggcggcggcgacggcaacgacgcacccgtgccggcgacaactgcggcagcgacgagttcagccccaaccagcaacaccagcttccttgcggttcagtag

SEQ ID NO: 13042 - DNA, 194 bp, Oryza sativa
  Clone ID: TFbOSC101435j.C1.o1.np
ttcccacgccggctccatctagggacgagtgcctagaggctctcatcattccgacgggacggggcgaggcggggtcggggcgccccagccctcggggacaaaacgggagcggcccgacccctcggggagatagagggaggggcggcctcatcacccttgggcccgacccccccgagggggtcaggccacgtggg

SEQ ID NO: 13043 - DNA, 247 bp, Oryza sativa
  Clone ID: TFbOSC401779j.C1.o36.gp
cgcttggcgctccggttgtagccgatcctctgcatgccggcggcgatctcctcccacagcgggcccttgggtcccatgtcgttgtactgctcctccttctccatgcgcaggtcgatgagcgcctgcacctcctccttgggccaccgcgacggcgccgtcgtcccgctgccgtctcctcctgctgccgcccaggcgtcctccgccttcgctctcggcgccggcacgggcaccagctgcagccccgccg

SEQ ID NO: 13044 - DNA, 1158 bp, Oryza sativa
  Clone ID: TFbOSC416839j.C1.o1.fg
atgctcctctccgggccgtcgccgcagcagcccaccccgccgctgctcctcccggagagcagcggcgaggacggcggccacgactcctcctcccgcgcggcggcgtcgggcggcggcggcggccccaagaagcgcgcggagacgtgggtccaggacgagaccctctgcctcatcgcgctgcgccgggagatggactcccacttcaacacctccaagtccaataagcacctctgggaggccatctcggccaggatgcgggagcaagggttcgaccgctccccgaccatgtgcaccgacaagtggaggaacctcctcaaggagttcaagaaggcgcgcagccacgcgcggggcgggggcggtggtggcgtgggcggcggcggcgcgggcaccggcggcgggaattgccccgccaagatggcgtgctacaaggagatcgacgacctgctcaagcgccgcgggaagccgacgggcggtggcggcgccgccgtggggagtggcgccgtcaagagccccacggtcacctccaagatcgactcctacctgcagttcgacaagggttttgaagatgctagcattccgttcggccctgttgaagcaagtggtagatcattgctaagtgtcgaagatcgactagaacctgatagtcatccacttgcattaacagctgatgcagttgcaaccaatggtgtaaatccatggaactggagagacacctctaccaatggtggagataatcaggttacttttggtgggagagtcattttagtcaagtggggtgattacactaaaagaataggcattgatggtactgcagacgcaattaaagaagccatcaaatcggcatttggtctaagaacaagacgggccttttggcttgaagatgaggatgaggttgtccgttccttagacagggatatgccggttggaacatacacccttcatctcgataccggaatgaccatcaaactatatatgttcgaaaatgatgaggtccggacagaagacaagacattctacactgaagaggacttccgagactttctctcgcggcgtggttggacactcctcagggagtattcaggctacagaatcgccgatactctggatgaccttcgtcctggtgtgatttatgaagggatgcgatcacttggtgattga

SEQ ID NO: 13045 - DNA, 272 bp, Oryza sativa
  Clone ID: TFbOSC4354j.C1.o1.gm
atggcgctgtttgggtttatcaagcaattgattggatacaacatcattgctttttgccacccctccacagtcttcatatttggtaaaagtactcgggagatcatggcgaggatgattgaagcacacggctttggaggtgacgagaatggctcgtcggctgacaacaggtggcttcggcaggatacactggagctgctcacgatccgacccgagatggacacggtgttgcaggaagcgaccctcaacggggccatttgggaggaaatctccag

SEQ ID NO: 13046 - DNA, 1269 bp, Oryza sativa
  Clone ID: TFbOSC24072j.C1.o1.fg
gaggaagtcctacagattgtcaaaccacagcatttcttgcctgttcatggagaactcctgtttcttaaagaacatgaattacttggaagatctactggcataaggcacaccactgtaattaaaaatggagagatgcttggcgtgtcacatttaagaaacagaagagttttgtctaatgggtttgttgcattagggaaggaagatttgcggctaatgtatagtgatggcgataaagcttttggaacatccactgatctctgcattgatgagagattaaggattgcatctgatggcgttatttttgtcagcatggaaatcttccgacctcagaaggaacttgcttcatcacagtcaggattgaaagggaagttcaaaataacaacaagatgcctatggcttgataatggaagactattagatgcactttacaaagctgcatatgctgcattatcaagttgtccagtgaattgtccacttagtcacatggagaggatggtatctgaaatcttgaggaaaatggtaaggaagtatagtgggaagaggcctgatgtcattgcggttgctacagagaacacaacagtgagttttgtagaagactcagaaactaaatcatctggaaagtttggatctttctcagctcctaggcattcgagcaggagttcaggtaggagtcttgaagaaagtgataaatcatgcccagagaatacagagggagaggctaaagaaaatcttcctgatgtcctgagaacaacacgtgatgatgcaaccacaagctccaatggcgaagcatttttctcctcagatttgcataagcctaaaacactagagcatttttgggactcattcaaatcccctacagctgtaaaaattgcaagaattgtcaatggttcagctcaagggagtaaatcaaagattggcaagatcagcatagtgggtaaggactctagcgatccttcttctgctccagttaaatcttcaaaaaagaacaagtggaagcctgaggaaattaagagcttaattcagatgcgtggcgaaatgaatgagcaatttcagactgtgaaagggagaatggttctgtgggaagagatatcttctagcatgttgagccaggggataagtcgtacaccagcacagtgcaagtctctatggacatcattggttcagaaatatgaggagagcaagaaagatgaggaaagcgtaaagacgtggccgtatttcttggacatggacagggttttatcaagccaaggggaaatggcaacccaatga

SEQ ID NO: 13047 - DNA, 2649 bp, Oryza sativa
  Clone ID: TFbOSC900303j.C1.o3.fg
atgggggcgctcgcctccctctcgtccctctccccctgcgggctcgcgcgccgccgctcggcctcctcagccgcctctatctcatgctgcgcggccccgcccccgccctccgcgaaaggatctcaagaatccagaactccacgtagaagggtgaggaaaactgagggtgccaccaagagcctggaagattcagtcaagcgaaagatggagcagttttatgaaggattggatggtccacctctccgagtccttccaataggtggccttggagaaatcggcatgaattgcatgctcgtagggaactatgaccgttacatattgatagatgcaggggtcatgtttccagactttgatgagttcggtgtgcaaaagattatcccagacacaacattcatcaagaaatggagtcacaaaatcgaagctgttattataacgcatggccatgaagatcacatcggtgcgttgccctgggtaatcccagcgctggattcaagcacaccgattttcgcatcatcttttaccatggagctaataaagaggcgtttgaaggagtttggaatttttctctcgtccaggcttaaggtttttagagtaaggaagagatttcaggctgggccatttgaggtggagcccctccgtgtaactcattcaattccggactgctgtggcttagtgcttcgttgtgctgatggcataattttccatactggtgactggaaaattgacgaatcaccagtggatggaaaaatatttgatcggcaagcattggaagagctctccaaagaaggcgttacacttatgatgagtgattctacaaatgttctatcccctggaaggtccatcagcgaatctgttgttgctggttcattgttgcgacatatttcagaagcaaaaggaagagtaattaccacacagtttgcttccaatatacatcgtattgggagcatcaaagctgctgcagacttaactggtcgaaagctggtatttgttggaatgtcactcaggacttaccttgatgctgctttcagggatggaaagtcaccgattgatccatcaaccttggtgcacttaatagaatctaggttcttgctgaaggttaaggtagaggacatggatgcctatgccccaaatgatcttctagttgttactacaggttcacaagcagagccacgtgcagctctaaatcttgcatcttttggaggaagtcatgcccttaaactatccaaagaggatgtccttctgtattctgctaaggttatccctggaaatgagtcacgtgtaatgaagatgttaaatcgccttactgagcttggtccaaaaattgtgatgggaaaggatgctggtctccatacctctgggcatgcctatcacgatgaacttgaggaagtcctacagattgtcaaaccacagcatttcttgcctgttcatggagaactcctgtttcttaaagaacatgaattacttggaagatctactggcataaggcacaccactgtaattaaaaatggagagatgcttggcgtgtcacatttaagaaacagaagagttttgtctaatgggtttgttgcattagggaaggaagatttgcggctaatgtatagtgatggcgataaagcttttggaacatccactgatctctgcattgatgagagattaaggattgcatctgatggcgttatttttgtcagcatggaaatcttccgacctcagaaggaacttgcttcatcacagtcaggattgaaagggaagttcaaaataacaacaagatgcctatggcttgataatggaagactattagatgcactttacaaagctgcatatgctgcattatcaagttgtccagtgaattgtccacttagtcacatggagaggatggtatctgaaatcttgaggaaaatggtaaggaagtatagtgggaagaggcctgatgtcattgcggttgctacagagaacacaacagtgagttttgtagaagactcagaaactaaatcatctggaaagtttggatctttctcagctcctaggcattcgagcaggagttcaggtaggagtcttgaagaaagtgataaatcatgcccagagaatacagagggagaggctaaagaaaatcttcctgatgtcctgagaacaacacgtgatgatgcaaccacaagctccaatggcgaagcatttttctcctcagatttgcataagcctaaaacactagagcatttttgggactcattcaaatcccctacagctgtaaaaattgcaagaattgtcaatggttcagctcaagggagtaaatcaaagattggcaagatcagcatagtgggtaaggactctagcgatccttcttctgctccagttaaatcttcaaaaaagaacaagtggaagcctgaggaaattaagagcttaattcagatgcgtggcgaaatgaatgagcaatttcagactgtgaaagggagaatggttctgtgggaagagatatcttctagcatgttgagccaggggataagtcgtacaccagcacagtgcaagtctctatggacatcattggttcagaaatatgaggagagcaagaaagatgaggaaagcgtaaagacgtggccgtatttcttggacatggacagggttttatcaagccaaggggaaatggcaacccaatga

SEQ ID NO: 13048 - DNA, 465 bp, Oryza sativa
  Clone ID: TFbOSC5909j.C1.o1.fg
atggcgatgctggggagctcgtcggcggtggtgctggagctgatgacgatggggtaccagtcggcggcgtacctcggcgagctgctccgggcggcgtccccggcgcaggcaggggatgagcagcaggagctcgccgcggagatcctccgctgctgcgaccgcgtcatcgccaagctgaaccggggaggagccactggtgctactaccggcaagaagcggaaggcggcggagtccgccgccgccgccgccgtgacctccccttctctccccgtcacgccgaccaaaagaagggcgcgtggcgcggaggcggtgagggaggtgaggagcggcacgacgacggacgggttcatctggaggaagtacgggcagaaggagatcaatggctgcaagcacccgaggctctactaccgctgcgcgttcaggggccagggctgcctcgccacgcggcgggtgcagcagtcgtag

SEQ ID NO: 13049 - DNA, 990 bp, Oryza sativa
  Clone ID: TFbOSC404464j.C1.o5.fg
atggcatttggtcaagataccatagagcagctgtaccgggagctcgccggcggccgccgcctcagcgccaagctccaggcgctgctcgaaggccccctcgatagccgcggccagaaggaggccgtcgatgttagcagagagctcgggcgagtgttcatggtgtctctctacatgctgaagccttgcagcaacagcagcagacgaccggaaggagtgaccaggacggcgccggagacgaggactgacgatagcatttgcttgcacactccggcgagggttaaacgcgttaggttgtacttcaagtgcacgttcagccgcgagcggagttgcgcggcgaagaagcaagtgcagcagcgggacgccggcgagccgcccatgttccttgtcacctacctcaacgagcacacgtgccagcagccgcaagctgttcccggcacgcccaacactgcaggtagctcgccgacgacgacgagccggcaacgacagtcgtcctcctccccgccggcggaaatgttggacctgacgatgaacggcgccggcctctttagccgtcttcttttaccccacgccgtcggcggcggcggcagcgccgccgaagaggaggccgccatcgtcacgtgcctcgcggcggtcatcagcggaggaggcgccgcagccgctccgccgccgttgatctggccgacatcggccccagaggcggcgttcgtggcgttcgcggcgggacactcggcgagcgccgcggacgagagcgtggcggacgaggcggcggcggcgcagattgccgacatggactactgtttcggccagtacgatcagtcaacgttcggggcggcagcagcagcggatcaccgtgtgttgatcggtgacgacggcgacgtgcagcgcatcgtcgcggcgcggatcgcggacacggtgtgcccgcggtacacgcgcgacacgagtgcatgggagactgctgggacgtcgtcgatgagaggatcgatcgattga

SEQ ID NO: 13050 - DNA, 885 bp, Oryza sativa
  Clone ID: TFbOSC413087j.C1.o3.fg
atggtggagctctgcggcggcgagggggaggggcagatcatgctggcgacggagctggcccagctgcgggccatggcgagggagctggaggcgaagatggacccggacagggtggccgcgcgggagctctgcagggcgctggcgtcgtccgtcgaccggtccatccgcctcgccgcgtcctgcttcccgccgccggagcacccgccccccgccgccggcaatgccggcagggacgccgcgttcaagaagaggcaagtcatggttcccggtcatggtggtttaatttcagggttgagagatcgccggagcaacgctctgacatgtgtttcgatgcaggaaggggatggccaaggtgaggaggcaggtgagggtgacgtcggtgcaggacacggcgtcgctggacgacggcctgagctggaggaagtacggccagaaggacattcttggcgccaaatacccgagggatgcaacgcgaccaagcaggtgcagcgcgccgacggcgacccgctgctcttcgacgtcgtctaccttggcgaccacacctgcggccaggccgccgtcgccgccgccgcccagagcgcgccgcccgagcatgccggccaggagcagcagaggcagagctcgctgctcgctgcgggaacggaaggaattcatcagcaggtagtggcagagcctatggcggcgccgttcttgttcacctcgacggcggccggcggcgtcgacgacggctacttctccttcatctcgccggcgaactccgactgccagttcagcagcgacttctcggcgggcagcgtcggggttgacatggaccacgaggctcgtttcgaagatcttttctcgagcactcttgagtttttccaatcggagattcagaatctgtag

SEQ ID NO: 13051 - DNA, 1455 bp, Oryza sativa
  Clone ID: TFbOSC404471j.C1.o29.gm
atggttaagaggagcgacaacatggacagctccagtgaatgttctagaggagcccataaaaggcttctgcaggacagtaggagctatgaccaggagaacgctatgaagtgctactacaggtgcacgtaccatcaggaccatggctgtccagcgagcaagcacgtggagcagcacaactcggaggacccgcctttgttccgggtgatctacaccaacgagcacacatgcggcaccagcaattctgcctccgattacatggcttcctccatgcaaatccagcagattgccgacgcctccttgagaaaggcacaggcggcggaaagactgagaaaggcagaggtggaaacacctcgcctgatgcattctcctcctcctcgctgcagcggcggctacaacatggcgatgaaagaagagaaggatgtgatcgtctcctcgctgctcaccgtcatcagaggctgtcacattgcagaatcagctggtggttttgataaggggatgtctagacaacgtctccaaggagagaacgacggaaacaccaccgtcgccgtccgccaagctccattgctccaccgccatcaaaacctctgccggtgtgtgggtacactgcaccggcgcccccgccggccagtctccgcatgcagccacctcaccgggctctgcctccaccgacatcacctctcgctgcgcagccatcacgcaccggccgtcctcgacgtcgccggccaagcctacacgcgttggacagttgccggccgcaactccttcagcgagccgacaccacctccgccgtcgcgggctgccggccgagccgacctcaccggccaaccgcaaccaccagttgctgcgcctccgcacgccgtcgcccgcgcatgttgccacctcctctgcgagcgcggcctcttgcccctccgccaccgtcacggtttccggggcctccgcaccatcgcacgtgccttcaccagcctccgcgccgtcgcaccgtcgccgccagccactgcctccgtcgccaatagcgacggctggatgctcgtcgtccggccagatccagccgtcgcagagtcggacctcacccgccaccgcgccaccgggcgccaccgtccgtcgccagcagaagaccccgccaccggccacttacctgccagatccaggcgcggatctggtggtcacttctaccactgtcatcacttccaagcgccggtgccacctttgccaaacgtcgccgccacaccgcactaccacgccgatgccgccgacatcctccccgctagatccggccggacggcacggatctggacggttccgccgtcccaaacgccgagtagcccccctgcccttgcgtggagagacgaaagcgttatctttgatctcgccgggcacgaactcgaggaggaagactaccctgttgtcgactacgagtcagaacttcagaccgccatatcgacaacagttagatag

SEQ ID NO: 13052 - DNA, 161 bp, Oryza sativa
  Clone ID: TFbOSC16135j.C1.o1.gm
gttgtacttcaagtgcacgttcagccgcgagcggagttgcgcggcgaagaagcaagtgcagcagcgggacgccggcgagccgcccatgttccttgtcacctacctcaacgagcacacgtgccagcagccgcaagctgttcccggcacgcccaacactgcag

SEQ ID NO: 13053 - DNA, 654 bp, Oryza sativa
  Clone ID: TFbOSC29687j.C1.o24.fg
atggcggcggcggcctcctcgtcgacgacctccgccgccgccgccccggccacggccaccaccaccgtcgccttctccttccagcatcccacgcccacgccgtctcaccaccaccaccaccatggcgtcctaggttacagccccctcgtcctcgaccaccaccacccaaccaccgccgccgcctcctcgcacgcgccctctcctcccaccctccaccaccaccacggcggcggcctccacgccgccgcgcctcctccgagatcgtcgccgccgcatccatggtcttgcgaggaaggcgatcatcgagggaggccgcagatggggaataagggcgaggcggcggcggcgatgggcgccatggggatcaacgacgccggcaacaacacggcggcggcggcggcggcgcagcatcatctgggggttggcgcggtgaggatgaagaaggttgggggaggaggaggaggaggagggaaggcgcggcggaaggtgcgggagccgagattctgcttcaagacgatgagcgacgtggacgtgctcgacgacggctacaagtggcgcaagtacggccagaaggtcgtcaagaacacccagcacccaagggcttttgaactgccattcttcccatgcatggtgtgtgacacttttgctagatag

SEQ ID NO: 13054 - DNA, 587 bp, Oryza sativa
  Clone ID: TFbOSC5800j.C1.o3.gm
gaccatatctgatgggagatgtgctgcgagctcaggccaccgcgtcggcggaggaggtggccggcggcgtctggccctgcgagctcgacgaccacctcataggcgagctcctcggtgacgacggcctgttcgtcccggccgccgaacaccccaccctctactactcgttcggcgcggggtcatcagcagccgccgccgccgcgccgtgcaacgggggcggcagcgctgatcacgagcggcggccgcggccggcaccggcggtgagcagggatctgtgctcggtgtactcaggcccgacgatccgcgacatcgagaaggcgctgtcgtcgtcggcgtcgccccggccgccgtacccctccggccgccgctacagctctctgtatttggtggaagcggagagcaagtacacgagcaaggtgaggagctgcggcggcaagatgccggccgacgggtacaagtggaggaagtacgggcagaagtcgatcaagaacaacccacatcccagaagtaacttactgttaacagtgaaatttggtaagcccggagtagtcatcggcttagagttagcatcggcttcgaagtcctga

SEQ ID NO: 13055 - DNA, 597 bp, Oryza sativa
  Clone ID: TFbOSC408573j.C1.o16.fg
atggcgaagggaaacccttgcccgcgtgcgtattaccggtgcaccgtggccgtcggctgcccggcggcggtggccaagtcgtcatccgccaatgccgcgaccacggagatgctcgagctcttgcgggatttcagtgactactcgagcttcaactcggatatctcaagtgagctcgagcggcttgcggcggcggtgacgcctagatctgacgcgccgcaggtggctgctgtggatctgaacggcggcagcagcagcagtagcaggctgacgacgacgacgccaccaccactgctgcaacttggatgccggcaagccctccccttcatagtccccaccggtagatgcgcttctctcgccgccgtcgtcgaggaaatcagcggccggcgtgcttctccgccatggatgtcggcagctggtgatgcggtcgcagtgataccctcatatgagaatcacgtcaccgaagtctctacttgcgtgaagcattcctcctctcacaccgatattgaccgtctcaggctaagtatcacaaccccgttccatgattatgacgttattaccctcattgataaaatcatcaatccgttattctggtgttaa

SEQ ID NO: 13056 - DNA, 984 bp, Oryza sativa
  Clone ID: TFbOSC900417j.C1.o4.fg
atggacgcggcgtggcgcggcggcgttggctgctcgccggtctgcctcgacctctgcgtcgggctgtcgccggtgcgggagccgtcggcggcgaggcacgagctgcttgaccggccggccggctgccgcggcggtggggattccaagtcgatgaccaatgacgaggcgaagatcgtcgaggcgaaggtcactcagatgagcgaggagaatcggcggctgaccgaggtgatcgcccgcctgtacggcggccaaatcccgcggctcggcctcgacggctcggcctcgccgccgcggccggtgtcgccgttatcgggcaagaagaggagcagggagagcatggagacggcgaattcctgcgacgccaacagcaacaggcatcagggcggcgacgccgaccacgccgagagcttcgccgccgacgatggcacctgccggaggatcaaggtcagccgggtgtgcaggcggatcgacccgtcggacacctccctggtggtcaaggacgggtaccaatggcggaagtacgggcagaaggtgacgcgcgacaacccgtcgccgagggcctacttccggtgcgccttcgcgccatcgtgcccggtgaagaagaaggtgcagcggagcgcggaggacagctcgctgctggtggcgacgtacgagggcgagcacaaccacccgcacccgtctccgcgcgccggcgagctcccggcggcggcggggggggccggtggctcgctgccgtgctccatctccatcaactcctccggcccgaccatcacgctcgacctcaccaagaacgggggagccgtgcaggtggtcgaggcggcgcatccgccgccgccgccggacctcaaggaggtgtgccgggaggtcgcgtcgccggagttccggaccgcgctggtggagcagatggccagcgcgctcaccagcgaccccaagttcaccggcgcgctcgccgcggcgatcctccagaagctgcccgaattctag

SEQ ID NO: 13057 - DNA, 1191 bp, Oryza sativa
  Clone ID: TFbOSC401425j.C1.o34.fg
atggctaagatgcttcctcctccgagccagtcagtcccctctcgcccaccttcttggctatatattcctcctcgtcgtcgccatggcaccttcactagctcatgcgcatttcggctctcgccttcttcgccttcttctcctcctcctcctgttcttgattttcagtatattcaattcatggattcgtggattgagcagacttccctgagcttggacctcaacgtcggcctgccgtcgacggcgaggagatcatcggctccggcggcgccgattaaggttctcgtggaggagaacttcttgtccttcaagaaggatcacgaggttgaggcgctggaggcggagctccggcgagcgagcgaggagaacaagaagctgaccgagatgcttcgggcggtggtggccaagtacaccgagctgcagggacaggtcaacgacatgatgtcggcggcggcggcggcggcggtcaacgccgggaaccaccagtcgtcgacgtcggagggcggctcggtgtcgccatcgaggaagcggatccgtagcgtcgacagcctcgacgacgccgcccaccaccgcaagccatcccctccgttcgtcgccgccgccgcagccgcggcctacgcctcccccgaccagatggagtgcacgtcggcggccgccgccgccgccgcgaagcgcgtcgtccgcgaggactgcaagcccaaggtctccaagcgcttcgtccacgccgacccctccgacctcagcctcgtggtgaaggatgggtatcaatggcggaagtacgggcagaaggtgacgaaggacaacccgtgcccgcgagcctacttcaggtgctcgttcgcgccggcgtgcccggtgaagaagaaggtgcagcgcagcgccgacgacaacaccgtcctcgtcgccacgtacgagggcgagcacaaccacgcccagccgccgcaccacgacgccggcagcaagaccgccgccgccgccaagcactcacagcaccagccgccaccgagcgccgccgccgccgtcgtccggcagcagcaagagcaggcggcggcggccgggccgtcgacggaggtggcggcgaggaagaacctggccgagcagatggcggcgacgctgacgagggaccccgggttcaaggcggcgctcgtcacggcgctctccggccggatcctcgagctctcgccgaccaagaactga

SEQ ID NO: 13058 - DNA, 924 bp, Oryza sativa
  Clone ID: TFbOSC401918j.C1.o38.fg
atggccgtggacctcatgggcttcagcccgcgcggcggctgccgcccgtccgtggagacggagcagctcgctttccaggaggccgccgccgcggggctccgcagcctcgagctgctcgtctcgtcgctctccgccgggggggagcaccaccaccgccgccgcccgcaggagaagcagtcttcgccgccgctgggggagatcgcggaccaggcggtgtccaggttcaggaaggtgatctcgattcttgaccggaccggccacgcccgcttccgccgtggccctgtcgtcggagcggcagctgcggaggcggctgccgcggcggcgtcggcgtcaccgtcgtcgtctcctgtctcgccgcctctcccgccggtgacgacgcagccggcggccgccgtgaagagcctgacgctggacttcacgaatcccgccaaggtcgcggcggcgtcggtgacctcgacgtcgttcttctcgtcggtcaccgccggcggagacggcagcgtgtccaagggccggagcctggtctcctccgggaagcccccgctcgccggcggcgtcaagcgcaagcacccgcacccgccctgcgccgccgccggcgacggccacggccacggcgcaggccacgcgcacgcgcacggcgggtgccactgctccaagaagcggaagcagcgggttcggcgcacggtgcgcgtggcggcggcgagcgcgcgggtggcggacatccccgccgacgagtactcgtggcgcaagtacgggcagaagccgatcaaggggtccccctacccgcgcggctactaccggtgcagcaccgtcaagggttgccccgcccggaagcacgtcgagcgcgccgccgacgaccccgccaccctcgtcgtcacctacgagggcgaccaccgccactcgccgccgccgccgccgcttgtttaa

SEQ ID NO: 13059 - DNA, 963 bp, Oryza sativa
  Clone ID: TFbOSC419986j.C1.o4.fg
atgaagaacagcagcaacaagaggtcactagttgctgatcaatggcatccttcttctgtttgctgcgaccaccgggcggcgttgagggagatagccaaggggcagtctctggtgacgcagctccgggccatcgtgttgccggcgcttcactccgacgagcgatgcgacctcgctgctcagatgttggagggcatcctcgactgctcgaggaaggccgtctctcagctgcagcttctgctctcttctccacatgatgatgatgatcatcatcatgttgatgacaaaaggagagttaggaagatcatttcctcttctgatgatgatgatcactgcagcagcaaggcagctgaggatgacaacgccaagcctcttcgccaacacaagagaaggaggtttggtgattcggtgtcgcttgaaactccagtgccacactacgatggccaccaatggaggaaatacgggcagaagcacatcaacaactccaaacacccaaggagctactacagatgcacctacaggcaggaagagaagtgcaaggcaacaaagacggtgcagcagcgagaagacctgcaccacgccaacagctacaatggcgatcaccccatcatgtacacggttgtctactacggccagcatacctgctgcaagggccctgcggcattagctgatgatcatgtcgtcgtcgaagcatcacagattagcaccgacagccattgccagagtccgagcagcagcagcgatctgcaggctgcggaagtacacgccggtaacagcagccagtgcagcaacatctccgtcacatgttcaccatcagtcgtcgttgaggattgcaataagcttcttgacatgatgccagctgctgatgaactgaccgctgatgtcttgttgttcgacatgactgcatatgcacctttagatttggatatcaactgggaaatggatacaaatgctctgtgggtttga

SEQ ID NO: 13060 - DNA, 951 bp, Oryza sativa
  Clone ID: TFbOSC401064j.C1.o110.fg
atggcggccggagaggaggtgatggatcggtcgacgtcggccgaggacgggtactgcagcgccggcacggactcgccgcgggcggagtccgtcgacgagcaaggggccgccgaggagtcgtcgccccggggagggcagaagcgggagctcccctcgccgtcggcttcgccgtcgtccccgctgccacctgccgcgaagcgcagccggaggtcagtggagaagcgggtggtgtccgtgccgatcgcggagtgcggcgaccggccgaagggcgccggggaggggccgccgccgtcggactcgtgggcctggcgcaagtacggccagaagcccatcaagggctctccctacccaagggggtactacaggtgcagtagctccaaggggtgtccggcgaggaagcaggtggagcgcagccgcgccgaccccaccgtgctgctcgtcacctactccttcgagcacaaccacccgtggccgcagcccaagagcagcagctgccacgcgagcaagtcgtctccccggtcgacggcgccaaagcctgagccggtggctgacggacagcaccccgagccagcggagaacgaatcgtcggcgtcggcggagctggaggtaccggagccggagccggagcaggaatctgagccggttgtgaagcaggaggaggagcagaaggaggaacagaaggctgtggttgagccggcggcggtcacaaccacggtggcgccggcgccggcggtcgaggaggaggatgagaacttcgacttcggatggatcgaccagtaccacccgacgtggcaccggtcgtacgcgccgctgctgccgccggaggagtgggagcgcgagctgcaaggggacgacgcgctgttcgcggggctcggcgagctcccggagtgcgccgtcgtgttcggccgccggcgcgagctcggcctggcggccaccgcgccgtgctcctga

SEQ ID NO: 13061 - DNA, 513 bp, Oryza sativa
  Clone ID: TFbOSC400222j.C1.o67.fg
atgacgtccttggactggcagtcgctcctgcagacgtgcctgcaggtaccgcctccggtgctggagcagcagcaaccggcggcggcggcgcaggcggatcagtacagcggggagaacgatcacggcgatctgcaggcggccgagagcagcggggcaggtaacaaggagaagcaggtgatggcgaagggcggggcggggaggccgtcggggacgaagaagaaggcgagccggccgcggttcgcgttccagacgaggagcgacaacgacatcctggacgacggctaccgatggaggaagtacgggcagaaggccgtcaagaacagcaagcaccccaggagctactaccggtgcacgcaccacacgtgcaacgtgaagaagcaagtgcagcggctcgccaaggacacgagcatcgtggtgactacgtacgagggcgtgcacaaccacccctgcgagaagctcatggaggccctcacccccatcctcaagcagctccagttcctctcccagttctaa

SEQ ID NO: 13062 - DNA, 1668 bp, Oryza sativa
  Clone ID: TFbOSC401716j.C1.o59.fg
atgacaacctcgtcgtccgggagcgtcgagacgtcggccaattcgcggctggggacgttctcgttcgccagcgcgagcttcacggacctcctcgggggaaacgcgggagccggcggcggaggtgtgtccaggtacaaggccatgaccccgccttcgctgccgctctcgccgccgccggtgtcgccgtcgtccttcttcaacagcccgatcggcatgaaccaggccgacttcctcggctcgccggtgctcctgacctccagtatcttcccgtcgccgacgacgggcgcattcgcgtcgcagcactttgactggaggccggaggtggcggcggcgcagagcgccgatcaaggcggcaaggacgagcagaggaattcctactccgacttctcgtttcagacggcgcctgcgagcgaggaggccgtgcgaacgacgactttccagccaccggtcccaccggccccactgggggacgaggcatacagaagtcagcagcagcagcagccatggggctaccagcagcagcctgcaggcatggacgcgggtgccaacgcggcgagcttcggtgcggcgccgttccaggcgacctcgtcggagatggcgccacaggtgcagggtggcggcgggtacagccagccgcagtcgcagaggcggtcgtcggacgacggctacaactggcgcaagtacgggcagaagcaggtgaaggggagcgagaacccccgcagctactacaagtgcaccttcccgaactgcccgaccaagaagaaggtggagcggtcgctcgacggccagatcaccgagatcgtgtacaagggcacgcacaaccacgccaagccgcagaacacgcgcaggaactccggctcgtcggcggcgcaggtcctgcagagcggcggcgacatgtcggagcattccttcgggggcatgtccggcacagcggcgacgcccgagaactcgtcggcgtcgttcggtgacgacgagatcagagttggctcccctcgggccgggaacggcggcggcgacgagttcgacgacgacgagccggattccaagagatggaggaaagacggtgacggcgaggggatctccatggctggcaaccggacggtgcgggaaccgagggtggtcgtccaaaccatgagcgacatcgacatcctcgacgacggctaccgctggagaaagtacggccagaaggtggtgaagggcaacccgaacccaaggagctactacaagtgcaccacggccggttgccccgtgcggaagcacgtggagcgcgcgtcccacgacctgcgcgccgtgatcaccacctacgaggggaaacacaaccacgacgtgcccgccgcgcgggggagcgccgcgctctaccgccccgcgccgccggcggcggccgccaccagcagccacccgtacctgccgaaccagccgccgcccatgtcctaccagcccacggggccacagccgtacgcgctgaggcccgacgggttcggcggccagggaccgttcggcggcgtggtcggcgggagcagcttcggcggcttctccgggttcgacgacgccaggggctcgtacatgagccagcaccagcagcagcagaggcagaacgacgcgatgcacgcctcgagagccaaggaagagcccggagacgacatgttcttccagaactcgctctactga

SEQ ID NO: 13063 - DNA, 852 bp, Oryza sativa
  Clone ID: TFbOSC404471j.C1.o19.fg
atggcgtcgccgcggctgaagagggagcagtcgttcgacttcgaggaggcgagcgcgcaggaagccgtgggatccgcgtcggcgtcgtacagccctcccgggggcggcggcgtctttggcatctcgccgccggagtcctcgccgcgcgacggccggaagagaaggaaggatagaccatcattggtgaaacatacgttcacacctcattttgatggtcatttgtggaggaagtatggccagaagaacatcaaggactctgctttccctaggttatattacagatgctcttaccgtgaggacagacagtgccttgcctccaagctggtgcagcaggagaacgacgacgacccgccactgtacagggtcacctacacgtacgagcacacctgcaacaccacgcccgtcccgacccccgacgtcgtggccgagcagccgccgccgggcgccgccggcgacgcgtacctcctcaggttcggctcctccgctggcggcggcggcggcggcgctcatcagcagcagaccgagcgagaacgacagcagcaaaatacagcgagaagaaggccattcatgatgctgagcttcgattctagtagcagccatcagctgcacgagcagccgcacgcgttccctcccgacggccagctgccggccacggccgcggccgcgtcgccgtcgtcgttcacggcagccgaggcgttggcggcgccgccgctcacgacgacgatgaacgacggaggcgacctgttctcgacgtgggacgcgctcaggtatggtttggactatgaccacgggcaccttggtaaccatgtttatctccctgatgactgtaatggtggtgatgataattactga

SEQ ID NO: 13064 - DNA, 990 bp, Oryza sativa
  Clone ID: TFbOSC419986j.C1.o5.fg
atggaggaggcctactgcatgatgatggtggggagggagagggagctcgtggctgagctgcgtcacctcctcttcccttctccgtctcccactccgaccacccctgcgagccactctactacggcgctcgccggcgacggcgagtgctgcttgccgccagggctgacaacgacgacgacggtgtccggtggaggacggcggcgggggaggaagagagtcaaccgcgacaatgataatgtcaagctgcttctgcaggcagatgatgatcaggaggccgtaatagctgatcatggcgatgcaaatgccaagcctcttcctaatttcaccaaaacaagaaggaggaagcagcaggcgacgacatcaacgatggtaacgacggtgccagatttcgatgggtatcaatggaggaagtatggtcagaagcaaattgaaggtgccttgtaccccaggagctactaccggtgcaccaacagcacaaaccagggctgcctcgccaagaagacggtgcagcgcaatggcggcggcggagcagcagggtacacggtggcctacatctcagagcatacttgcaagtccatcgaaccatccctgcctccagtcatcctcgacaccaccgtccgtactaccaacaaccaccagcagcctgcagctgctgaatcaccggcggcgacatcgtcgtcgtcgtcgaatatggtcatgacgagtagcgagactggtaattggagcggtcagcacggcgcctacgcatgccgacagatgatcgccgccgatgaagagtactgctgctgggacactccggcgacgacgacgaccacctctggctctaatggtggtaacagtacttgtgctgaggatatagaattattgagcaggccgatcaggtcgccgatgcacatcgcggcggaagggaattggatggacgatttgctccttgttactgacggccttatcgttatatccaactccagcatcacccatttcctcacttaa

SEQ ID NO: 13065 - DNA, 825 bp, Oryza sativa
  Clone ID: TFbOSC401580j.C1.o5.fg
atggccgccggagcggacgagcggtgccgcgcgctggtgtccggcctgctgtcgtcgatcgaccggtctataagcatcgcgaggtcgtgctgcacggaggccgccgccgccgggcgcctgacccagcaggccggcgccgcgcctgagtcgccgccgtccgccgacggtagcgccggctcggacctcggcgccgactcccggtgccgcgccaatgcggcggggccgtgcaagaagaggaagacgctgcccaagtggagcaagcaggtgaaggtgaggtccgtgcaggacgtcggccccctcgacgacgggttcagctggaggaagtacgggcagaaggacatcctcggcgccaagtacccaagagcctacttccggtgcacgcaccggcacacgcagggctgccacgccagcaagcaggtgcagcgcgcggacggcgacccgctgctcttcgacgtcgtgtaccacggcgaccacacctgcgcgcatggcgtgcgctccgccgccgccgccatcgacggccaggccgcggcgagcgcggagcaaaagcatcagccgacgccgccgcaggagcagaacgccgtctcggtcgcgttcacctccatggccgtcgtcaacgcatcgacgtcgtcgcccttcgtgtccccggcgatgtcggactgccagattagctacgagctgggcggtggcagcatggccggagtccgcaacgtgcccgacgtggagcttgcctccaagacgaactcctccatgggagacgacatggagttcatgttctcgctggactccgatttcttggacacctacaagtactccagctatttctaa

SEQ ID NO: 13066 - DNA, 783 bp, Oryza sativa
  Clone ID: TFbOSC415412j.C1.o2.fg
atggagggctcgtcgtcggacggcagcaggtacggcggctccgggaggtgcgcgctggtggcggagctggtgcagatgcaaggcatggtgaggcaactggaggcggagatgggcacgcatggaggcggcggcggtgggggtggtgggggcggcgccgatggccgccggagcggacgagccggtgccgcgcgctggaagacgctgcccaagtggagcaagcaggtgaaggtgaggtccgtgcaggacgtcggccccctcgacgacgggttcagctggaggaagtacgggcagaaggacatcctcggcgccaagtacccaagagcctacttccggtgcacgcaccggcacacgcagggctgccacgccagcaagcaggtgcagcgcgcggacggcgacccgctgctcttcgacgtcgtgtaccacggcgaccacacctgcgcgcatggcgtgcgctccgccgccgccgccatcgacggccaggccgcggcgagcgcggagcaaaagcatcagccgacgccgccgcaggagcagaacgccgtctcggtcgcgttcacctccatggccgtcgtcaacgcatcgacgtcgtcgcccttcgtgtccccggcgatgtcggactgccagattagctacgagctgggcggtggcagcatggccggagtccgcaacgtgcccgacgtggagcttgcctccaagacgaactcctccatgggagacgacatggagttcatgttctcgctggactccgatttcttggacacctacaagtactccagctatttctaa

SEQ ID NO: 13067 - DNA, 1047 bp, Oryza sativa
  Clone ID: TFbOSC32142j.C1.o1.fg
cggcgctctgtcggaagcgacgacagcgactgcggcaaggaggatctagggctgtcccttagcctgggagcgtcgtcgtcgtacgacgacgaccagaaggcggtggaagcaaggccgcacgacgtcgacggcgcggcggctgcggccatgatcggcggcgacggcagcaggccggcgccgagggggtacccgctgctggagagcagcaaggtgcagggtggcgcggcgccggccgccggcgagctcgccgcggccggcggcatcacgagccagagcgtcaacccggccaaccgcaaaactagggtttcagttcgagtccggtgccaaggccccaccatgaacgatgggtgccaatggcggaaatacgggcagaaggtcgccaagggcaacccgtgcccgcgagcttactaccggtgcaccgtcgcgccgggctgcccggtgcggaagcaggtgcagagatgcctcgaggacatgtcgatcctggtgacgacgtacgagggcacgcacaaccacccgctccccgtcggcgccaccgccatggcgtccaccacctccgccgcggccaccttcatgcttctctccagcaccacctcctcctcctccgtctccgacgcctccgccgcgccgtcgtcgtcctacctcagcccgtacctgctcaactccgcctcgccgttgctaatgccgggcgccaccggcggcggcggcggcatgcagcatctcaacctgttcgggaattcgccgtcgtcgtcgtctctgctagctccgcaagcgccaggctccagcaagtacccgtggtctccgaaccaccctccgctcgccggcgccggaggtaataagagaccgttctggagcgccggcggcgacggggacaagccggcgccggcggcattggccgagaacgtcggcgcggtgatgtcggacccgaacaagttctcggcggcgatcgccgcggcgatcaacaacttcatggggaaagacggcgagagtagcagcggcaagagtagtagtaagtggggcgtggttgaatcacttccaccccatgagtag

SEQ ID NO: 13068 - DNA, 1914 bp, Oryza sativa
  Clone ID: TFbOSC400663j.C1.o7.fg
atgacatgggataataggattaaggaggagtcttccctcctcattgcccttttaatacgtcttagacacccagacattgacttagatgcctcgggagaagtagcattaggatttaagaccgttccccattttagctgtaccaagagagacaaaggtacacaagattaccagaaagaggccaggagcatgtcatccaagaagaagagagctgccatagatctctccctggaggcagagagaagacggccagaagaacgcggcggcggcagcgatcgcgaagccagcgatggcgccgctgctgcagctgaggaagatggtgatgtcaagcaacgagagggccctaaagaggaaaccggcggcgaggaggagaaggtagttgaagtggttgtggaccaaggagaagacggctccaatgaggagatcaaatataggactcaacaagcagagatgatcgaggaggacaagcaaccagctgcagcagcaaacgtcgacgacgatggcggcgacagcgacggagtcggagctagcgcggaagagaagcacatggtaacagaggccaccggcggcgaaggcgacgacggaggcgatagccgtacccccatggcgcaagatgagctcagcgagatgcaggaggagatggagaggatgaaggaggagaaccggatgctccggcgagtcgtcgacaagacggtgcgcgactactacgagctgcagatgaagctagccgcctaccagcagcaaccggcagcagcagatgagcctaaggagaccgaggtgttcctctccctcggcgcaacggccgccgcctccgccggctgcggcggcggcttcccggaggcgaagagcaaggagcaggccgcgtggcggcggcgctctgtcggaagcgacgacagcgactgcggcaaggaggatctagggctgtcccttagcctgggagcgtcgtcgtcgtacgacgacgaccagaaggcggtggaagcaaggccgcacgacgtcgacggcgcggcggctgcggccatgatcggcggcgacggcagcaggccggcgccgagggggtacgcgctgctggagagcagcaaggtgcagggtggcgcggcgccggccgccggcgagctcgccgcggccggcggcatcacgagccagagcgtcaacccggccaaccgcaaaactagggtttcagttcgagtccggtgccaaggccccaccatgaacgatgggtgccaatggcggaaatacgggcagaaggtcgccaagggcaacccgtgcccgcgagcttactaccggtgcaccgtcgcgccgggctgcccggtgcggaagcaggtgcagagatgcctcgaggacatgtcgatcctggtgacgacgtacgagggcacgcacaaccacccgctccccgtcggcgccaccgccatggcgtccaccacctccgccgcggccaccttcatgcttctctccagcaccacctcctcctcctccgtctccgacgcctccgccgcgccgtcgtcgtcctacctcagcccgtacctgctcaactccgcctcgccgttgctaatgccgggcgccaccggcggcggcggcggcatgcagcatctcaacctgttcgggaattcgccgtcgtcgtcgtctctgctagctccgcaagcgccaggctccagcaagtacccgtggtctccgaaccaccctccgctcgccggcgccggaggtaataagagaccgttctggagcgccggcggcgacggggacaagccggcgccggcggcattggccgagaacgtcggcgcggtgatgtcggacccgaacaagttctcggcggcgatcgccgcggcgatcaacaacttcatggggaaagacggcgagagtagcagcggcaagagtagtagtaagtggggcgtggttgaatcacttccaccccatgagtag

SEQ ID NO: 13069 - DNA, 729 bp, Oryza sativa
  Clone ID: TFbOSC4096j.C1.o1.fg
atgtggatgcaggaagggcatccaacatgtgtcaaccttacgcctataccacatacagatggccatctctggaggaagtatggagagaagaaaatcaagaactcatcgttcccaagacgttggtgtaaaactgtcgcgatctacaggctatactaccgatgctcttaccgggacgacaggaattgcatggcgaccaaggtggtgcagcaggagaacgacgccgacccgccactctacagggtcacctacattcacccgcacacctgcaacccatcgccgccggccccgacgccggcccatgtcttcaccgagccaccgccggccaaagcggaagtacaccacgcggtgttgttcaggttcagctccactgccggcggccacacggccaataatgcagtgcatcgtcagcagtggcagcctgcggcggctacgatggcggcgggggcccaggcgcagctgtcaatgacgatgagcgacgacgagcgggagcagccgccggcggccatccgttctgcgccgccggcacggcggctgtcgatgttccgcgccgtcgttgatggactcaggcagatgcggtcgtcggcgccgccaacaccgtcgtcgtcgatggtggtggacgacggatgggacacgttctcgtcgtttgatttggatacgtgcgaattcagtgtcgatgacgagttgctctgtggtgaccatatgtatttcccggacagtatgcagcaatag

SEQ ID NO: 13070 - DNA, 960 bp, Oryza sativa
  Clone ID: TFbOSC413014j.C1.o3.fg
atggaaggcgttgttgacgggagcggcgcgcagctggtggtggcggagctggtgcgcgtgcaggggctgctccggcagctcgaggcccacctgagcgcgccgtgctccgtcgagctctgccgcggcctcgtcgcgcagatcgtcgcgctcacggacaggtccatcggcatcgccacccggtccttctcctccgcctccggcggcggcgcgcatttcgcggacacggcgccgccgatgccggcgctgacgtcgtgcacgcccagcccgctcagcgacggctccgaccaccagccgttccggaccaccaacgccaagaagaggaagacgacggcgaggtggacgagccaggtgagggtgagcgcggcgggcggcgcggaggggccagccgacgacgggcacagctggaggaagtacgggcagaaggacatcctgggcgccaagcacccgcgcggctactaccgctgcacccaccgcaacacgcagggatgcaccgccaccaagcaggtccagcgcaccgacgacgacgcctccctcttcgacgtcgtctaccacggcgagcacacctgccgcccgggcgccgccagcgccgccgccgccaagaggccgcacgcgcagacgctgctgcagagcctcagcgccagcctcaccgtgaacacggacaccaacacgccgctgacgccggagaaccgcgcgccggcgccgccgctgcagcagcagcagcagcagcagagcgtgtcggcgtcgcccgtggcgtcggactcgtacggcctgggcggcgccgggtacggggactggcgctgctgcgacggcgacctgcaggaggtcgtgtcggcgctcgccaccgtgacgtcggcccccgaccacgccgccatggacgccgccgacttcatgagctactgcttcgacttcgacccggcggtgtacggcggcatcgtcggcacgccgagcttcttcctatga

SEQ ID NO: 13071 - DNA, 1086 bp, Oryza sativa
  Clone ID: TFbOSC400271j.C1.o13.fg
atggagagcatggagggcaatggaggagggcggctggtggtgacggagctgagccacatcaaggagctcgtgaggcagctggagggacacctgggtggctccggctcccccgacctctgcaagcacctggcctcgcagatcttctccgtcaccgagcgctccatcggcatgatcaggtccggccacttcgacggccaccgcaagcgctccgccgccgctgtcgccgccggtgacctcgactcggcgactcccagccccctcagcgacgtctccgacttgcctttcaaggccaccaagaagaggaagacgtcgacggagaagaagaggcatcagattagggtgagctcgacgggaggggtggagaatccaccggtagatgatggccatagctggagaaagtatgggcagaaagagattcttggagccaagcacccaaggggttactaccgttgcacccaccgccactcgcagggatgcatggcgacgaagcaggtgcagcgcaccgacgaggacgcgacggtgttcgacgtgatctaccacggcgagcacacgtgcgtccacaaggcggtggccgccggcgccggcaagccggagacggagacggacacgaacgccgccgccgagagccgcctccacgacctgagctccggcctgacggtgaagatcgaggggctgacggcgccgccgcagcaacagcagggcggcggcggctggaacgccatgccgccgttctgcctgtcgtcgccggtgagcggcctggcgccgccggatcagcacaacccgttctccgcgccgtcgacgccggagaaccgcctcgccgccgccgcgtcgtcggcggcctcgccggcgacctccgactcgatggccgccgcgccgttccaccaggcggcggccggcggcggcgatgaggcgtggcgggacgccgagctccaggaggtggtgtccgcgctcgtcgccgcgacgacgacgacggcgaccgcgcagccggcgcccgccaccgccatggtcgacgccgacctctccgccctcgacgccttcgagttcgaccccggattcaccattgatatcaccagcttcttcgcatga

SEQ ID NO: 13072 - DNA, 678 bp, Oryza sativa
  Clone ID: TFbOSC900348j.C1.o27.fg
atggagagcatggagggcaatggaggagggcggctggtggtgacggagctgagccacatcaaggagctcgtgaggcagctggagggacacctgggtggctccggctcccccgacctctgcaagcacctggcctcgcagatcttctccgtcaccgagcgctccatcggcatgatcaggtccggccacttcgacggccaccgcaagcgctccgccgccgctgtcgccgccggtgacctcgactcggcgactcccagccccctcagcgacgtctccgacttgcctttcaaggccaccaagaagaggaagacgtcgacggagaagaagaggcatcagattagggtgagctcgacgggaggggtggagaatccaccggtagatgatggccatagctggagaaagtatgggcagaaagagattcttggagccaagcacccaaggggttactaccgttgcacccaccgccactcgcagggatgcatggcgacgaagcaggtgcagcgcaccgacgaggacgcgacggtgttcgacgtgatctaccacggcgagcacacgtgcgtccacaaggcggtggccgccggcgccggcaagccggagacggagacggacacgaacgccgccgccgaaagccgcctccacgacctgagctccggcctgacggaaaaatggactagatcttga

SEQ ID NO: 13073 - DNA, 666 bp, Oryza sativa
  Clone ID: TFbOSC17493j.C1.o2.fg
atggcggcagtcggcgcgcacgcagcggtctaccaccacccggtctcgggcctctcggcgccggcgggcgacgccgcctactcgatgtcatcgtacttctcccacgggggaagctcgacctccagctccgcgtccagcttctccgccgccctcgccgccgcaacgacgccgccgcttcccgacccgtcggggtcgcagttcgacatctccgagttcttcttcgacgacgcgcctccggccgccgtgttcaatggcgcgcccaccgccgcgctgccggatggcgccgccgcaaacgcaacaaggagcgcggcggaggcggtgccggcgccggcgccggcggccgtggagaggccgcggacggagcggatcgcgttccggacgaagtcagagatcgagattcttgacgacggctacaagtggcgcaagtacggcaagaagtccgtcaagaacagccccaacccaaggaactactaccggtgctcgacggaagggtgcaacgtgaagaagagggtggagcgggacaaggacgacccgagctacgtggtgacgacgtacgaggggacgcacaaccacgtgagccccagcacggtgtactacgccagccaggacgccgcctccggccgcttcttcgtcgccggcacgcagccgccaggttctctcaattaa

SEQ ID NO: 13074 - DNA, 1781 bp, Oryza sativa
  Clone ID: TFbOSC401478j.C1.o35.np
atggagctcaggccgccgccgcccaagcaccaccaccaccgccgccgtcgcggcggcggcggcgaagacggcggggaggaggaggaggaggagactggccgcctgtcgctgcgcggcggcggcttctggcggcgccacgacggggaggaggaggaggagaagggcggcgggaggaggggcgagatcaaggaggtggacttcttcttgggcgccagcggccgcgatgtcgtcgtggcctcccggcggcacgacgacggcttccgcgggacgacgcatggcggcggcggtggcggcgacgtcaacatcgggctagacttgctgaccaccaccaccgccggcgcggcggcgggtggtgcggcggccggcgccggcgaggaggacacggggaagaatcatagaaaggaggcgacgacggcggcggtggatgtggagctccggcgagtggtggaggagaaccggcggctgcggggatgctggacgagctcaaccggagctacagcgcgttgtaccatcagtatctgcaggtcacgcagcagcaaaaccatcgccatcctgatcatcacctgattatgaacaacaacaacaaccggccttcactagctcaaacacaccggaccgcggcgacgacgacggcgacgacgcagcaattcctggagccgcgagcgtcgtccacggcgcaggccaccgccgacgcggacatggcagcgtccgacgacgaggccggccgcggcggcggcgacggcgacgcgtcgtccccttcgctgagcaacgccgccggcggcggcggcggcggcaacaagatgaggagggttggtggtcaagacgagactgcggcggcggcgccggcgagggagaacggcgagcagcaggcggcggcggcggccgagctgccgtgccggaaaccgagggtgtccattagtgatgggtgccaatggaggaagtacgggcagaaaatggcaaaggggaatccatgcccgcgagcgtactaccgatgcacaatggctatcggatgcccagtcaggaagcaggtgcaacggtgcgccgaggacaagaccgtgctgatcaccacctacgagggcaaccacaaccaccagctgccgccggcggccaccaccatggccaacaccacctccgccgccgcggccatgctcctctccggcccggctgccagccgcgacggcgccgccgccgccctgctcggccaccaccaccaccaccacccggcggcgatgttccaccagtccttcccctacgcctccaccatggccacgctctccgcctccgcgccgttccccaccatcaccctcgacctcacgcagacgcctgccggaggcgccggcgccgccagcctgctgcacgcgctccaccgcccgccggtcatccaccctggtgcggctgcccaggcgatgccgttcgccgtgccgccgcagctggcgatgtacctcccgcagcagagggcggcggccgcggggctgggcggcgccggcgccgccaggcagccgtcggtgatggagacggtgaccgccgcgctcgccgccgacccaaacttcacgacggcgttggcggccgccatctcgtccgtcgtggcgggaggggctcatcatcaggctctgtccaccacaccccgtggcagcgccgccggcgccggagacggcaacggaaacgggagctccgccgcggccgtcgccaccggcgccgcctcgccggcggcgacggccgaggcacctgcggcgtccggatcacctcctcggctcgcgacgcagtcctgcaccacgtcgaat

SEQ ID NO: 13075 - DNA, 1623 bp, Oryza sativa
  Clone ID: TFbOSC418607j.C1.o7.fg
atgtccgcgcgccccccgccgccgccgcgcccgaggctcgcgctgccgccgcgctcggccgccgagtcgctcttcacgggcgccggcgacgccagtccgggccccctcaccctcgcctccgcgctcttcccctccgaccccgacggcggcggcggcggcggcggcgtcatgacgtcgtcctcctcctccgccgcgggggccacgagcttcacgcagctgctcatcggcaacctctccgcgcctcctcctcctcctcctcctccgcagcagcagcagcagcgtgaggcggcgcgaggaggcggggtcgcgagggccgggccggcgctgtcggtggcgccgccgccgacggcggggtcggtgttcaccgtgccgcccgggctcagcccctccggccttctcgactcccccgggttgctcttctcgccggccatgtttgatgcttttgatgtccttgatatgttcatacctgataagatccttccaaaacgcgctactcggattaagttggacatctactttgtaaagacaagtcctgaagggggttttgggatgtcgcatcgggaggctcttgcccaagtcacagcccaagcaagccattctccactcagaatgttcgatcacactgaacaaccatcattctcagcagctccaacatcatctgaagctatgcagcatatgaatgcagcagttaatatgacaggaatttcagacatggtcatgggtccaacaaacaatgagaatgtagcctttcaacctgctgaggcgtctcagaggtatcaagtcaatgcccctgttgataagcctgccgatgatggctataattggcggaagtatggtcagaaggtggtgaaaggcagtgattgcccaagaagctattacaaatgtactcaccccaattgtccggtcaagaaaaaggtagagcatgcagaagatggtcagatatctgagatcatatacaaaggcaaacacaatcaccaacgtccaccaaacaagcgggcaaaagatggcagctcttcagcagctgatcaaaacgagcaatctaatgataccgtgtctggtctgtcaggtattaagagagatcaggaagctatatatggaatgtctgagcaactatctggtttaagtgaaggagatgatatggatgatggtgaatcaaggccacatgaagcagatgacaaagagagcgacagcaagaaaaggaatatacaaatttcttcacagaggacttcagcggaagctaagattattgtgcaaacaaccagtgaggttgatcttttggatgatggttatagatggcgcaagtatgggcagaaggtggttaaaggaaaccctcatccaaggagttactacaagtgcacctatgctggatgtaatgttaggaaacacattgagagggcttcgtcagaccctaaggctgtcataacaacttatgaaggaaaacataaccatgaaccaccggttggtaggggaaacaaccagaatgcgggaaatgcggccccttcaagcagtgcacaacagaatatgcagaatttgtctagtaatcaagcttcacttacaatggcagacttcaacaacattaaccagaggccaattggggtcttacagttcaaaagcgaagaataa

SEQ ID NO: 13076 - DNA, 180 bp, Oryza sativa
  Clone ID: TFbOSC29687j.C1.o31.gm
atggaggggagctattaccggtgcacgcaggacaactgccgggtgaagaagcgggtggagcggctggcggaggacccccgcatggtgatcaccacctacgagggccgccacgtccactccccctcccgcgacgacgacgacgccgcccgcgcctccgccgagatgaccttcatctggtag

SEQ ID NO: 13077 - DNA, 987 bp, Oryza sativa
  Clone ID: TFbOSC458j.C1.o1.fg
atggcgctcactatggttagtctcgccgccatcgccgggaagcccaccgcggcgtcggctcagctcgtcgccgaggggagggagtcggcggcccgcctgtatgccctgctggtcggctcgtcggcgctccacggccctgtgggcctcgccgagcagatcctcctctgcttcgaccgcgcgctcgccaagctgcacggcgtcaacctcgccggagctgaggacgacgacgacgctgccggcaacggcaacggcaggaagcgcaagccggggcgtggtcgtggcttgactgccgcttcagctgcagcgagctccaaaaggatgagggtgagcaatgctggaggaaatggagcaaggattgagaggaaagcgacaatggatgacaaatttctgtggaggaagtacgggcagaaggagatcaagaacagcaagcacccgaggttttactaccggtgcagctacaaggacgaccatggctgcacggcgacgaagcaagtccagcagtcggagacggcggacgacgacactgcctcgcccgtctacatcatcacctacttcggcgagcacacctgccgccatggggacgacgccgccgccatggtcgtcgacggcggcgaggaggaggatcagctctcgccggcgcagatggtcatcagcttcgcttccagcaacggcggcgatgcttctgtgtcctggccgtgctccggcgacgacgcccagaacaacagcgagacatcgcatgaatcgagcccgccggaggcgccggccggcgaggaagaacgtctgcggccgtgcacagccgccggcgtgtctgacgaaccgatcatggagtcaacgccgccggcgccggagcttcttgcggatctgaagcccatggatgggtgcctccttgacggcgagagcttgtttggcatggatgaactcgtctactttcatgagctctcagctgctctcggcctactcgatcgagactggggtgcgccagtatag

SEQ ID NO: 13078 - DNA, 1128 bp, Oryza sativa
  Clone ID: TFbOSC404471j.C1.o17.fg
atggcatttggtcaagataccatagagcagctgtaccgggagctcgccggcggccgccgcctcagcgccaagctccaggcgctgctcgaaggccccctcgatagccgcggccagaaggaggccgtcgatgttagcagagagctcgggcgagtgttcatggtgtctctctacatgctgaagccttgcagcaacagcagcagacgaccggaaggagtgaccaggacggcgccggagacgaggactgacgatagcatttgcttgcacactccggcgagggttaaacgcgttaggagtgaagaggttcttgtcagaaatggcagagaagaggtggttacgaggacggagattattacaccttccccgtacaaggatggctaccagtggagaaaatacgggcaaaagaacattcaggacagcaattatctaaggttgtacttcaagtgcacgttcagccgcgagcggagttgcgcggcgaagaagcaagtgcagcagcgggacgccggcgagccgcccatgttccttgtcacctacctcaacgagcacacgtgccagcagccgcaagctgttcccggcacgcccaacactgcaggtagctcgccgacgacgacgagccggcaacgacagtcgtcctcctccccgccggcggaaatgttggacctgacgatgaacggcgccggcctctttagccgtcttcttttaccccacgccgtcggcggcggcggcagcgccgccgaagaggaggccgccatcgtcacgtgcctcgcggcggtcatcagcggaggaggcgccgcagccgctccgccgccgttgatctggccgacatcggccccagaggcggcgttcgtggcgtccgcggcgggacactcgccgagcgccgcggacgagagcgtggcggacgaggcggcggcggcgcagatggccgacatggactactgtttcggccagtacgatcagtcaacgttcggggcggcagcagcagcggatcaccgtgtgttgatcggtgacgacggcgacgtgcagcgcatcgtcgcggcgcggatcgcggacacggtgtggccgcggtacacgcgcgacacgagtgcatgggagactgctgggacgtcgtcgatgagaggatcgatcgattga

SEQ ID NO: 13079 - DNA, 660 bp, Oryza sativa
  Clone ID: TFbOSC400426j.C1.o42.fg
atggcggcttcgctgggactctgccacgagacgtcgtacgcctactcgtacccggcgtcgaacacctcctcctccttgtgcttccctcctctcatggcggaccacatcgtcgacggcggcggcggcggcggctgttcctttggtgaattcctggagctcggccattccgtgtactcgctgccgcttccgccgccgccgtcgcagccggtggtggtcgccggcgggaacaatgatcagtatggcgtgtcgtcgtcgtcgtcggcggcggcgacgacgagcaggatcgggttcaggacgaggtcggaggtggaggtgctggacgacgggttcaagtggcgaaagtacgggaagaaggcggtgaagagcagcccgaacccgcggaactactaccggtgctcggcggcggggtgcggcgtcaagaagcgggtggagcgcgacggcgacgacccgcgctacgtcgtcaccacctacgacggcgtccacaaccacgcgacccccggctgcgtcggcggcggcggccacctcccgtaccctacttccgctgcgccgccgtggagcgttccggcggcggcggcctcgccgcctcccgcgcacgcgcaggcgtggggggcgccgctgcacgccgccgcggcggcgcactcgtcggaatcgtcgttctga

SEQ ID NO: 13080 - DNA, 1235 bp, Oryza sativa
  Clone ID: TFbOSC9240j.C1.o1.fg
atgaccgccgcgccggggagcctcccgctggtgaactcgaggcccgtctccctctccttggcggcgagcaggtcgtccttctccagcctgctcagtggcggcgccggctcgtcgttgaacctcatgacgccgccgtcttctctcccgccgtcgtcgccgtcgtcctacttcggcggcgtctcgtcctccgggtttctcgactcgccgatcctcctcacgcccagtttattcccatcgccgacgacgacgggcgcattgttcagctggattacgacggcgacggcgacggcggcgatagcgccggagagccaggtgcaaggaggggtcaaggacgagcagcaacagtactcggacttcacgttcctgccgacggcgtccacggcgccggcgacgacgatggccggagccaccgcgacgacgtccaactccttcatgcaggactccatgctaatggctccattgggaggggacccgtacaatggcgagcagcagcagccatggagctaccaagaaccgaccatggacgctgacactaggccagcggaattcacctcgtcggcggcggcgggtgacgtggccgggaacggcagctacagccaggtggcggcgccggcggcggccggcggcttccgtcagcagagccggcggtcgtcggacgacggctacaactggcgcaagtacgggcagaagcagatgaaggggagcgagaacccgcgcagctactacaagtgcaccttccctggctgcccgaccaagaagaaggtggagcagtcgccggacggccaggtcaccgagatcgtctacaagggcgcgcacagccaccccaagccgccgcagaacggccgcggccgcggcggctccggctacgcgctgcatggcggcgccgccagcgacgcatactcctccgccgacgcgctctccggcacgccggtggcgacgcccgagaactcgtcggcgtcgttcggggacgacgaggcggtcaacggcgtcagctcgtcgctgcgggtcgcctctagcgtcggcggcggcgaggatctcgacgacgacgagcctgattccaagaggtggaggagagacggcggcgacggcgagggcgtctcgctggtggccggcaaccggacggtgcgtgagccgagggtggttgtgcagacgatgagcgacatcgacatcctcgacgacggctaccggtggcgcaagtacgggcagaaggtggtcaagggcaacccaaacccaag

SEQ ID NO: 13081 - DNA, 663 bp, Oryza sativa
  Clone ID: TFbOSC9240j.C1.o1.gp
ggccgttctgcggcggcttggggtggctgtgcgcgcccttgtagacgatctcggtgacctggccgtccggcgactgctccaccttcttcttggtcgggcagccagggaaggtgcacttgtagtagctgcgcgggttctcgctccccttcatctgcttctgcccgtacttgcgccagttgtagccgtcgtccgacgaccgccggctctgctgacggaagccgccggccgccgccggcgccgccacctggctgtagctgccgttcccggccacgtcacccgccgccgccgacgaggtgaattccgctggcctagtgtcagcgtccatggtcggttcttggtagctccatggctgctgctgctcgccattgtacgggtcccctccctacaatattgcaaacacaacaatatcaatgatacatgcatcttttttttggagtgcatcacatgcagggtaattattttttccaagggagttttgactaattgatctagtttagaactgtagcaagcttgactaatggtatgtgcttaggttttcatggagaacgtgaaaatgaagtttgcttttgcaaatctagcctgagtgtcccttatcattaaaaaaacatgttgattaagatatcttggccgcgagatattaatgcatttcatcatatatgtatg

SEQ ID NO: 13082 - DNA, 1554 bp, Oryza sativa
  Clone ID: TFbOSC400397j.C1.o35.np
atgcatgagttatttcatgatttggcgtgctccgtctcaaaggatgaatgcttcagttcaggggaagcattttgcagccttccagaaaatatttgccacctttcagttgttcttccagattccaagtcagttgtgctgactaaagtacaaagacatctgcagtccctgatggttgtcaagagatctgcatcagagtacccaggttcatttgtgccacttttgaaaatactgggtctgaatgatcttctcatgaaatgtagatttttaagagcgttgaatttgagctgtacaacaatacgagagctccccagttctattatgaagatgaaacacttgcaattcttggctctgaacaatacaaagatccaaagtctcccagctgaaataggtcagttacaaacccttcagacattagaactcaagtattgttgctgtctcattgagttaccggaaagcacaatgaatttgacaaagctgcggcaccttgatgtccaaaaggaaccaggaaatgttcatgttagcatgcctcatgggatcgggcaactaactgatctgcaaacattaacagtatttaatacgggggatgatttatcacattgttcaattggggacctgaagaatctcagtggactaaggggacatgttcatataacaggtcttcagaatattactgcaagtgatgatgccaaagaagcaaatctagtaggtaagcaattcctaggagctttgacactggaatggtgttggagcagtcaggacatggaagatgacagtgacaaagaaattgctaatcaggtccttcataatcttcagccaaacactaacctgcaggagctctccattcgaaattattctgggaatttattccccaactggattcaggattcttcactttccatgcttgtctcgattactatcgatgactgccaagactgtaatgagatcccacatcttggtgacctgccttttcttaaatatctcctcatacataaaatggacaaatacacagtaaaatatctccttaagaagactacgacagatgatggctggaattggagaaagtatagtgaaaaggatttacttggctccaagtacaaaagatcatggtacagatgcaaccagaagcagtccacggggtgcgtggcaaggaagattgttgagcctaacaacgatgatcccaacacatggttggtaacatacttatacgagcacaaccataaacaagaagctaggccctgcgacaagccatcaccttctgatttgcacgttcagctggcaagtggcaacacccagtggtgtgtgcttagaggcttctacggtggagtgaggcagatgacggtggggagcaacacacagctgcatgagcgtgactacaccggcaacgcaaatcacagtggcatcatcgcaagacagacatggatcgagatgctccggcgcggctgcacggccggccattctcaacgtagagctgtcacctattggatatactgtgacgatagctctagtatcaaggacaagttggagattgtagatgtcgatgttttatatcagcaa

SEQ ID NO: 13083 - DNA, 1077 bp, Oryza sativa
  Clone ID: TFbOSC404464j.C1.o3.fg
atgcaggcgcaatcccgcctcgctgctgccgcgagcggcggcagcggcagtggaattagcgggagcggtggcattagcaggttgggtggtggagcgggggaggagcacgaggcggtggtgagggagctgacgcgcgggcacgagctgacggcgcggctgcgggcggaggcgctgcgggcgctgcgcgggcaggggcaggccgaggccaccgctacattcatcctcggggaggtctcccgcgccttcaccgtctgcctctccatcatggccagcgcctccccgtccgcctcgccgccacaaccggacgagacgccgccggccgactcagccgtctcgccaccaccaccgcgcgcggcgagagaggacaacgtcccgcgaaagagattattgacagcctctccttacgacgatgggtaccagtggaggaagtacggtcaaaagaagatcaacaacaccaacttcccaaggagctactacaggtgcagttaccaccgggagcgcagatgccccgcgcagaagcacgtgcagcagcgcgacggcgacgacgtcccggcgctgcacgtcgtcgtctacacccacgagcacacgtgcctgcagggggcgcccgccgagcttcccgacgcggcgacgaacggtggcgccgccgccgccgcgtcgccggactacttccccgccggcggcgagacgccgtcgtcgctgcggcggctccggggcgtcggcggcggcggcctgcagcctcagttcgtggaccaccgcgccgccatggaggagcgcgagcgccaggtgctcgtctcgtccctcgcccgcgtgctgcaggggcggcagtgctacgacgacgacgacgacgacgacaccgacgtcgcctccctcggcgccgtgcacgcgcgcgcgcctgcggcggcggcgccggtcgccgcgtcgtcgtcgtcgtccgggcccgtcgacgctgccggcgaggagctggacgtcatggactacgacatgacggacgcgctgttctgggggcctttcggcacggacagcaactcgtacgacggaaacctgacgtcgacacgctgttttgatctaattaattaa

SEQ ID NO: 13084 - DNA, 732 bp, Oryza sativa
  Clone ID: TFbOSC135j.C1.o3.gm
ggcgaattcgagctcggtacccggggatcctctagagtcgacctgcaggcatgcaagcttccccagctgccgcagctggtccacgaccacgccgccgccaccgggacgaaccatggcgtgatgttctcgtcggaccatggctgcctgtacccgctgctcccggggatcccgttctgcctcgactccggctgcggcgccgccgcctgcgacgacgacaagcccgccggtttcgcgcacttgggctccgccgaggcggacacatcggcggcggcggcgagagtggatagcgagattgctgcagctgccaccgcaaccacttgccatgggcctaattcatggtggaaggggacggagaaggggaagatgaaggtgaggaggaagatgagggagccgaggttctgcttccagaccaggagcgatgtggatgtgctggacgacggctacaagtggaggaagtatggccagaaggttgtcaagaacagcctccacccaagattgcaatatttttcttcagagatacttagtacccgtaagaaggggaagcccctgagctactacaggtgcacccacaacaactgccgcgtgaagaagcgggtggagcggctgtcggaggattgccgcatggtgatcaccacctacgagggccgccacacccacaccccctgcagcgacgacgccaccaccggcgccgccggcgaccacaccgccagctgcgccttcacctccttctga

SEQ ID NO: 13085 - DNA, 741 bp, Oryza sativa
  Clone ID: TFbOSC400036j.C1.o6.fg
atgtcgtcgctgtacccgtctctcctctcgctgagcgagagccccgccgagtaccggcaggtcggcggtggccgctacgcgggggaggacgtcgtcgacgacgacgacgacatggctgccgtcgccgacgctgtgtccagctacctctccttcgacatggacgacgtcgagtattacacgccggaggtgggcttccactcaaagcagcacaacccgccgccagttgctgcggcgccactggaagccggaggaggcagggagcaaagccggcgggaagccgccgtcaatcttggcaagatggacaggggaccggcgccggtgagcggcggcgcggcgactggcggcgtgccgaggagcaagaacggcagcaagatcgcgttcaagacgaggtcggaggtggacgtgctggacgacggctaccggtggaggaagtacggcaagaagatggtcaagaacagccccaacccaaggaactactaccggtgctcgagcgaggggtgccgcgtgaagaagcgggtggagcgcgcccgggacgacgcgcgcttcgtcgtcaccacctacgacggcgtccacaaccacccggcgccgctgcacctcaggccgcagctgccgccgcccggcggctactcgatcgccggggcaccggccgtggtggcgccgcacggccgcctcgggctggaggaggccgaggtgatcgctctcttcaggggcaccaccgccacctcgctgctgcttccttga

SEQ ID NO: 13086 - DNA, 1752 bp, Oryza sativa
  Clone ID: TFbOSC401655j.C1.o1.fg
atggaggccgacgacagcggcggtggcggcggcagggcacgcaggtccgtcgaggtggacttcttctccgacgagaagaagaacatgaagaagagccgtgtctcgggcggcgtcgccgccgaggcggacgacgccaagggacccgccgccgccggcctcgccatcaagaaggaggacctcaccattaacgttagccgccgccgccttcttcgctcgtcgatcgccagacacctgtttaactcacggcgatctaacgcgtgtgctcgtccgtgttcgttgcagcttcttcccgccgggaacaacgcgaggagcgaccggtcgatggtggtcgacgacgacgcggcgtcgcggccggatcacgaggagaagagccggagcagcaacgagctcgcggcgatgcaggcggagctgggccgcatgaacgaggagaaccagcggctccgggggatgctgacccaggtgaccaccagctaccaggcgctgcagatgcatctcgtcgcgctcatgcagcaaaggcctcaaatgatgcagcctccgacccagccggagccacctccgcctcaccaggatggcaaggccgagggcgcggtcgtgccgaggcaattcctcgatctgggcccgtcctccggcgccggcggcgaggcggcggaggagccgtccaactcgtcgacggaggccggcagcccgcgtcggtcgtcgtctaccggcaacaaggaccaagaacgtggtgacagcccggacgcgccgtcgacggcggcggcgtggttgccgggacgcgccatggcgccgcagatgggcgccgccggcgcggcgggcaagagccatgatcagcaagcccaggatgccaacatgaggaaggcccgcgtctccgttcgcgcgcgatccgaagcgccaatcatcgccgatgggtgccaatggaggaagtacggtcagaagatggcgaagggaaacccttgtccacgcgcgtactaccgctgcaccatggccaccggctgcccggtgcggaagcaggtgcaacggtgcgcggaggaccggtccatcctgatcaccacgtacgagggcacgcacaaccacccgctgccgccggccgcgatggcgatggcgtccaccacgtcggcggcggcgtcgatgcttctgtcggggtccatgccgagcgccgacggcgccgcggggctcatgagctccaacttcctggcgcgcaccgtgctgccgtgctcgtccagcatggccaccatctcggcgtcggccccgttcccgacggtcacgctcgacctcacccacgcgccgccgggcgcgccgaacgccgtgccgctcaacgccgcgcggccgggcgcgccggcgccgcagttccaggtgccgctgccaggcggagggatggcgccggcgttcgccgtgccgccgcaggtgctgtacaaccagtccaagttctccggcctgcagatgtcctccgattcagccgaggccgccgccgccgccgccgccgccgcgcagttcgcgcaaccgaggccgccgatcgggcagctgcctggccctctctccgacaccgtcagcgcggcggcggcggcgatcaccgctgaccccaacttcacggtggcgctcgcggcggcgatcacgtccatcataggcggccagcacgcggcggcagctggcaacagcaacgcgaacaacaccaacaccaacaccacgagcaacaccaacaacacaagcagcaacaacacgacgagcaacaacaccaacagcgagacgcagtaa

SEQ ID NO: 13087 - DNA, 2991 bp, Oryza sativa
  Clone ID: TFbOSC401140j.C1.o23.fg
atgacgaccgcgacgctggatccgccgccgcctcccctcctcatcgccggctccctcctcgacgacgatcgcgacgctggatctgccgcctcctcctctcctcgctggctcccccgggcgcgcggatccaccgtcggctcccctcctcgccggggaggggaggagaggggaggggaggcggcgacgaggaggaaaggcaacagctcctgtcctgacgacgacgatgactgccgcaacgacgaggacgactgccgcaacgacgacgactaccgcgacgatgatgtgggggcgacgacggatggaggaggagacgcggcggctcttctcccgatggcgatgatgactgccacgacgatggcgccgatgcctgtcgaggcagcggtggacggaggaggagagctgtcatcggccggagagggtggccagcggcgggtgaatctactgcctacgaagatattgtccgcctacgaaaatcatctattttcgcaggcccttgcttgcagggaagatgaatggatcatcgagaagcttgcggtcatcgctgctagacgctcatcatttgtctctgaagaatccttgtgctctgttccggctgcggctttggtctctttggccattgcccatttggctttctcccccatgttggtctatggcgttcttgatcgtttatgttccgtttgccatctgggtgagatggagggagacatagcgatggaggagtggaaggattccaaccatcgaggcgcggattacctgatgacgatgccgatgcagaacttcctcgccgacgcgttcccgccaccggagctcttggagggagaaggcgggttcgagaagcacggcctgtcggtggccgttggctcgccgccgccgacgccgccgcctccggaggacgggtgctcgccgctgccactgacgccgcagttcggccagaagttcggctccggcggcggcggcggcggcagcctcgccgacaggagggcgagaggcgggttcagcaacgtcgccaggatcagcgtgccgtacaaccagccggcggcggacgtgtcgtcggcgggggcgccgtcgccgtacgtgacgatcccgcccggcctgagcccgacgactctgctggaatcgccggtcttctccaatgccatgggccaggcctcgccgaccactgggaagctgcacatgcttggtggtgccaacgacagcaatccaatcagatttgaatcccctcggatcgaagaaggatctggtgcattttctttcaagcctctgaatctcgcatcctcacactacgcagctgaagaaaagacgaaatctctacccaacaaccagcatcagtcgctaccgatttctgtcaagactgaagctactagcattcaaaccgcacaagatgaagcagcagccaaccaactgatgcagccgcagttcaacggcggcaagcggagccgcgctgcacctgacaacggcggcgacggcgagggccagccggcggagggcgacgcgaaggctgactcctcctccggcgcggccgcggtcgccgtcgtcgccgccgccgcggcggcggtggcggaggacgggtacagctggaggaagtacgggcagaagcaggtgaagcacagcgagtacccgaggagctactacaagtgcacgcacgccagctgcgcggtgaagaagaaggtggagcgctcgcacgagggccacgtcacggagatcatctacaagggcacccacaaccaccccaagccggcggcgagccgccgcccccccgtccatcctccgccgccgtcgccggcgacgacgacgacgacgccgctgccgccaggcgacgcgcaggccgaccacgcgcccgacggcggcggcggcagtaccccagttggcgccggacaggcgggcgcggagtggcacaacggcggcgtggttggcggcgaggggctggtggacgcgacgtcgtctccctccgtccccggcgagctctgcgagtcgacggcgtcgatgcaggtccatgaaggcgcggcggcggcgcagctgggggaatcccccgagggcgtcgacgtcacgtctgcggtgtccgacgaggtggacagggatgacaaggcgacgcacgtgttgcccctggccgccgccgccgccgacggcgagagcgacgagctggagcgaaagagaaggaagctggactcctgcgccaccatggacatgagcacggcgtcgagggcggtgcgcgagccgcgggtggtgatccagacgacgagcgaggtggacatcctcgacgacggctaccgctggcgcaagtacgggcagaaggtcgtcaaggggaaccccaacccaaggagctactacaagtgcacgcacccggggtgcctggtgcggaagcacgtggagcgcgcgtcgcacgacctcaagtcggtgatcaccacgtacgaggggaagcacaaccacgaggtccccgcggcgaggaacagcggccacccggcgggctcggcttcgcccggcggcggcgcggggtcgtcgtcgcagccccacggcgtcggcgtcggcgggcgcaggccggaggtgccgtcggtgcaggagagcctgatgaggctcggcggcggctgcggcgcggcgccgttcccgccccacttcggcctgcacctgccgccgccgccgccgagggacccgctcgcgccgatgagcaacttcccctactcgctcggccacgcgccgtcgccggcgctgcggggcctgccgccgcccccgcccccgccgccgtcggcgtcggcgctggcggtggcggggctcggcggcgtggtggaggggctcaagtacccgatgctggcgccgccgtcggtgcactcgctgctgaggcaccgccagggcggcggcatggaggcggtggtggtccccaaggcggaggtgaagcaggaggcgatgcggcccgccgccgccgtcgccggcgcggggcgcggcgcggcggtgtatcagcaggcgatgagcagggtgtcgctggggaatcaactgtag

SEQ ID NO: 13088 - DNA, 1014 bp, Oryza sativa
  Clone ID: TFbOSC101929j.C1.o1.fg
atgtctggacctggaggaggaggtcatggcctctacgaggatcatcctgcagccgccggcttcctccccttcgaccacgacgacgacgtggtggccagcttcttctttggcagatcggcggcgtccggaggaggagccggcgccggcgccggcgctggagacgatgatggtgttgggctcatcacgccctactccagcatcacggattatctgcaaggcttcctgcaggaccccgtgtacgcgtcgtccccgttgggcggcgatgctgccgtgaagcacgaaacggtggtggatcatcccagtcaggccggcggcgtggcggcggcgccggccacgccgaactcgtcggtgctgtcgtcgtccagcgaggcggctggaggggacgatctgcgccggtgcaagaaaggtcgtcggccggaggacgaggaggaggaggagattgacgatgagggatcggccgttcagagttgcaagacgaacaaaatgaagaataaaaaaggggcgaagaaggagcgtgagccacgtgtggcgttcatgaccaagagcgaggtcgaccacctcgaggacggctaccggtggcgcaagtacggccagaaagccgtcaagaacagctcctacccaaggagctactaccggtgcacggcgccgcggtgcggggtgaagaagcgggtggagaggtcggagcaggacccgtccatggtgatcaccacatacgaagggcagcacacgcacccgagccccgtgagctaccacatgcacaggcagcaggggctcatgcatgtgagcgcgcgcggtgtcatgcccggcgccgccggcgcctaccagttcggcgcgccgccgccgccgctccttggcttcgacgaagccctcgccgctcgggtgcgaatgacgatgaaccagcagcagcagcagcagcagttaggcttcgtgccgagcatacacgccgccgccgcccggccgacgatgcctcctcttcatctctacaccgcgcagcaagacctcttccttccgtga

SEQ ID NO: 13089 - DNA, 960 bp, Oryza sativa
  Clone ID: TFbOSC23303j.C1.o9.gm
atggccatggcgggcgccggcgactggccgttcgccgccgacgaagcgtacgccgactcgtcggccatattcgccgagctcggctgggccaacgggctcgccgtcgtcgacgccgtgggggagctactgccgccgctggatccaccgggcgagctggccacgccgccgccgccgccgctggatctgccggagacgccggccgggtcctccgcggacggcgccgcgtcgtcgtgctccaccgacgacgccgacggcgggaagccggccgccgcgtccaccgaggcagcgagcaagtcgctgacgcctgggaagaagagggcgcggcaaccgcggttcgcgttcatgacgaagagcgagatcgatcacctggaggatggctatcgctggagaaagtatggccagaaagccgtcaagaacagtccttttccaaggtgcacgaacagcaagtgcacggtgaagaagcgggtggagcgctcctccgacgacccctccgtcgtcatcaccacctacgagggccaacactcccaccacaccgtcaccttcccccgcgccgccgccaccgccgccggcttctcgcacatccacgccatggccgccctggccgccgcacccttctccgcgcaccaacaactgtacagcaacctgcagccgccgccgccgacgatgccgcttgctgctactactccggcgtcgtcgtcgtcgctgctacagctgcctctgcactgcaaccatgagctgcaggttgttgccagctgcggcggctacccgtcgtcgtcgtcgtcgccgccggcgagtgttcttcccgtcgacaaggggctccttgatgacatggtgcctagggcaatgaggcatgatggccgtgcgccgccgccgatcctgtcgtcgtcgtcgctcgggaaggctgccgtcgtgatcgccaagccgtcgccgacctcgtccgcccctccgtcgtcgccgtag

SEQ ID NO: 13090 - DNA, 954 bp, Oryza sativa
  Clone ID: TFbOSC400495j.C1.o37.gm
atggcgggcgccggcgactggccgttcgccgccgacgaagcgtacgccgactcgtcggccatattcgccgagctcggctgggccaacgggctcgccgtcgtcgacgccgtgggggagctactgccgccgctggatccaccgggcgagctggccacgccgccgccgccgccgctggatctgccggagacgccggccgggtcctccgcggacggcgccgcgtcgtcgtgctccaccgacgacgccgacggcgggaagccggccgccgcgtccaccgaggcagcgagcaagtcgctgacgcctgggaagaagagggcgcggcaaccgcggttcgcgttcatgacgaagagcgagatcgatcacctggaggatggctatcgctggagaaagtatggccagaaagccgtcaagaacagtccttttccaaggtgcacgaacagcaagtgcacggtgaagaagcgggtggagcgctcctccgacgacccctccgtcgtcatcaccacctacgagggccaacactcccaccacaccgtcacctttccccgcgccgccgccaccgccgccggcttttcgcacatccacgccatggccgccctggccgccgcacccttctccgcgcaccaacaactgtacagcaacctgcagccgccgccgccgacgatgccgcttgctgctactactccggcgtcgtcgtcgtcgctgctacagctgcctctgcactgcaaccatgagctgcaggttgttgccagctgcggcggctacccgtcgtcgtcgtcgtcgccgccggcgagtgttcttcccgtcgacaaggggctccttgatgacatggtgcctagggcaatgaggcatgatggccgtgcgccgccgccgatcctgtcgtcgtcgtcgctcgggaaggctgccgtcgtgatcgccaagccgtcgccgacctcgtccgcccctccgtcgtcgccgtag

SEQ ID NO: 13091 - DNA, 1200 bp, Oryza sativa
  unsure (1)..(1200): unsure at all n locations
  Clone ID: TFbOSC101754j.C1.o8.hg
nagcagaggaccgcgcgcggagaggcgggaacggagagggaggaccgcncgacacaaaccggacccacggagcgacagagggcgnagggaaggagcccgccagaggagaggccnncgccagccggacgacaggaggagaggaggcgacagggaggggaccggaccagcaaaggcacaagccngaacgaggaaaagaacccccgaaaggagaagaganagagggggaccagcccaanagcgggggaagcaccgggcgggnagcaacggggaggaaaaccaaggccgccnncgcaagcgaaggggacagcaaaagaagcgcgggacccccaaaagccgaagcaggcgagggggccgcaaagaaaagaagaaaaagaaagggagaagggccggggggcaagcaagaaagacaggaaaacacgcaaaggaaaagacaccaccggcccaagcgaggacaacaacccgncggccaccccgagggcaggcaccgccccgccgccgagaaagcgcaagagcgagagcctcnncgactccccgccgccgccgccgccgccgcacccacacgcggcgccgcaccacatgcacgtcatgcccggcgccgccgccgccggctacgccgaccagaccgagtgcacctccggcgagccctgcaagcgcatccgcgaggagtgcaagcccaagatctccaagctctacgtccacgccgacccatccgacctcagcctggtggtgaaagatgggtaccaatggaggaagtatggtcagaaggtcaccaaggacaacccctgcccaagagcctacttcagatgctcatttgctcccgcctgccctgtcaagaagaaggttcagagaagcgcggaggacaacacgatcctcgtggcgacgtacgagggggagcacaaccacggccagccgccgccgccgctgcagtcggcggcgcagaacagcgacggctccggcaagagcgccgggaagccaccccatgcgccggcggcggcgccgccggcgccggtggtgccgcaccgtcagcacgaaccggtcgtcgtcaacggcgagcagcaggccgcggcggcgtcggagatgatcaggcggaacctggccgagcagatggcgatgacgctgacgcgtgacccaagcttcaaggcggcgctcgtcaccgccctctccggccgcatcctcgagctctcgccgaccaaggattga

SEQ ID NO: 13092 - DNA, 927 bp, Oryza sativa
  Clone ID: TFbOSC13125j.C1.o4.fg
atgaagaacaagggcagcagctgcaggtatcttcctcactcttctgcaccatgcgccaccgacggcgccagatgtttccgctgcgaccaccggccggcgatcgacgagatcgtcagggagcagtcgctggtgacccagctgcgcgccgtcgtgctgccggcgctggagacgaaggccgacgacgggcgggcggagatcgtggcgcagctgttcgggagcatactggattgctccaggaaggtgatctctgctctgaattctcgctacgtcggagaatcacctcctgacgatgatgagatcgtcgacaaaaggagggcgaagaggaagaacagtgagggcaagaagggtgatgatcaggtgaaagtgaagccacatgagcacaagagaagcaggagatacactaactcaacatcacaaatcacagctgttccacattatgacggtcatcaatggagaaaatacggacagaagaatattaacaactcaaaccaccaaaggagctactacagatgcagctacaagcatgaacaaaactgcaaagcaaccaagacagtgcaacaactggacagtgccggcgaaaccatcatgtacaccgtggtctactacggacaacacacctgcaagactaacatgagcaatgctcctctccatgttgttgaaacaagtaccactcaaagcatctcaacaacatgctgctctgatgatcttggcgattatagccaaaagatggagaacatgcacacaccagagttggcagaagtgtgctctgatgagcttggttcttaccatgcaataataggggcagagcacagtgcactagggttggaggatgaacacatgcacaagctgctcgacacatttgcatgtggagcattagatctggacagctgggagattgatgcaattgtgagatctggtttctgctag

SEQ ID NO: 13093 - DNA, 930 bp, Oryza sativa
  Clone ID: TFbOSC400920j.C1.o10.fg
atggccgtggacctgatgggctgctacgccccgcgccgcgcagacgaccagctcgccatccaggaggcggccaccgccggcctccgcagcctggagatgctcgtgtcgtccctctcctcctcctctcaggccgccggggctcacaaggcctcgccgcagcagcagccgttcggcgagatcgccgaccaggccgtctccaagttccgcaaggtcatctccatcctcgaccgcaccggccacgcccgcttccgccgcggcccggtcgagtcgtctgctcccgccgcccccgtcgctgctgctccccctcctcctcctccaccaccggcgccggtcgctgccgccctcgcgccgacttcctcgcagccgcagaccctgacgctggacttcacgaagccgaacctgaccatgtcggccgcgacgtccgtgacatccacgtcgttcttctcgtcggtgacggccggcgagggaagcgtttccaagggccggagcctgctctcctccggcaagccgccgctgtctgggcacaagcggaagccctgcgccggcggccactccgaggccaccgccaacggcggccgctgccactgctccaagagaaggaagaaccgggtgaagaggacgatccgagtgccggcaatcagctcgaagatcgccgacatcccgccggacgaatactcgtggaggaagtacggccagaaacccatcaagggctccccttacccacggggctactacaagtgcagcacagtgagaggatgccccgcgcggaagcacgtggagcgcgccaccgacgacccggcgatgctggtcgtgacctacgagggcgagcaccgccacacgccggggcccctcccggcgccacccgccgccgccgccgtcgccgcgatgccggtgtccgtcgccgtgtccaccggcaacggacatgtctaa

SEQ ID NO: 13094 - DNA, 1266 bp, Oryza sativa
  Clone ID: TFbOSC400542j.C1.o3.fg
atggaggaagcaaacagggaggcagtgcagagctgtcacagggtgctcaccctcctctccagcccccatagccagcttgtccctaacaaggatctcgcggcggctacgggagaggctgttgcaaagttctgctccgtggcatccaggctgaacaatggcaatggcctccagggccatgcccgggttagaaagatcaagaagcccttgcctatctttgatagcaacctctttttggagagccctgcactggctgtggcgatggcagccaagacacctaactcgagtccgatcactagcctccagctgtttccgaggtaccatcagatggagggctcttcttcaaaggatcctgttaggatccctgcccaattccccaaaaggttgcttctagataaccctgcggttgattcggatgggccatcacgggggccaccgctccagctcatccagccggtgtctgttgcgcccccagctggaacgcctcacccggcattgccttcggcgcatcttcatttcatccagcagcatcagagctaccagaggtttcagctcatgcagcagatgaagatgcagagtgagatgataaagaggagtggccttggtgaacagggtggtagcaatggtggtggtaagggtgttaatctcaagtttgacagttctaattgcacggcatcatcctcccgttcattcttgtcgtctctgagtatggaggggagcattgcgagtttggacggtagccgctccagtcgtccattccagctagttagtgggtcacagacgtcaagcactccagagttaggcctcatgcagaggaggaggtgcactggtagggaggatggtagtggacgatgcacaactgggagccgatgtcactgtgcgaagaaaaggaagctgaggataaggaggtctatcaaagtccctgcaatcagtaataaggttgctgacattccagctgatgagttctcatggaggaagtatggacagaagccaataaaaggatccccacatcctaggggttactataagtgtagcagtgtaagaggatgcccagccaggaagcatgttgagagaagtggcctccagggtgaatgtggcaaggctactgacaagcgcagtgacaggcaaccattcgtatccgttctactctgtccaaagtccaaaccgtgcaagtctgaaatggcctgtttccttgtagccactagcccactaggcaagcttgaactaatgccagatactcaaggcccaactgccccaagtactccataa

SEQ ID NO: 13095 - DNA, 2184 bp, Oryza sativa
  Clone ID: TFbOSC400075j.C1.o19.fg
atggcgctggagctgagcctggtgtccgcttcgccccctggtgggctggcggcgagcccgcccccgcccgccgccatcccggggaaggagcagcaggtggccggggtggggatcctgctgcagatctccatgctcgtgctctccttcgtgctcggccacgtcctccgccgccaccggttctactacctccccgaggccagcgcgtctctcctcatcggtctagttgtcggtgggcttgctaatatttcaaatacagagaccaacactagaacccaatcaggattcagtctatccccaaaaccattctttgcaaattttggggctattgtaacttttgccatccttgggacattcattgcttctgttgtaacaggagttctcgtctatcttggtgggttgacatttctaatgtacaaacttccatttgttgagtgcctcatgttcggtgctcttatatctgcaactgatcctgtcactgtgttatcaatattccaggagctgggcactgatgttaacttgtatgctcttgtgtttggagaatctgttctaaatgatgcgatggcgatttcgctttacaggacaatgtcattggtcagaagtcaagcagcagctggggagaacttctttatgatggttttccagttccttgagacctttgttggttcattgtcatcaggttgcatcacagctcagaatattctcaactatttcaaagggacctttggcattgtggtgttggagttggatttatctctgctcttatatccttttcctaagttctacatggaaactctgtttgcaaaacatgaaagactatgcatgcttagtattgaccatgttaaattgcaatatttatgtattactatttaccatttactcattgcttgttttacggtaaattattttatttactacttgatcttgtgcaaccttgaccactctgtgtacctgtttaagtatgctggactggatattgacaagtatatgttagcagaaggacttgggttgtcaggaattgtttccatactattcacaggaatggttatgaagcactatacattttccaatctctcaaacaactctcagcgcttcgtttctgccttctttcacttgctgtcatctttagcagaaacatttgtggcagtaaatgtcttttcttgtgcatatttggttaacatgtcacggccagaacatcgacgcatacctctaaagcatcagaaagcactttggtttagtgggcttagaggggccatggcttttgcacttgctctccaatctgccaatgaacttcctggaggacatggaaaaacaatattcacaaccaccacagctattgttgttttaacggtacttcttatcggaggatcgacgggcaccatgctggaagctttggatgtaattggtgatgaaaacagatcaatagaaaattatgacgacaacaatggttacatccccccaacgtatgaggaaggttcatcatctggaggaggattaagaatgaaactgaaggaattccacaaaagcacgacatcgttcactgcccttgacaggaactatctgactccatttttcaccagtcaaactgatgaggatgatgatgtcttcgaaattggccattatgccactcccaagagtgggtttcgccaaaatgccattctgccgaatggattcgttaaaatgccatgtacaagagataccaaacatttgttttgccatttgcgccaattctctccatttttacctaattttgcatctgggctgaccaaaataccccttcgggctggttcaagaccagtactccgcaacacctcctccggctgtgccgccgccgccgcctgcgcggaccagtactccgccgcgacgcccgataactcctccgtcacgttcggtgacgacgaggccgacaacgagtcgcatagcagcgaaggctacgagcccgaagccaagtgctggaaggaggatgctgacaatgagggtagctccggcggcatgggcggcggcgctggcgggaagccggtgcgcaagccgaggcttgtggtgcacacgctgagcgacatcgacgtcaacatcgacatcctcgacgccggcttccggtggaggaagtacggccagaaggtcgtcaagggcaaccccaacccaaggagctactacaagtgcacgacggtgggttgcccggtgcggtag

SEQ ID NO: 13096 - DNA, 1695 bp, Oryza sativa
  Clone ID: TFbOSC400934j.C1.o26.np
atggggggcgagccgcgcgcgcgcgcggaggcggcctgggcggctgcgttgcctgccgcgttggttgcgctggtgcgcgacacggctacatacacacgaatgatgcaccgtctccgaatggaaacgccacggggccccacctgccagcttgacccctgctgctgctgctgcactgcacatgttattccccctccgcctccggtgtcacgcacgcacgcgacgcgacgcgatgccgaggcgtccgtaccaccaccgccagcatcagcggccgtcagctcgagatcggacggcacgggacagatggcagcaggcgtcacgctggcgtgtgccgcccccccgccgctaagggccccacgtgccagcgatggaggcaggcgccgtggggtggtcaaagggggcgcggggacggacacgtgtcggtcgccgcaacgtctgaatgttcgaccgcgcgagagagagagggtgcgtgcgtgcgtgcgtgctagagccaagaaccacgagcacggccagcgtcggcgagaggcggcggtggatccggctatgtcgggcgagtaccagttccaggacgagctggcgccgctgttcgcgcggccggggggcggcgcgggggagatgcagatgctgccgtcgtcgtggttcgccgactacctgcaggcggggacgccgatgcagatggactacgacctgatgtgccgcgcgctggagctgccggtcggggaggacgtcaagagggaggtcggggtggtggacgtcgtcgcggccggcggcggcggggcgccgccgctgacgccgaacacgacgtcgtcgatgtcgacgtcgtcgagcgagggggttggtggaggaggtggaggcggcgccggcgccggcgccggggaggaggagtcgccggcaaggtgcaagaaggaggaggatgagaacaaagaggaaggcaagggagaagaagatgaaggacacaagaacaagaaagggtcggcggcgaagggagggaaggcggggaagggggagaagcgggcgaggcagccgcggttcgcgttcatgaccaagagcgaggtcgaccacctcgaggacggctaccggtggcgcaagtacggccagaaggccgtcaagaacagcccataccccaggagctactacaggtgcacgacgcagaagtgcccggtgaagaagcgggtggagcggtcgtaccaggacccggcggtggtgatcaccacgtacgagggcaagcacacgcaccccatcccggccacgctccgcggcagcacgcacctgctcgccgcgcacgcgcaggcggccgcggcggcggcggccgcgcaccagctgcaccaccaccacggccaccacggacaccacggcatggcgccgccgttgccgctgggctccggcgccgccgcgcagttcggccggtcgtccggcatcgacgtgctgagcagcttcctgccgcgcgccgccgccgcccaccacggcatgactacgatgggcggcgccgcggcgacgacgacgacgagccatggccttaacagtgcaatcagcggcggaggcggcgtctcgagcgagacgacgagcgcggtcaccgtcgccgcctcggctcagccgtcgtcaccggcggcgctccagatgcagcacttcatggcgcaagacttgggcctcctgcaggacatgctgctgccgtccttcatccacggcaccaaccagcct

SEQ ID NO: 13097 - DNA, 1306 bp, Oryza sativa
  Clone ID: TFbOSC400940j.C1.o1.gm
gggtacgtcgcggttggaccccgaccagggaccgaccagcggcaggacgtcgccgtcccccggctggaccggcctttccgagacaaaaagcagagccaagaaccacgagcacggccagcgtcggcgagaggcggcggtggatccggctatgtcgggcgagtaccagttccaggacgagctggcgccgctgttcgcgcggccggggggcggcgcgggggagatgcagatgctgccgtcgtcgtggttcgccgactacctgcaggcggggacgccgatgcagatggactacgacctgatgtgccgcgcgctggagctgccggtcggggaggacgtcaagagggaggtcggggtggtggacgtcgtcgcggccggcggcggcggggcgccgccgctgacgccgaacacgacgtcgtcgatgtcgacgtcgtcgagcgagggggttggtggaggaggtggaggcggcgccggcgccggcgccggggaggaggagtcgccggcaaggtgcaagaaggaggaggatgagaacaaagaggaaggcaagggagaagaagatgaaggacacaagaacaagaaagggtcggcggcgaagggagggaaggcggggaagggggagaagcgggcgaggcagccgcggttcgcgttcatgaccaagagcgaggtcgaccacctcgaggacggctaccggtggcgcaagtacggccagaaggccgtcaagaacagcccataccccaggagctactacaggtgcacgacgcagaagtgcccggtgaagaagcgggtggagcggtcgtaccaggacccggcggtggtgatcaccacgtacgagggcaagcacacgcaccccatcccggccacgctccgcggcagcacgcacctgctcgccgcgcacgcgcaggcggccgcggcggcggcggccgcgcaccagctgcaccaccaccacggccaccacggacaccacggcatggcgccgccgttgccgctgggctccggcgccgccgcgcagttcggccggtcgtccggcatcgacgtgctgagcagcttcctgccgcgcgccgccgccgcccaccacggcatgactacgatgggcggcgccgcggcgacgacgacgacgagccatggccttaacagtgcaatcagcggcgaagacggcgtctcgagcgagacgacgagcgcggtcaccgtcgccgcctcggctcagccgtcgtcaccggcggcgctccagatgcagcacttcatggcgcaagacttgggcctcctgcaggacatgctgctgccgtccttcatccacggcaccaaccagccttga

SEQ ID NO: 13098 - DNA, 843 bp, Oryza sativa
  Clone ID: TFbOSC464j.C1.o2.fg
atggcgaggcgcctgccaaagtccgagaggtcgccgtcgccgccgccgccgccgcccggcgaccaaagggacgctgccatccaggagctcagcaagggcagcgagctggcgacgcagctcatggcgcagctggagctcatcccggagcgggagctcgacggccgccgcgacgacgcgctggccaacgtgaggagcctctccatgtccctcagctcctcgctctacgccctccggtccgagaggagggagcactactactgcggctcctcctcctcatccggcggcgctgggccagctgctgtcacctccgtctccggcgccggcggcgaaagaaagacgaagcgccggcgaggcaagcatggcgaggagctcatcgagacggtattcattactacgacaccagaaaatgatgggtttcactggaggaaatatggcgagaagaatatcctcaacagtgaatttcgaaagttatactacagatgtggttacagtgatgagcgaaagtgtcaagcaaagaaatatgtgcagcaagaaaacaacaaacatcccccagagttcagggtcaccctcaccaacgagcatacatgcaatacagtgttccaagatcagcccagttcaagcagtactaattcccaagtgctcgacttcacaaaagcatccatttcctcatcattaatggattctcatgtcggcgcgccgatcttgaaggaagaggaagaagaagaagttccctccattgatgagagcacaagaatcatgtccacaattatgcgtaactatggatcctatggcgactatgatgagtcgtctccgcagccatggaatggtgccggctggaagtga

SEQ ID NO: 13099 - DNA, 1872 bp, Oryza sativa
  Clone ID: TFbOSC400127j.C1.o3.fg
atggaggactggatgccaccacccacacccagcccgagaacactcatgtcaagcttcttgaatgaagattttgtctctggttcattttccaatattttcagtgatcatgagagcaacaaaccccaggatcagtttgagagaaacagagagcttgtggatttgagtaaggaagtgccttcccaattcgcaagacccgcattccagagggatgcttccctggatcatagcttggtcagtcctacacagagatcaaactcgcatggtggtttggcagagcgcagggctgcgagggctggtttcagtgtcccgaaaatcgatacatcccgtggtggttcatccacagtaattcgatcgcccgtggcaattccaccaggtcttagtccaacaacacttctcgagtcaccggttttcctttacaacgcaatggcacagccttctccaaccactggcacactgccatttttgatggcttcaaatgctaagtcaacaataccgtcagctaccaagatggacgaagattgcacatttggcaatgacactttctccttccaaccgcatgtagggtcgagacggccaaatttctccgctgcagaaaagggtcccaatgcttgtcaccaaaaccaatcgctgtcgaatatccatcagcgggaatccagtcttcagtcaagctttactgcagtcaaagatatcactgatgaaaaaaacattaaaacaaagacatctgactccatgtttggtgataaccactcttctgatgaacaagatgatgagactaaccaaaatggagaaaactctatgccacctccgaaccaccgttcaggtgtccctctgtcacataccaatgatccagaagtgaatgtcctagagaaccgcggttcacagacatgccataactctgcatccttgtgggacaatgccaaaaatgattgccttcaagatgttcaaagtgaagttattgaaacaagaacagctgcttgtcttccagtatcaaccaattgtgatacatctatcatggagtcccaagatgcagttgatgtgtcgtcaacactatctaatgaggaggatgatagggcaacgcatggcacggcttctatagagtgcaacggggatggagatgagactgattccaagagaaggaagctggatgctttgacagctgcaactgctgctattaccaccaccagtaacattgacatgggagctgcggcatcgagaggtgtccgggagcctcgtgttgttgttcagacaacaagtgaggttgacatccttgatgacggttaccgctggcgcaagtatggacagaaggttgttaaaggaaatccaaacccaaggagctattacaaatgtacgcaccaagggtgttcggtgcgcaagcacgtggagagagcatcgcatgatctaaaatccgtcatcacgacgtacgaggggaagcacaaccatgaagttccagctgccagaaatagtggacatgggagctctggatctggaaacgctccatctgcaccgcaatctaacggctctcagcgcaggcaagaacaagggcaagccagcttcagccagtttggtggcgcggctcccttcagctccttcgttctcccaccaagaaaccaatttggaccatcggcgagcaatttcccctttgggatggtcccgccaggcatggcgattcccatgccatctctagggtctcttgctccagcaaagatggctggtcatccatccaccatgcagggctaccaggggctcatgattccggaaggagagatgaagacagagcccatgtcgcagctcggcttccccgcggtaaaccaatcttcatcatccttccaacagatgatgaacaggcctccatcatttggacctcagatgtaa

SEQ ID NO: 13100 - DNA, 633 bp, Oryza sativa
  Clone ID: TFbOSC401607j.C1.o4.fg
atgtctcctgtgccgagtccgcatcaatcacaccatctaggccatggctcaaggaaagagaagcgcatgaggaaggtggatacctttgcgccgcacaacgacggccaccagtggaggaagtacggcgagaagaagataaacaactgtaatttccccagatactactacagatgcacctataaagataacatgaattgcccagcaacgaagcagattcagcagaaagattatagtgatccaccattgtactcagtcacctactacaatgagcatacatgtaatagtgcttttcttcctcttagcccctcagagttccagctgcagactgcatctgggaaggcagtctccatctgctttgaatcatctggggctcaagaaccaatgaccaatgccagctcaccttcttcaagcgcagcacggcgtagcacaccttcagagaacaagaatcagcctcttccacggcattcggaagcctattcttggggggttggtgttgtagaacaaaagccgtcctgcactgagctccaatcttgcagcaccgaatgtcaggatgcattttcagctggtacgattcctgaagagacagtagatgcaggaagatttggttctatcagattcttccattttttgtaa

SEQ ID NO: 13101 - DNA, 762 bp, Oryza sativa
  Clone ID: TFbOSC400974j.C1.o8.fg
atggcggatccgttcccggcggcggcgcgcggcggcgagcagggtggtggcaccgcggggcagctggtgtcgacgccgtccaggttgaggacggcggtggcgtccatgctcaaccgcaccggccacgcgcgcttccgccgcgccgcccccgtcgtcgtgcaggaggaggaggatgaggcggcggcggcggcgagggatgcggtcgtgcggtgtgacgggctcagcgcgtcggccagctcgtcgttcccgtcgtcggtgacgggggtcaccggcgatgggagcgtgtccaacgcccgcgcggtgctcccggcggcaggcgacggcgacaagccgccaccaatgcagtctgcttcagattatgcttctgatggccgcctcaaacgcagcagcgacgacgacggcgagcgctgccactgctccaagaaaaaacggaaggcgtcgtggagggcgaggcggcgcatccgcgtgccggcgatcagctcacggaacgccgacatcccggcggacgactattcgtggcgcaagtacggccagaagcccatcaaaggctcgccttatccacgcgggtactacaagtgcagcacggtgcgcgggtgcccggcgcggaagcacgtggagcgcgaccccggcgagccggccatgctcatcgtcacctacgacggcgaccaccgccacggggaacccggccatcgacgtcccgatgaggcggcaacgacgacggagcacaggacgactgaccaaactactggaagattgctctag

SEQ ID NO: 13102 - DNA, 1524 bp, Oryza sativa
  Clone ID: TFbOSC400426j.C1.o40.fg
atggacgtcgtcgtcgagagcccgccggtgagggacgagaagaaagtcgacgtcgccgcgattggaggcgcgcctccaatagtctttgagagttttgcaccatcgacgcagagagattcaaccatcatcaagaaggaggagaagatggaggcagcgaaggcggagatgggcgaggtgagggaggagaacgagcggctcaagacgatgctcacacgcatcgtcagcgactacaagtcgctgcacacgcacttcctcgacgtcgtcaaggtcaaggagcaaacggcggcggagctctccggagacgacgacgacgacgagcccgacgacctcgtctccctgagcctctgcacgaggcccaacgccgccgcgacgcgccggaagggccacgagaggacgccgtcgtccggcggcggcggcgacgacgggcggctgtccctcgggctgagctgcgctcgcggcggcgttgcctccgacgacgacgacgacaagcaggcgagccgccgcgcgttgccgccgatgcccgtgctgaacctcagctccgacagcagcggggacgccgccggcgccggcgccggcgagcctacccagccgaacaaagcgtccaggagctcgagcggcggcggcgatggcgccgacgacgaggtgctgcagcagcagcaggccaagaaggctagggtttccgtcagagtcaagtgcgacacccccacgatgaacgatgggtgtcagtggcggaaatacgggcagaaaatctcaaaggggaacccttgcccgcgcgcctattaccgttgcaccgttgcacccaactgccctgtacgcaagcaggtgcagagatgcgcggacgacatgtcgatcctgatcacgacgtacgagggcacgcacagccacccgctgccgccggcggcggcggcgatggcgtccacaacgtcggccgcggcggcgatgctgacgtctggctcgaccaactccacgatgcacggcagcggcggcgttcaccaccacctgccgttcgcctcggccgtcggcggcggcggcggcgtcgggctgctcggcccgaccaccatctccaccgccacgtcctgccccaccgtcacgctcgacctcaccgcgccgcactcgctcctgcacccgtcgtcggcgtcgccctacgccgccgccgccgcggggtacgagtccagcagggcgctgccggcggcgtggagcagcgggtacctggcgtacggcggcgcggcggcggcgcagccatactacgccaagggcgttgcgccgtcgccgttcggccatcatttcggcatgatgggcatggcggcggcggcggcgaggccggcgccggagcagctgttcggcggccagacgacgtcgccgtacctgcagagagccatcggcggcggcggcgtcgcgccggcggccgtgacggacacgatcgcgaaggcgatcacgtcggacccgagcttccagtcggttttggcggcggcgatcacgtcctacatggggcgcggcggcggcgcggcggcgccgaacaagtga

SEQ ID NO: 13103 - DNA, 1035 bp, Oryza sativa
  Clone ID: TFbOSC102216j.C1.o15.fg
atggtgaattttctcaaattatcggatattcagtctacggatgcggaaagcgtggatgttggatttattagctcggttcataagacaacaagaaagaaagggttcactacatgtctgttaggaaggaattccattttgtttggcaagacgactgtggtaataggtgagaaggtggagcactgttgtaggtggagtcaagaagaagaaattacagggatagcaggagttgactcttgttatggtgagcctggtggagtcttatcggggcggctcggcgtgaacggcgaaaagggatcaactcaatttcagatctcctatggtgtttcttccgcgtttggtttccgatgtgatttcgggaccggctttataacacatgggatgggagatcaccacggcatgcctcttcctcctccacttcaactaccgtgccatccgaagctactccagatgccattcgaccaagaagatcagcccggaatccatggcgtgatgctctcttctgaccactgcgggctgtaccctctgccggcgcttccgttaagcaactccgccgccgccgccgccgcaaccgtcgcattggggaagcacagtgcagccgccggttccatgcccaatattggcggcgctgaggaggtggccaccactgtaaccaaagctggcaatgagagtactacttgcaatggctccactacatggtggaggggctcgacgatggcggcggcgggggagaaggggaagatgaagatcaggaggaagatgagggagccgaggttctgcttccagaccagaagcgaagtggatgtgctggatgacgggtacaagtggaggaagtacggacagaaggttgtcaagaacagtctccatcccaggagctacttcaggtgcacgcacagcaactgccgcgtgaagaagcgggtggagcggctgtcgacggactgccgcatggtgatcaccacctacgagggccgccacacgcactccccctgcgacgacaactcctccggcgagcacaccaactgcttcagctccttctga

SEQ ID NO: 13104 - DNA, 1128 bp, Oryza sativa
  Clone ID: TFbOSC31206j.C1.o5.fg
atggtgaccccgttgtcggtgttgctcgctgctgctgctggtggtggtttcgatcgccgtgatcggagcagggttgtcggcggcggcggcggcggccgagagggttgggagatggacgaggtgctggcgcagatcagcgaggggttccggctcgccggcgagctgatgtcggagctcgcggcgacccagaacgacccggactacctggccgcgcgctgccacgccattgccggcgcgtacgccgccgcggcgcgcgtgctgcagggggcgcgccacggcggcggcggcgtgggcgcggcgtcaacgtcgttcggcggcgagggatacctccatcaccagcatcgccagcagaggacctcctccgcattccgaattgcttgccaagtcatggcgcttccgctttgcacacaagttacacgagggtttacacacaactacgagtactctacgaggagggagagcggggagaaggtgacggtgatggtggcggcacagcggacggggaacacggagcagccgccggatgacgggtacacgtggcgcaagtacggccagaaggacatcctcggctccagatatcccaggagctactaccggtgcactcacaagaactactacgggtgcgaggcgaagaagaaggtgcagcggctggacgacgaccccttcacctacgaggtcacctactgcggcaaccacacctgcctcacctccaccacgccgctgctcacactccccgccgccgccgccacttcggtgacaaactctccgaccgccgccgccgtgctcggccaggacttcgtcatggcgcccgccgccgatcagcagccgccccagcaccagcaggcgcagccgccgctgtccacgtccatccacctcggcatcggatggccgatgacgccggccagcctcgccggcgccgtaggcgagggaagcactagcactaccgccaccgcgccgcaggtgacgacaatgggcgccacggcggccggcggcggcggtgcagcagctagggacgcggaccattacccggtggcggacctcgccgacgtcatgttcaactccggcggcagcggcagcagcagcatcatggacggcattttttcttctcacgatcgacgtgataactga

SEQ ID NO: 13105 - DNA, 945 bp, Oryza sativa
  Clone ID: TFbOSC400044j.C1.o100.np
atgggcttcgccaaaacaacaaccgaaacggatatcaaattgtttcttatggggccgtgcggggcatcaaagcaaaacaattcgaaacggggcggctcgcgcacggtcgcgcgcgccgaagcttcatccaacgactcgagccaggaagctcgacggctcttcggcgcgtgtcacgtaagagagtcggccaacccacatgcacgtgtaccgatgtacatggcggcggcggctgcgggagcaagcacacccttcaatttttgccgccacggctcgcacgccgagtacgacgccgtcttcagcggcagctggatggcgcgccgcccctccgcggcgccgcacggtggcggcgcctccggctccggctccggcagcggctacggcgccgcctcgtacgttgctcccaccttcggcgcggcgtttaggcagcagcatctcgacctcctcgactacctgtccgacgatcagggcgttccggcgccaccaccagcggctgtgcccagcgcgtcgtacgtgacgccggcgccggcgatggcccccgctgaaccggtcgtgccggatgctgttgccgccgccggcggctatccgaggagcgtggctgcggcggcggcggccgtggccggcgagggaagagatcggacgacgacggacaagatcgcattccggacgaggtcggacgatgagatactcgacgacgggtataagtggaggaagtacgggaaaaagtccgttaagaacagccctaatccgaggaactactaccggtgctcgacggaggggtgcaacgtgaagaagagggtggagagagacaagaacgacccgcggtacgtggtgacgatgtacgaggggatccacaaccacgtgtgccccggcactgtctactacgccgcgcaggacgccgcctccggccgctttttcgtcgccgggatcagtcacccagaccttaat

SEQ ID NO: 13106 - DNA, 486 bp, Oryza sativa
  Clone ID: TFbOSC400426j.C1.o60.gp
ggaattatgcacaaatcatcacgattttatagctaaaacaatacggcgtactccgtttagaaaaaaattaattctaacgacgaatctgaagttctaaacatatgattgtctagatttatagttaagatttaactcttttttttttaagtagtaagtctagtgcatacaagaaccgatcgatcgatcacgaacggcggtacaactaacaagcaaccaagaaaaacaaaaacagaagtaaattcagcgttcagaacgacgattccgacgagtgcgccgccgcggcggcgtgcagcggcgccccccacgcctgcgcgtgcgcgggaggcggcgaggccgccgccgccggaacgctccacggcggcgcagcggaagtagggtacgggaggtggccgccgccgccgacgcagccgggggtcgcgtggttgtggacgccgtcgtaggtggtgacgacgtagcgcgggtcgtcgccgtcgcgctccacccgct

SEQ ID NO: 13107 - DNA, 1290 bp, Oryza sativa
  Clone ID: TFbOSC400099j.C1.o8.fg
atggaggaggaggtggaggcggcgaacagggcggcggtggagagttgccacagggtgctggccttgctgtcgcagcagcaggaccctgcgttgctcaggagcatagcttcagagacaggagaggcctgtgccaagttcaggaaggtggtctccctcctcggcaatggcggcggcggcggcggcggcggcggcggtggtggacatgctagaggcaggatggccgggagaagcaggccttcggcggtgctgagagagaagggattcttggagagcagcagcggcggcggccagctggggatgatgatgtccggtgctgccactccgtctactagctccgccgcgcatttgcgcaaccggattggcggaggcagcggcgtgccaccggattcgttgcgggggctcgatttggtcagctcgagcagcaagggtggtgctcatcagttcgatcctccgaagctggtgcagccgttgtcggttcagttccagttcggcgctaccgcgcataggtacccgttccagcagcatcagcatcagcagaagttgcaggctgagatgttcaagaggagcaacagcgggatcagccttaagtttgatagccctagtgccaccgggacgatgtcgtcggcgttcatgtcgtcgcttagcatggacggcagcgtggctagcttggaagggaagccgccgttccatttgatcagcggcccggtcgcgagcgacccggtgaacgctcaccatgtgcccaaacggcggtgcacggggagaggggaggatggaagtggcaagtgtgccacaaccggaaggtgccattgctcaaagaggaggaagttgcgaattaagaggtcaattaaagtgcccgccattagcaacaaaatagcagacatacctccagatgaatactcatggcgaaagtatggtcagaagccgattaagggttcgcctcatccaaggggttactacaaatgtagcagcgtccggggctgcccagcgaggaagcacgtcgagcgattaagagagaatggaggaagaacatgtgattggatagtgaccggcaagatttgctcaaagaagggagggattaggtttgaagatttcaaaggaagattgacaaaaggaagtgaacaactgaaacatcgtgtaagcctggaaaaggataagcaggatttggcttttagcgtgcacaagtttacttgcaatgacttgcctctgtatgttgcttttgctttattgaaagatcaaaattttcttttggcagaagaatcattcagcattaaagctgtttctacttgctaa

SEQ ID NO: 13108 - DNA, 1011 bp, Oryza sativa
  Clone ID: TFbOSC401122j.C1.o48.fg
atggagcacttcaacgactgggacctgcaggccgtcgtgcggagctgcagcttcccgcaatcggagcctcctcgcgtcggcgtcggcgtccccgcggcgccgggagcgggcggggctccggtggtggtggcgccgcccgcgcgcgcaccggatggtccggatcagatggcgcgggcgtcggcgtcggcgctgtacgacctcgagtacctggatttggatcataagccgttcttgctgcccgggtcgtcgtcttcgtcgtcgtcgtcccgagcggtggcgcgggcgcgaggggaggatgacggcaaaggcagacacgaggtgatgatctctttccccgcggcggcggcggcctccacgtccggtgcgcagccgcggtcgccgtccggtcggaagccgggcatacgcaccccgcggcctaagagaaggagcagcaagaagagccagctgaagaaggtggtgtacgaggtgccggtggcggacggcggcgtctcctccgacctgtgggcgtggcgcaagtacggccaaaagcccatcaagggctcgccttatccacggggatactacaagtgcagcagcatgaaggggtgcatggccaggaagatggtggagcgcagcccggccaagcccgggatgctcgtcgtcacctacatggccgagcactgccaccccgtgccgacccagctcaacgcgctcgccggcaccacccgccacaagtccgcccctaccggcgacgacgacaagccgacgtcgccgggccctgcagccggcagagcggccgccggcgagggagtggtcaagtgcgaggacgtcgacggcaacgagctgtcggcgatggccgcggatggcggcgcagaggacacggcggcggcggcggatgacgacggtgagttgtggccggaggggatggggctggagctggacgagttcttgggtcccatggatgacgacgtgttcgagttcgaccatgtcttggaggacgacggcgtgctggggcgacggctctcgctatag

SEQ ID NO: 13109 - DNA, 585 bp, Oryza sativa
  Clone ID: TFbOSC15464j.C1.o1.fg
atggcggcttccgtaggactgaaccctgaagctttcttcttcagcaactcctactcctactcctcatcccctttcatggccagctacacgccggagttctcggccgccgctatcgacgccaacttattctccggcgagctcgatttcgactgctctctcccagctccggcccaggagtacccggaaaatgaaaacactatgatgaggtacgagagcgaggagaagatgagggcgagggtgaacgggaggatcgggttcaggacgaggtcggaggtggagattcttgatgatggcttcaagtggaggaagtacggcaagaaagctgtcaagaacagcccaaatccaagaaactactaccggtgctcgacggaggggtgcaacgtgaagaagcgagtggagagagaccgggaggaccaccgctacgtcatcaccacctacgacggcgtccacaaccacgcgagccccgccgccgccgccgcggcgctgcagtacgccgccgccgccggcgactactacagcccgccgctcagcagcgccggctcgccgccggccgcctattcggcaggcggctcgctgctcttctga

SEQ ID NO: 13110 - DNA, 231 bp, Oryza sativa
  Clone ID: TFbOSC29687j.C1.o32.gm
atgggccggccggcgtcggggcggcgcccggcggcgggcggcggcggccgtggcgggtggcggggccgcggcggcggcgggcggccggcggcggggccgcgcgctgcggcgcccggcggggtcgcgcccggtggagggctgtggcgcccggcggggtcgcgcccggcggagggcggcggcgccgcgcgcggcggcgggcagcggggcttcgggcggcggcggccggagtag

SEQ ID NO: 13111 - DNA, 607 bp, Oryza sativa
  Clone ID: TFbOSC29698j.C1.o1.np
cgccgccaccatgggtggtcggcctaaataatgtggacctgctccatgcgaggcggtgccaggccacaaccacagtggcattcccattccagattcccacggccacgcgttgtatcatcaccaccacaatggattcataggatacagccacttggtccccgtctttcaccacggaccagcggcgcaggcttcctggcatgagccctctcctcccaccgtccgccgccacaatggtgggggcttccacgccgccgcgcatcttcagagatggtcgccgccgcatccatggtcttgcgaggaaggcgatcatcgagggaggccgcagatggggaataagggcgaggcggcggcggcgatgggcgccatggggatcaacgacgccggcaacaacacgtcggcggcggcggcggcgcagcatcatctgggggttggcgcggtgaggatgaagaaggttgggggaggaggaggaggaggagggaaggcgcggcggaaggtgcgggagccgagattctgcttcaagacgatgagcgacgtggacgtgctcgacgacggctacaagtggcgcaagtacggccagaaggtcgtcaagaacacccagcacccaagg

SEQ ID NO: 13112 - DNA, 1221 bp, Oryza sativa
  Clone ID: TFbOSC401719j.C1.o53.fg
atgcaagagagcagagagtattggcgcgacggcggcgatgtcgtcggagaggagctcttgagggagatcctcgatgagaccgccgcggtgcattccaattccaattccaattcaaattcaaattccaattcaaaggaggcggaggaggaggatgagagagaatattttgccgcagctgcagcggatgagcagctgcaggtggaggctccttgcgggcggcggcggcgggagtcgatggtgaacaagctcatctccacggtgtattctgggccaaccatcagcgacatcgagagcgctctctccttcaccgccgccggcgaccatcagctactcgccgacggtcacaatttcgctgcaagtagctgtagcccagtggttttctcgccggagaagacgttgagcaagacgatggagaacaagtacacactgaagatgaaaagctgtgggaataatggtgggctcgcagatgatgggtacaaatggagaaagtatggccagaaatccattaagaacagcccaaaccccaggagctactaccggtgcacgaatccgcggtgcaacgcgaagaagcaggtggagcgagctgtggacgaacccgacactctgatcgtcacctacgagggtctccacctgcactacacctactctcacttcctccactccacttcttcctcctcgtcgtctactaccacccaacaacaactgcagcctcagcctcagatgatgaccaactgcaagaagaagcccaagctgcacctgcacccgctgctgcacgacgacccacccccacccccaccgccgccggaaatgacgaccatgatgataatgcagagcttcagcatccagcaacaacaacatgatgatgatcagctgctgcagcctgctgcagatgatcacttgatggtgcaggctccccccgatgattgttacaatattaacggcagcagcagcagcggcttgatgatgagcttggacgacgacgagcaggccgccggcgccggcgggctactggaggacgtggtgcctctgctggtccgccgcccgccgccgcccatctgcaacaacaacaactactactactcgccggccaccacctgcacctctgacaacgagtacggctcgtcggcgtcggcgtcgccgtcctcctccgtctccgtctccagctggactactcccatgtctccctgcatcgacatggccatactctccaacatcttctag

SEQ ID NO: 13113 - DNA, 830 bp, Oryza sativa
  Clone ID: TFbOSC875j.C1.o1.fg
atgtcccatcaacaagccttggcacaagtaacagcagaagcagtccattctccgtacagtatgattaatcaatcagatttctcactcccgttctcgtcgacaacgacttcagtgttggcatcacaacatgtcaactcttctgccaatgtgtcatcaccacgagaaataccaactctgccatcccacacagataatagcaccattgaatcaactgaggtttcacatggattccaaactactgccctcactgaggataaacctgctgatgatggctacaactggcggaagtatggccagaaggcagttaagggtggggagtatccaaggagctattataaatgtacccatttaagctgtccagttaagaagaaagtggagcgctcatctgacggacagattactcaaatactttatagaggccagcataaccaccaacgaccaccaaaaagaaggtccaaagatggtggcgctttactaaatgaagcagatgtttcccctgagaaggaagatgcatcaactagatcagaacagggctcccaagattattctggaaaattcaaggcatcaaatgatggtggtccttcatcatccaggaggggagataggggtgagcaaatatcgggctcaagtgatagcaattcgagctcggtacccgaagaagtgaaggttgagggtagagctactagtgatggaaatgcgaacaaaagacatgtgccagctccagctcaaagaatcattgtgcaaacaactagtgaggttgatcttttggatgatggctaccgatggcgcaagtatggtcaaaaagtagtaaaagggaatcctcacccaag

SEQ ID NO: 13114 - DNA, 1092 bp, Oryza sativa
  Clone ID: TFbOSC419704j.C1.o3.fg
atggcggcggtggagagctcgaagaagctcgtggccatcctgtccaagtccggcgacccgttccggctgatggcggccgtcgcggagaccgacgaggcggtgtcaaggttcggcaaggtggtcaccatcctcagcaacagggtcggccatgcgagggcgaggcttggcaagaggaggagctcgccgccggttgatccgggctgcctcatggaccacccgttggcggcggcggcgagctctcctgctcccagcaatggccgcctccatttcagtagtagtgctgctactgcgtcgccgtctccggcaacggcggcggcggcttcctccgccgcgaacgtcacgccggcggtggttgaccggagcttgtttcttgagacgacgctcttggatttgaacagtcgcggcgctcctgctccagctgcatccatggcggcggctgccaagaacagctcgaagcttgcacctgcacccatggtgaacagctcctcctccgcaaatcacatccagttccagcagccgatgaagagctttcagttcgagcagacgccgatcagcgacaagttccacatcgagatgccgagaggcgtcggcggcggcggagggaaggaggtgatcagcttcagcttcgacaactcggtgtgcacctcgtcggcggcgacctccttcttcacctccatcagcagccagctcatcagcatgtccgacgccgccaccaactccgccgcggctgcggcggcgccgacgaccaagaagccgtcgtcgtgcgccaggaaggccaccgccgacgacgacgccggcggcaaatgccattgcccaaagaagaagtccgtgtcaatctcgccaccgtttctcggccatttctgccatgatcttgaccgtgttcttgcttccgatttcttcgcaggaaacccagggagaagaaggggatactacaggtgcagcagcaagaaggattgcccggcgaggaagcacgtcgagaggtgtcgcagcgacccggcgatgctgctcgtcacctacgagaacgaacacaaccacgcgcagccgctcgatctctccgtagtgcagcaagccaccgctaatccccagacctga

SEQ ID NO: 13115 - DNA, 673 bp, Oryza sativa
  Clone ID: TFbOSC31212j.C1.o2.gm
gacgcagcaatcgtccgggaattcggtggtcgtcaagaacctcgacgacggccaggcatggcgcaagtacgggcagaaggagatccaaaactccaagcacccaaaggcctacttccggtgcacgcacaagtacgaccagctgtgcacggcgcagcggcaggtgcagcgctgcgacgacgacccggcgagctacagggtcacctacatcggcgagcacacctgccgggacccggccaccgcccccatcatcgcggcgcacgtcatccaccaggtcgccgccggcgacaacgacgacggctgcggcggcctccaagcggggtcccgcctcatcagcttcgtcgccgcgccggcggcgccagtagacgctgccgcggcgccgacgaccagcacgatcaccacggtcaccgcgccgggcccgctgctgcagccgctcaaggtggagggcggcgtcggctcgtccgaccaggaggaggtgctgagcagcctcacgcccggcagctccgcggcgcgcggcggcggcggcggcggcggagtcgcgggtcccttcgggccggaccagggcgatgtcacgtcctccctgcactggagctacgacgccgtcgccggcatggagttcttcaagaacgacgaggttgtcttcgatctggacgacattatgggtttgagcttttga

SEQ ID NO: 13116 - DNA, 1023 bp, Oryza sativa
  Clone ID: TFbOSC900009j.C1.o3.fg
atgtcgccggcgccggcgccggcgtacgcgcaggtgatggaggacatggagaaggggaaggagctggcggcgcagctgcaggggctcctccgcgactcgccggaggccggccgcttcgtcgaccagattctccacaccttctcccgggcgatgcgggcgctcgacaaggcggcggtctccgccgccggaggagaagggtcggaggtgcagagcgaggtcacctgcgggggcggggccagcgccggcgggaagaggaaagcccccgccgccgaccggaaggccaactgccgcaggagcctgggagtgtttgagaaggggattgaggagattgggaagatacgtaaaacgaggacgcagcaatcgtccgggaattcggtggtcgtcaagaacctcgacgacggccaggcatggcgcaagtacgggcagaaggagatccaaaactccaagcacccaaaggcctacttccggtgcacgcacaagtacgaccagctgtgcacggcgcagcggcaggtgcagcgctgcgacgacgacccggcgagctacagggtcacctacatcggcgagcacacctgccgggacccggccaccgcccccatcatcgcggcgcacgtcatccaccaggtcgccgccggcgacaacgacgacggctgcggcggcctccaagcggggtcccgcctcatcagcttcgtcgccgcgccggcggcgccagtagacgctgccgcggcgccgacgaccagcacgatcaccacggtcaccgcgccgggcccgctgctgcagccgctcaaggtggagggcggcgtcggctcgtccgaccaggaggaggtgctgagcagcctcacgcccggcagctccgcggcgcgcggcggcggcggcggcggcggagtcgcgggtcccttcgggccggaccagggcgatgtcacgtcctccctgcactggagctacgacgccgtcgccggcatggagttcttcaagaacgacgaggttgtcttcgatctggacgacattatgggtttgagcttttga

SEQ ID NO: 13117 - DNA, 1260 bp, Oryza sativa
  Clone ID: TFbOSC413551j.C1.o2.fg
atgtcgggcggcggcggcggcggcgagggcttcccgttccacgacgagctggcgtcgctgttcgctgagcggccgccgaacggcgccatgccggggatgctgcagcagcagcagccgtggtcgttcatcgactaccaccaccacctgatgcaggagagcgcgccgacgacgccgccgctggactacgaggcattcgccggggagttcgacgacgacgtggcgcctctggaggaggtgaagagggagctggtggtggacggcgtcgggttgttccctgggggtggtgcttctgctgctgcggcggcggcggcggtggcggggccgatgactccgaacagcatgtcggtgtcgtcgacgtcgagcgaggcgtgcggcgtcggcggcggcgccggaggggacgaggagtcggccgggaagtgcaagaaggaggaggagggggacggcggcgacgacgacggcaaggaaggatcgtcgacgaccaagggggatggcgatggagaagacaagaacaagaaaggaggtaaggggaaggggaagggggagaagaggccgcggcagccgcggttcgcgttcatgaccaagagcgaggtcgaccacctcgaggatggctaccggtggcgcaagtacggccagaaagccgtcaagaacagcccatttcccaggagctactaccggtgcacgacgcagaagtgcccggtgaagaagagggtggagcggtcgtaccaggacgcggcggtggtgatcaccacctacgaggggaagcacacgcacccgatcccggcgacgctgcgcggcacggcgcacctcctcggcgccgccgccgccgcgcaccaccacggcggcctccagtaccaccatcccggccacttcgcagccgccgtcggccaccgtttgcctccgcagccgcacgacgcgctcggcggcggcctcctggcgccgccgcatgcgcagcatctccatgccatgcagcaccagatgcagctggcggcggcggcggcggcgagcggcggatcactgcacgccgccgccatgcagcagatgccgcagcctgatcatgctggcttggttgccatcatcgcctctaccaccggtgcttccaccacgccgccgccgccgccggcgacggggagcgctgctgctgctactactcctctccggatgcagcacttcatggcgcaggattacggcctcctgcaggacatgttcatcccgtcgccgttcttgcacaacgacgacgccaacaacaacaaccaccgttga

SEQ ID NO: 13118 - DNA, 840 bp, Oryza sativa
  Clone ID: TFbOSC900417j.C1.o3.fg
atggaggagaacgcgcggctgacgcgagcgctcgacgccattctggccggtcaccacgcccaccagcgcgcgctcttggcgccgtcgctgtcgccgccgccgccttccgccacagcaagggcgccgagcgtgtccaccagctgcgcggcgagggaggacgccgcaccggcggtcgccgccgccgccgcgtcgacggcatgtccgtcgagacagcagccgccgaccgcggagccacggcccaaggtcaggacggtccgcgtgcgcgccgacgccgccgacgccaccgacgccaacagcatggcggagaccgtgaaggatgggtaccaatggaggaagtacgggcagaaggtgacgcgtgacaacccctaccctagagcttacttccgctgcgcattcgcgccgtcttgccccgtcaagaagaagctccaaagatgtgcggaggataggtcaatgctagtggcgacctacgagggagaacacaaccatgccctgtccacgcagacaaccgaattcgtcgccagcggctgcactacgagccagcacgccggggggtcgtcgtcgtcgccgctgccgtgctccatctccatcaactcgtcgggccgcacgatcacactcgacctgacgaaccaagcagggtccggatcgatcgcgagctgcggcgtcgaggcggccgccgtctccggcgagctcgtcacggtgctctcgccggagttgaggaggcacctcgtggaggaggtggtgcaagtgctcaagaacgacgccgagttcgtggaggccgtgaccaacgccgtggccgctagagttgtggatcaaatcccacacattcctgttcatttgtag

SEQ ID NO: 13119 - DNA, 1857 bp, Oryza sativa
  Clone ID: TFbOSC400135j.C1.o2.fg
atggccgattcgccaaaccctagctccggtgaccaccccgcgggcgtcggcgggtcgccggagaagcagcccccggtggatcggcgcgtcgcggcgctcgccgcgggcgcggcgggcgcgggggcgaggtacaaggcgatgtcccccgcgcggctgccgatctcgcgggagccctgcctcaccatccccgcgggcttcagcccctcggctctcctcgagtcccccgtcctcctcaccaacttcaaggttgaaccctctccgacaactggtactctgagcatggctgcaattatgaacaagagtgcaaatccagacatacttccttcgcctagggataaaacatctggtagcacccatgaagatggtggctctcgagattttgaattcaagcctcatctgaattcatcctctcaatcgacggcttctgctatcaatgatcccaaaaagcatgaaacttctatgaaaaatgaaagcctgaatactgccctgtcatctgacgatatgatgatcgacaatatacctctatgttctcgtgagtcaactctcgcagtcaatatttcaagtgccccgagccaactggttggaatggttggtttaactgacagctcacctgctgaagttggtacatctgagttgcatcagatgaatagctctggaaatgctatgcaggagtcacagcctgaaagtgtggctgaaaagtctgcagaggatggttataactggcgcaaatatgggcaaaagcatgttaagggaagtgagaacccgagaagctattacaagtgcacacatcctaactgtgatgtaaaaaagctattggagcgttcgcttgatggtcagattactgaagtggtttataaagggcgtcacaatcaccctaagccccaacccaataggaggctgtctgccggtgcagttcctccaatccagggtgaagaaagatatgatggtgtggcaactactgatgacaaatcttcaaatgttcttagcattcttggtaatgcagtacatacagctggtatgattgagcctgttccaggctcagctagtgatgatgacaatgatgccggaggagggagaccttaccctggagatgatgctgttgaggatgatgatttagagtcaaaacgaaggaaaatggaatctgctgctattgatgctgctttgatgggcaagcctaaccgtgagcctcgtgttgtagtacaaacggttagtgaggttgacatcttggatgatgggtaccgctggcgcaagtatggccagaaagtagttaaaggaaaccccaatccacggagttactacaagtgcacaaatacaggatgcccagtcaggaagcatgttgagagagcatcacatgatccaaaatcagtcataacaacatatgaaggaaaacataaccatgaagtccctgcgtcgaggaatgcgagccatgagatgtccactccccccatgaagcctgttgtccatccaattaacagcaatatgcagggccttggtggcatgatgagagcatgtgaacctaggacatttccaaaccaatattctcaagcagctgaaagtgacaccatcagccttgatcttggtgttggaatcagcccgaaccacagcgatgccacaaaccaattgcagtcctcagtttctgatcagatgcagtatcaaatgcagcccatgggttcagtatacagtaatatgggacttccagcaatggcaatgccgactatggctggcaatgcagctagcaatatatatggttcgagagaagaaaaacctagtgaaggttttactttcaaagccacaccgatggaccattcggctaacttatgctacagtaccgccggcaatttagtcatgggtccgtga

SEQ ID NO: 13120 - DNA, 843 bp, Oryza sativa
  Clone ID: TFbOSC404459j.C1.o1.fg
atggcgatgctggggagctcgtcggcggtggtgctggagctgatgacgatggggtaccagtcggcggcgtacctcggcgagctgctccgggcggcgtccccggcgcaggcaggggatgagcagcaggagctcgccgcggagatcctccgctgctgcgaccgcgtcatcgccaagctgaaccggggaggagccactggtgctactaccggcaagaagcggaaggcggcggagtccgccgccgccgccgccgtgacctccccttctctccccgtcacgccgaccaaaagaagggcgcgtggcgcggaggcggtgagggaggtgaggagcggcacgacgacggacgggttcatctggaggaagtacgggcagaaggagatcaatggctgcaagcacccgaggctctactaccgctgcgcgttcaggggccagggctgcctcgccacgcggcgggtgcagcagtcgcagtcgcaggacgacccggccgcggcgttcgtgatcgcctactacggcgagcacacctgcggaggcgacgccgccgccgccgccgcgtgccgggacggggaactaatgccacctgccgtcatcaactccggcgcgtcgagcttcgccgccgcttggaacatggcctcgcgtgagccggcgtcgtcgctcgccgtcgagcggaggagctgcgacggcgacgctcccagcgagacgtcgcaggggtggtctccctccttctcgtcggaggtggagctggacgtggtgggattcgacctcgccggagccgactcgtcggcgtcgccggtgtgggagttcttgaatggcagcttcgactgggaattcgtcatcaactccctctga

SEQ ID NO: 13121 - DNA, 945 bp, Oryza sativa
  Clone ID: TFbOSC400284j.C1.o48.fg
atggccggagcggagtggtcgccgttcgacggggacgccgccttcgcggagtactcgtcggcggtgctggccgagctcggcgggtgggcggcgccgggcgaggaaggcggcgcggggatgatggtaccggcggcgctggatctgccggtggatgtggtgggggcggcggcgcgggaggaggaggaggaggaggaggaggcgccggcgagatcgggcgacggcgccgccgccgccgcgtcgtcgagctctagcggggagcccgccgcccccgacaagcgaccggccgccgccgaggcagcgccggcggcggcggcgacggcgacggcgacggcgaagaaggggcagaagagggcgaggcagccgcggttcgcgttcatgaccaagagcgagattgaccacctcgaggatggctacaggtggaggaagtatgggcaaaaggcggtcaagaacagcccattcccaaggagctactacaggtgcaccaacagcaagtgcactgtgaagaagcgcgtggagcggtcttccgacgacccttccgtcgtgatcaccacctacgagggccagcactgccaccacaccgcctccttccagcgcggcgtcggcggcgccgccgtcgcggcgcacatccacggcgcggcggccgtcgccctcgccgagcaaatgtcggcgttcgtctcgccgccgccacagccgcatatgctgtacggtttaccccggttgcacccgccgtcctccgagaccgccgtcagctgctcgatgccgacgacgacgtctttgcaggagctgaacaatagcgaggggctacaacgccctggctataataatagcccccaggcggcggtgaccatcgcgcagcggccgccgtcgccgtcggtgcctccggctgtttcgtttgacaaggggctacttgatgatattgtgcctcctggagttagacttggatga

SEQ ID NO: 13122 - DNA, 1617 bp, Oryza sativa
  Clone ID: TFbOSC414373j.C1.o24.fg
atggagcgccctgccccggaggcggcggctgcggcggcggagccccctggggcgaaggcggaggaggaggaggaggggccgaaggatgtgggggtgaagggtacggggaaggagaaggagacagagaaggttgaggccgagaaggagatggaggggaaggggaaggggaaggagtcgatggaggtggaggaggggaaggagaaggagggtaaggggaaggcgaaggagaaggagaaggagacgaaggtgaaggtgaaggaggagggtggggaagagaaggagaaggggaaggttgaggtggtggaggcaaagcggcggccggctggtgttggcgcggagacacccatcctagcggtgccgatggtggccgtgccatgcttcttggcgtctcctgcatttgcgggtcacttttcaatgagccatcaagcagctttggcgagtgtgacggctcaggcacaaatacaattgcagtcaccaaccacaccatattcagaagggctgcccagtccatttcctataacacctaaagctgtaatgcccctgcagcgatcaccttcaggaactgaagggagtgttcgcagatcagtgttagagaagtcagcctcatttcagtcaagaccacacaatcatgtgtctgtaaacatggttggtgatggcttcaactggaggaagtatggtcagaagcaagtgaaaagtagtgaaaattccaggagttactatagatgtaccaactctaattgcttggctaaaaagaaggtcgagcattgtcctgatggccgcgtggtggaaatcatttacagaggaacacataatcatgaaccgccacaaaagaccagatttgtgaaagagagagtggctcatattactgcttcctctggagatgatgaaaccttgggacttgtgaacaatgaaattatagaatccccgtcaccgggatgtaaattagagccgggtgctgtctctgaagcttctgaacagcagcttttttgctcaagtgattgtgaaggtgatgctggtaacaaatcagaagatgatcatcctagcacagagcctcagccaaaacgaagaataattgaaactagcacacctttgactccagttctcagaactgttagagagcaaaagattattgtacaggctggaaagacgagtgatgggtatagatggcgcaaatatggacagaaaattgttaagggaaatccaaaccctaggagctactaccgttgtactcatgatgggtgccctgtccgtaagcatgttgagaaggcaccagacgatgataacaatattgttgtgacctatgaaggtaagcacaaccatgatcaaccgtttagaaacaacagtgagtcgaaggatgggcctgttcctatgatcattccagcagagacaacatctgagcagcccagcacaatgacctcaacatcagaacagaaacagccgatcagtctgctgaaggatggcggcgatgagcccatgaagggcaagacttcagaaatcggtggtgagaaggcagtggagtctgcgcaaacccttatcagcattaaaactaatcccgatgacatgaagaataccctcttgaaagatacttccgcggtagttcctgtccaaaataattga

SEQ ID NO: 13123 - DNA, 551 bp, Oryza sativa
  Clone ID: TFbOSC18795j.C1.o1.fg
atggagagcatggagggcaatggaggagggcggctggtggtgacggagctgagccacatcaaggagctcgtgaggcagctggagggacacctgggtggctccggctcccccgacctctgcaagcacctggcctcgcagatcttctccgtcaccgagcgctccatcggcatgatcaggtccggccacttcgacggccaccgcaagcgctccgccgccgctgtcgccgccggtgacctcgactcggcgactcccagccccctcagcgacgtctccgacttgcctttcaaggccaccaagaagaggaagacgtcgacggagaagaagaggcatcagattagggtgagctcgacgggaggggtggagaatccaccggtagatgatggccatagctggagaaagtatgggcagaaagagattcttggagccaagcacccaaggggttactaccgttgcacccaccgccactcgcagggatgcatggcgacgaagcaggtgcagcgcaccgacgaggacgcgacggtgttcgacgtgatctaccacggcgagcacac

SEQ ID NO: 13124 - DNA, 783 bp, Oryza sativa
  Clone ID: TFbOSC401926j.C1.o17.fg
atgacctacttagagtttctccagaaaaatcaatgggggcaggaggccagcgtgggggcagacggcgtgcaggtggacgacgtgtgtgcgggcagcctcggagggcacgcgacggccggcgtgtggccaggcagatggcgggagatcggcggccgggcatgcgcatggactgccgccgaaggccttgagaacggtgggcaagaaagcagggcagatggttcatcccgaagaattatactagagcttggagatcgtgacgattcctatccctggaggaagtacgggcagaaggacattcttggcgccaggtttgcaaggagctactacagatgcgcccagatgttgggctgcacggcgaggaagcaggtgcagcaatccgacgacgacccgtcccggctggagatcacctacatcggcctgcacacctgcggcggcgaccggccgtcgtcgccggctcccaccaaccccgccgacggcccgcgttgcgacgcagcaaccagtagtcaccgtcttctgccgtcagctctgcagcagaagctggaggaacatgtcccggcggcgtcggacgacatgatgatggcctgcacgccgtcgtggctgttcataccctcgccggcgtgctcgcagtcggagcttctgtcggagggggaggttccggagctgcgggtggtgcggcaggagccgtatgatccggtggagctggtggaggagcacaagaagccgagcgacgccgacgaggactccctcgccctccacaactccgtcgtgccggattttatgtag

SEQ ID NO: 13125 - DNA, 1896 bp, Oryza sativa
  Clone ID: TFbOSC27462j.C1.o1.fg
atgtcgagtttcttgaacgaagaattcagctccggtcccttttcagacattttctgtgataatggcagtaacaaacatcaggatggacttgggaagagcaaagctttcatcgattcaagccgggaagaaactgctcagctagcaaaaaagtttgaatcaaacctttttggtgccaaccagaaatcaagctcaaatggctgtctgtcagagaggatggctgcaaggacaggttttggtgtcctgaaaattgatacatctcgtgtcggttattctacaccgattcggtctccggtgacgatcccgcccggtgtgagtccaagggaacttcttgagtcgccggtttttcttccgaacgccattgcacaaccttctcctaccactggcaaactgccatttttgatgcatagtaatgttaaaccatcgatccctaaaaaaactgaagatgaaacacgccatgatcgtgtattcttctttcaacccattttgggatctaagccaccaacttgtccagttgcagagaagggtttcagtgttaatcatcaaaaccagccttcagtgacggataatcaccaggagctcagtcttcagcctatctcaactgcatccaatgatttcacttcaccaactattgttaaacctaagacatctgattccatgttagacaatgatgatcacccttcccctgcgaatgatcaagaagagaatgcttcacacaaaaatgaagagtattcttcagacctgatcattacccctgctgaggatggatataactggaggaaatatggacagatgcgagttagaacagtggagcgttctcaagatggccaaataacagagatagtctacaaaggttctcacaatcaccctttgccgccttccaaccgccgaccaaatgttcctttctcacacttcaatgatctgagagatgatcactctgagaaatttggttccaagtctggtcaggccacagcaacttcatgggagaatgccgcaaatggacacctccaagatgtcggtagtgaagttctgacaaaactgtctgcttctcttacgacaacagaacatgctgaaaaatctgttatggacaaacaagaagctgtggatatctcatcgacgctctccaatgaagaggatgatagggtaacgcatcgtgccccgctttctctgggctttgatgcgaacgatgactatgttgaacacaagagaagaaagatggatgtttatgccgctactagcactagcaccaacgccatcgacataggagctgtggcgtcaagagctatccgggagcctcgcgttgttgttcagaccacaagtgaggttgacatccttgatgatggttaccgttggcgcaagtatgggcagaaagttgtcaaaggaaacccaaatccaaggagctactacaagtgcactcatccgggttgctcggtgcgcaagcatgtggagcgatcatcgcatgatctgaaatccgtcatcacgacgtatgaaggaaagcacaaccatgaagttccagctgccaggaacagtggccacccaagctcaggctcagccgctgcaccacaggctaccaatggtcttcttcaccggagacctgaaccggcacaaggtggtggtggtggtagccttgctcagtttggctatggctcagctggtcacagaccagcagagcagtttggtgcagcagcagctggtttctcctttggaatgctgcctcgtagcattgcaactccggcgccgtctccggcgatcgccgtgccggcgatgcaggggtacccagggcttgtgctgccgagaggtgagatgaaggtgaacttgctgccacagtctgggaatgctggtgcagcagctagccagcagctgatgggcaggttgccaaagcagcatcctcagatgtaa

SEQ ID NO: 13126 - DNA, 933 bp, Oryza sativa
  Clone ID: TFbOSC10036j.C1.o3.fg
atgaacacttttacacttttcagggatgaggtgcagaaagcttcagagaaggttcatcggcatcacgcgaacgacgacgaggccgggttattcctgtcacttgggcttagcctcggatcgtctcctgatgcgtgccagtgccacgccagcaagaaagacgaagcggacgccggcaacggcggcggcgacgggtacctcgccctcgcgctgcgttgcgcccccgccgccggcgagccaatggtgcatcccaagaggcagagggccaccaccaacagcagcagtagcagcagcatctgcggcgaatacgggggcggcgccgccgccgccgccgtgccggcgggccacgacgacgacgaccggtcttgcatgatcacggctgcgtcgacggcgaatcggcctggccgggtcgtactcagaacacgatgcagcgcacccacggtgaaggacggttgtcaatggcgcaagtacgggcagaagacggcgaagggcaacccgtggccgcggggctactaccggtgcaccggcgcgccggggtgccccgtgaagaagcaggtgcagcgctgcaaccacgacacctccgtcctcgtcaccacctacgatggcgtccacaaccaccccatcacgccctacgccgccgcgctccctccgtcgtcgtcgtcctcctcatcggcggcggtagccatgctcgcctcctcctcgtcgtcttcgacgtggtcggagcttcagcgcgcgatgccggcggcgcagtcgtcatggagccagagaaactaccctattcaggcagatgtcgtggcgaaggcgatctgggaccccaagttccaggcgacggtggcggccgccgtcgcgagctacgtccgtgaccgtgagcagagcgcgcgcgttgccggtgggaagggtgccggagagctcttcaacttggctcctccatgctga

SEQ ID NO: 13127 - DNA, 1161 bp, Oryza sativa
  Clone ID: TFbOSC30380j.C1.o1.fg
atggacggcgacgcatggtggtaccctggcggcggcggaggtggtggtagcaacaactgggatcttggcgctgtcgtgaggtttgggtgcggcgggggacgggtgagcccggcggcggcgttgctgggcgaggcgtgggagtacgacgacgacccgttctcgtcgttcctcgcgccgcccatgacggcgcagcaggcggcgctgcccgccgtgtgggaggagggagacgacggggacgcggcgtggatggcgccgctcccggggcttcagaccggtggtggctggggtgatcaggcccccatggtcgtcgacgagctctgcggggccctcgttgtggcccctcctccacctccgaagcaacaggaggtgcttcaggtccagcagcagccgccgccggcggacaacacgcagcccactacctaccagcagggatccggcggcgacggtgagagcactcgcgccggcggatcaaggtcggcgaggagaaagtatgcggcctccgctatttatatagtctccgtttgcttttctgattcttgcataatgtggattcgctcgctggctgatgaccgtggcgttcgccatgcatgcaggaagaagcagacgagaaaggaggtggtgcgcgtggcggcgagcgggccggcgccggacttgtgggcgtggcggaagtacgggcagaagccgatcaaggggtccccgtacccgcgcggctactaccggtgcagcagcaacaagaactgcgccgcccggaagcaggtggagcgctgccgcttcgacccctccttcctcctcctcacctacaccggcgcccactccggccacgacgtccccctccaccgcaactccctcgccggcaccacgcgccacaagccgccgccgccgccgccgctcccgtccgccgccgacaagtctccggccaccgcggctgaggcggcgacggcgagccagagccccggcctgtcgccgaccacgccgctgcgcgcctcgtccatggagctccacggcgaggacgacgccgaggccgagctgcaggtggaggaggacgacatggccatcgacgacgaagacgacgacgacgtcgccgacgagaccatcagcaccgtgccgtggggcacgcccatctccgacgcgatcatcgcggcgagctacgagtggagatga

SEQ ID NO: 13128 - DNA, 781 bp, Oryza sativa
  Clone ID: TFbOSC30380j.C1.o1.np
atggaaacgataaggactactgtgattgtatccatattggtttccctagttctacttggacaagcggacacctatgggtataaatacaaggccccctaggaggagaggggacacggaacaatagatcaatacacaagatcaatatacaagctaacatacgtcaagacaagacgccggatatcgacttcagagattagcatggctagtcccctacggtgtctacggatactgataggagagacatagcgctgtctttgatcttgccggatgcggattcgaggagtaaggctaccctgttgtcgactacgagtcagcacttcagaccgccaagtcgacaacagttagataggatctatctcttttacctaagtctcgcatgtatcctggtaccaacgatccccattctatgcaaataccggaatcgcgacatcaaatatcgacaaatactctgtctatctgaccgaccacatgccaccaattagacctgcccatagacggcgggcttctgcccgtacttccgccacgcccacaagtccggcgccggcccgctcgccgccacgcgcaccacctcctttctcgtgggccacaacgagggccccgcagagctcgtcgacgaccatgggggcctgatcaccccagccaccaccggtctgaagccccgggagcggcgccatccacgccgcgtccccgtcgtctccctcctcccacacggcgggcagcgccgcctgctgcgccgtcatgggcggcgcgaggaacgacgagaacgggtcgtcgtcgtact

SEQ ID NO: 13129 - DNA, 261 bp, Oryza sativa
  Clone ID: TFbOSC8596j.C1.o2.np
aacagtttgtcctacgatggctacagctggaggaagtatgggcagaagcaagtgaaagggagcgagttcccacggagctactacaagtgcactcacccaacatgccctgtcaagagaaaggtggagatgacaccagatggccggattgctgaaattgtatacaacggtgagcacaaccaccccaaacctcatcctccaagaaagccaacattatcaacaagttataatttacctgacatctgtgacgatggcattggcctg

SEQ ID NO: 13130 - DNA, 915 bp, Oryza sativa
  Clone ID: TFbOSC400222j.C1.o48.fg
atgtccggcggcggcgggcgggagcagatgaagggcggggaggacgtcgctgcggcggattgcccggggtcgccggtgtcaccgtcaccggcagctgctcagcggtcggcggctggggcggcggcgtcgcctagcgggaggtcgaggcggtcggcgcagaagcgggtggtgaccgtgccgctggccgacgtgaccgggccgcggccgaagggcgtcggggagggcaacacgccgaccgactcgtgggcgtggcggaagtacggccagaagcccatcaaaggctcaccctttccaagggcttactaccggtgcagcagctcgaaggggtgcccggcgaggaagcaggtggagaggagccggaacgacccggacacggtgatcgtcacctactccttcgagcacaaccactccgccacggtgcccagggcgcagaaccggcaggcggcgccgcagaagcccaaggcgcaggcctgcagtccgccggagccggtggtggaagtggaacccgaggaaacgcaccagtacggcgtcaccgccgggcctgccaccggtggcggcggcggcgcggcggccatcgaggtgcgcgacgagttccggtggctctacgacgtcgtgtccgtcccagccacgtcgacctcgccctccgacatcgacgcggccgacgagatgcagctgtacgatcagccgatgttctttggcggcgccgtcgtcggcacggccgcgctcctccccgacgagttcggcgacgtcggcgggttaggcggggaggggctgggcgaggaggaggcgttgttcgaggggctcggcgagctgccggagtgcgccatggtgttccggcggcgcgccggcgacgggctggagatgggaggaggggttaagatcgagcagccggcggagagcacggccatgacatga

SEQ ID NO: 13131 - DNA, 972 bp, Oryza sativa
  Clone ID: TFbOSC30411j.C1.o3.fg
atggatctgatgggtgggtacgggcgggtggacgagcaggtggccatccaggaggcggcggcggcggggctaagggggatggagcatcttattctgcagctgtcccagactgggacgagcgagaggtcgccggcgccggcgcaggagcagcagcaacaggtggactgcagggagatcacggacatgacggtgtccaagttcaagaaggtgatctccatgctgaaccgcaccggccacgcgcggttccggcggggcccggtggtggcgcagtcgtcgggcccggcggcgtccgagccggcgccggtgaggtcgtccccgtcggcggtgtcgaggcccatgacgctcgacttcaccaaggcggcgtccgggtacggcaaggacgccgggttcagcgtctccggcatctccgccgcgagctcgtccttcctctcgtcggtcaccggcgacggcagcgtgtccaacgggcgcggcggcgggtcatcctccctgatgcttcccccgccgccggcgaccagctgcggcaagccaccgctgtcctccgccgccgccgccatgtcagccggcgcaggccacaagcgcaagtgccacgaccacgcgcactccgagaacgtcgccggcggcaagtacggatccaccggcggccgctgccactgctccaagcgccggaagcatcgggtgaagaggacgatccgcgtgccggcgataagctcgaaggtggcggacatccccgccgacgacttctcgtggcggaagtacgggcagaagcccatcaagggctcccccttcccacgaggatactacaagtgtagcacgctgcgcggttgcccggcgaggaagcacgtggagcgcgacccgaccgacccgtccatgctcatcgtcacctacgagggcgagcaccgccactccccctccgccgccggccaggaccacccgccggcgccgcctccgccgctggcgctgccgctcgcctga

SEQ ID NO: 13132 - DNA, 1002 bp, Oryza sativa
  Clone ID: TFbOSC400188j.C1.o7.fg
atggcgtctcctgatggtggcgttggagacggcggcgcggagccacatgaagttatggacgacctgctcgagatgcgcgagcaagcggcgatgctccacagcatgctacatgggacatcgccgtcgagctgtgcggcggcggcgagcaccaggcagctgaatcagctgatagacggggtgatgagcaggctgcagtccagctcgctgtcggtgatgtcgcctggaggaggaggaggaagaagaggatcgggcgggaggaagaagaaaggcgccaaggccgtggccgggccgcacaggcggagcagctccggtagaagaagatcgaaaagtccttttgtcaggatggtcacgaccaaggagctggaggacggcaggcaatggcgaaagtacgggcagaaacatatacaggactccccaaataatccaaggagctactacaggtgcacgcataggccagaccaaggttgtatggccacaaagcaagtacagacctccgagtctaactcgtcggagttcgtcatcagctactacggtgagcacacctgcagcgacccttccaccatcccgttcgtcgtcgaggccgaagctcccgctgcagactacgcgaacctcatcagcttcggatccagcggcggcgcgagcacaagcagagtcgaccctcttcgtcagagccgccatcgtttgatggcagaagccgttgatccgacgccgtcctgcagcttcgccaactgccactctccggtactgtcctcggagtgcgccagcgaggcggcggcgctcagcagcagcctgccgctctccgccgtggtgggatcggcggtgacaacgccgtcgacgtcgatcgtgggttcagcgcctgcggattacgactggccgtcagggctcgccggaggtgacatggccggcagcttcccgtcctctcccagcagcctcgggttcatgactggctcctttgggaatcttcctggggatgacgacgacatgtttggcttcgatccttaa

SEQ ID NO: 13133 - DNA, 1140 bp, Oryza sativa
  Clone ID: TFbOSC401122j.C1.o38.fg
atgtcttctggaggaggaggaggaggaggaggagatcgccatggcccctaccaccagcacgggcacctcggccgcggcgaaggcgctgattacgtgtacagcagcagcgacatggagagcttcttcttcagccaacccgggggcgtcggcatcggcgggggtggtggtggcgtcgtcggcgccggcggtgccgacgagatcatgccgtactccagcatcacggactacctgcaggggttattggacccctccgggctagctcggcacctcgacgtggcgtgcccgtcgtctcaggacacggtggtcaagcaggagctgtcggtggatgtgacgagccacgacagccagggcaccggcggcgtcgccggagaaggcgtcgcgcaggccacgccgaactcgtcggcgtccttctcgtccagcgacggagaggcggagggcggcaaatcgtcacgccggtgcaagaagggtcaggcgaaggcggaggaggaggacgacaaggatgaggaggatggagagaactccaagaaaccgaacaagcccaagaagaaagctgagaagaggcagcggcagcctcgcgtggcgttcctcaccaagagcgaggttgatcacctcgaggacggctaccggtggcgcaagtacggccagaaggcagtcaagaacagcccatacccgaggagctactaccggtgcacgacgcccaagtgcggtgtgaagaagcgggtggagcggtcgtaccaggacccctccacggtgatcaccacgtacgaagggcagcacacgcaccacagcccggcgagcctccgcggcggcggcggcggcgtcggcatcgtcggagggcaccaccaccaccacctcttcatgcccggcgtgcatggcctgccgccgtcgcacctcatgccggcggggttccaccctgagctgatgggcctcatgcaccaccacccggccatggccgccgccgccgcaaaccctagcatgtacttcccgggcgtagctgcttctgctccgccgcctcctgctgtggctggcggcggtgcaatgccgcccaacgatcatcctcctcttcagcagcatcacttcactgactacgccctgctgcaagaccttttcccttccacaatgcccagcagcaacccatga

SEQ ID NO: 13134 - DNA, 1119 bp, Oryza sativa
  Clone ID: TFbOSC100778j.C1.o10.fg
atggcgcccaatccggtcgggcatgcgcctttgtgttgcagactggtgcagggcaactttgaaactttccctcaacaggacttggtacctttaacagcacaagaggttcattctaagtgcattacattcggtcgagcagagaacctgccttttatccctttggcgacttcagcgctggtctcccaacatactggttcttcttctgtaaatgtgacaccgttgcaagaaattctgacttcgccgtcgcaaataagcaatgtcaacactgaatctattggggtgttacaagggctcccagcttcatccatcgttctggatagacctactgatgatggatacaactggcgaaagtatggtcagaaggcagtgaagggtggggaatatccaaagagctactacaaatgcacccatctgaactgtttggtcaggaaaaatgtggagcactctgcagatggacgaatcgttcagataatttacagaggacaacacactcatgaacggccctcaaaaaggaggtttaaagattgtggtggtatatcagatgatttagacgatttcagtggcaccacgggcacttcagtcagatcacagcctgattacgatgattactgcagaaagcctatcattccaagtggcaccatggttgctcctttagtgaaaaagattgaagatggtgatgaccaattgtctggatcaagtgataaccaggatgagcatgatgatgaggtgaggacttctgatggagcttccggtgatgccagtgcaaatgaaaggaatgtgccagccccaggtcaaaagattatagtgagtacaaccagtgagatcgatcttttggatgatggttataggtggcgaaaatatggacagaaagtggtgaaaggaaatccttacccaaggagttattacaaatgcacctacctaggctgtgatgtaaagaagcaagttgagagatctgttgaggaaccaaatgctgtgataactacatacgaggggaagcatatccatgatgtgcctgctgcaaggaacaaaagccatgtcgtagccaatgcctctctattgcagaacacaaagtcgaatacctactgcacagagcaatcctacacaacgatcacttgctag

SEQ ID NO: 13135 - DNA, 559 bp, Oryza sativa
  Clone ID: TFbOSC15307j.C1.o1.fg
gagttactacaagtgcaccagctcccgatgcagcgccaagaagcacgtcgagaagtccaccgatgacccggagatgctcatcgtcacgtacgaggggtcgcaccatcacggcccgcagccgctcttcccgccgcacatcgcccagccaccgccgccgacgtcggtagtgggcttctccgccgcctccggcgctggcccgccgccgtcgtcgcccgcggcggcggcaaggaagaggaagaactatgtcagggcggccttctcgccgacgacgtccgaggacgacggcgacggcgccggccggctacggccagagtggccacaagacgatgggacgtcgtgtgacgtcgccgagttacgacgacgtggcgacgcggagcacgccgcgccgcgtcgtgtcgcgacggatcgctcgtgcgacgatggcggcggcggcggctcgacctcggcctcgtcgtccgtggcgcgcgctgacgccgctacggcgctgtcctctgactcgccgccgaccatatggtcgtgcctggactggccgtggtcccaggaaacactgtttctgtag

SEQ ID NO: 13136 - DNA, 505 bp, Oryza sativa
  Clone ID: TFbOSC5799j.C1.o1.gm
gaccatatctgatgggagatgtgctgcgagctcaggccaccgcgtcggcggaggaggtggccggcggcgtctggccctgcgagctcgacgaccacctcataggcgagctcctcggtgacgacggcctgttcgtcccggccgccgaacaccccaccctctactactcgttcggcgcggggtcatcagcagccgccgccgccgcgccgtgcaacgggggcggcagcgctgatcacgagcggcggccgcggccggcaccggcggtgagcagggatctgtgctcggtgtactcaggcccgacgatccgcgacatcgagaaggcgctgtcgtcgtcggcgtcgccccggccgccgtacccctccggccgccgctacagctctctgtatttggtggaagcggagagcaagtacacgagcaaggtgaggagctgcggcggcaagatgccggccgacgggtacaagtggaggaagtacgggcagaagtcgatcaagaacaacccacatcccag

SEQ ID NO: 13137 - DNA, 612 bp, Oryza sativa
  Clone ID: TFbOSC5800j.C1.o2.fg
atggaggaggatgatgggttggccttgatgacgggggcaaaccagagcttatggagttactacaagtgcaccagctcccgatgcagcgccaagaagcacgtcgagaagtccaccgatgacccggagatgctcatcgtcacgtacgaggggtcgcaccatcacggcccgcagccgctcttcccgccgcacatcgcccagccaccgccgccgacgtcggtagtgggcttctccgccgcctccggcgctggcccgccgccgtcgtcgcccgcggcggcggcaaggaagaggaagaactatgtcagggcggccttctcgccgacgacgtccgaggacgacggcgacggcgccggccggctacggccagagtggccacaagacgatgggacgtcgtgtgacgtcgccgagttacgacgacgtggcgacgcggagcacgccgcgccgcgtcgtgtcgcgacggatcgctcgtgcgacgatggcggcggcggcggctcgacctcggcctcgtcgtccgtggcgcgcgctgacgccgctacggcgctgtcctctgactcgccgccgaccatatggtcgtgcctggactggccgtggtcccaggaaacactgtttctgtag

SEQ ID NO: 13138 - DNA, 1719 bp, Oryza sativa
  Clone ID: TFbOSC401547j.C1.o14.gm
atggagaataatcagtcaggtcaagctcaggacggcatggccgatcaaagatttcgcagctggctaacagaacaacttaatatgcagcagcagaatgccggttgttcttccaacccagcaccagcagtaatgcagatgccagctctgccatctcacacagattatggtggcatatatcccaacccaactgaatatgatggctacaactggaggatgtgtgggcagaaattagttcagggtgggtgccatcagaaattctactatgaatgttctcaagcaaactgcggtgccgagaaatccgtgacgcgctccgcagatggacagatcaagaaaacagtatgggttatcaggccttcagttgcaatgcctaggaatgaggaggaagatgggctacaatctggttcgagtgacagcggggatgatgatgctagtgaagcaagagctgctgacatgttcctgcagctgcagctcaagataccaccgcgcataacacaattgacgttgatgttctgggtaacagctctcagcagcgtaagaattatcaccgaagtggtggaaaagttcaaagtgcagaatgtaaacattgtaaaaaatgcctcagtggaaaaacttcaggaggaacaagccatctgcgccgacatctcaagatatgtcctgcacaatttagaacgactagactgcagcaagaaggtgccaagcagtgcaaattttaggcagtttttggttgccatctgtcctgattataatatggtgccgcaggctgcttttgaagagaagttcctcagcttttttcataatgaaaagatgaagctaaaagagaaaatagaacttacacctggaggagttttcctgtcggtaacaaagcagtacgtcgagtttaaaaccttcgtctgtatcacagtacattttattgacaacgagtggaagatgaatagaaaaatcattagctacggctatggcggataccctgatggtgctgattactatgtggatcccaggttcaaactaaggtatcttgagcagtgcttcacacaagtttccagtagtggttgtgccaaattgttcgtccttgaagttcgtgcaaagatttatgagctctttcttcaatactcctgtaatgttgattggcaaactggtgagctacttaatcacaggagtaatgatctacagatggatagacacggtaatgattcattacatggaacagataagaatgacattgagcaaggatcaaatggagaattcagagaactaacttcgtacattgagggggaactttatcctcagaatgaccaatttgatatcctgaaatggtggaaggataatgcgtcaacgtatccaactcttgctaggcttgcacgcgacattttagcaatacctggaagtgcagtttctgctgaatatgcttttaacaaaactggtgaaagggcagcaggggttatcaggccttcagttgcaatgcctatgaatgaggaggaagatgagctacaatctggtttgggtgacagcgaggaagatgatgctaatgaagcaagagttgatggtgacgacatggtgcagctcaagatatcaccgctcaaactgcaactgaggttgatgttacgggtaacggctgtcagcaacgtaagaattattgccgaaggtttccttgcttgggaaggtatgtttcgggtttccattggtttctaccccgaattggacgtggaggaggacttgtag

SEQ ID NO: 13139 - DNA, 1509 bp, Oryza sativa
  Clone ID: TFbOSC101573j.C1.o8.fg
atggagatgatggtgcagaagcaacgacacgaggagggggaagaggagcgaggaggcttgtgcgcccgcgagatcaaggagctcgacttcttctccgccgccggtgccggtgccggccggagagacgacgacgacgtcctccgtgcggatgggatcagcagcagccacgccggatttatggtcagcactgcgctggacttgctgacagcggtcaacgacggtgatcatcatgaggagaagaaagggcagtcaaatattcaccaaagcaagcagatggatgcggcggcgacgacggtggagggggagctccggcaagccggcgaagagaaccggcggctgcggcggaggctggaggagctcaccagcagctatggcgccctctaccaccagctcgtccaggcgcagcagctgcacaccaagcatcagcagcaggctccgatcgccggcgtgcagttgctggacgcgctcgcggcggcgtctccggcgagccaccggcgacgagcggcggcggcggtggacggcgatagaacagctgactctgatggtggcgagggcgacgagaacgtgtcgccttctcttggtagcaagaggccggcggcggcagcgacgttaacgcggctgacgccggagagcggcagcggcggggagaataatggcggcggcgagcaggcgccggcggcggagatggcgccgtgccggaaggccagggtgtcggtgcgagcacgatccgaggctccaatgatcagtgatggatgccaatggaggaagtacgggcagaagatggccaagggtaacccttgccctagagcctactaccgatgcacaatggcttcgcaatgccccgtcagaaaacaggtgcaacgatgcgcgaaggacaagagcatcctcatcaccacctacgagggcacccacagccacccgctgccgccggccgccgccgccatggccaagaccacctccgccgccgccgccatgctcctctccggccccgccgtcagccgcgacgcgctgttcgccgcccaccaccacgtcgtcgcgccgccgcccttcttccaccacccctacgccgggtccaccatggccacgctctccgcctccgccccgttcccgaccatcacgctcgacctcacccagccgccgccgacgacgacgaccaccgccgccgccgccatgctccagctccaccgcccttatgccttctcctcattgccgttctcgatgtacggcgccggcggcggctcgcaccggccgcccgtcgtcctgcccccgccgtcgtcggtggtggagacgatgaccgccgcgatcaccagggaccccaacttcaccacggcggtggcggccgcgctctcctcgatcatggcgggaggcggcgcccaagctcgaacacctccacgcggcgggagtgacgccgccggagacatcaacggaggcggcggcgccgaccacgccactgccggagcacgcgccgcggcggcggcgacgcagccttgcggcacgtctcccacctga

SEQ ID NO: 13140 - DNA, 1953 bp, Oryza sativa
  Clone ID: TFbOSC400603j.C1.o12.fg
atgtcgagtttcttgaacgaagaattcagctccggtcccttttcagacattttctgtgataatggcagtaacaaacatcaggatggacttgggaagagcaaagctttcatcgattcaagccgggaagaaactgctcagctagcaaaaaagtttgaatcaaacctttttggtgccaaccagaaatcaagctcaaatggctgtctgtcagagaggatggctgcaaggacaggttttggtgtcctgaaaattgatacatctcgtgtcggttattctacaccgattcggtctccggtgacgatcccgcccggtgtgagtccaagggaacttcttgagtcgccggtttttcttccgaacgccattgcacaaccttctcctaccactggcaaactgccatttttgatgcatagtaatgttaaaccatcgatccctaaaaaaactgaagatgaaacacgccatgatcgtgtattcttctttcaacccattttgggatctaagccaccaacttgtccagttgcagagaagggtttcagtgttaatcatcaaaaccagccttcagtgacggataatcaccaggagctcagtcttcagtctagctcaactgcagccaaggatttcacttcagcaactattgttaaacctaagacatctgattccatgttagacaatgatgatcacccttcccctgcaaatgatcaagaagagaatgcaacaaacaaaaatgaagagtattcttcagacctgatcattacccctgctgaggatggatataactggaggaaatatggacagaagcaagttaagaacagtgagcatcccagaagctactacaaatgcactttcacgaattgcgctgtcaagaaggtggagcgttctcaagatggccaaataacagagatagtctacaaaggttctcacaatcaccctttgccgccttccaaccgccgaccaaatgttcctttctcacacttcaatgatctgagagatgatcactctgagaaatttggttccaagtctggtcaggccacagcaacttcatgggagaatgccgcaaatggacacctccaagatgtcggtagtgaagttctgacaaaactgtctgcttctcttacgacaacagaacatgctgaaaaatctgttatggacaaacaagaagctgtggatatctcatcgacgctctccaatgaagaggatgatagggtaacgcatcgtgccccgctttctctgggctttgatgcgaacgatgactatgttgaacacaagagaagaaagatggatgtttatgccgctactagcactagcaccaacgccatcgacataggagctgtggcgtcaagagctatccgggagcctcgcgttgttgttcagaccacaagtgaggttgacatccttgatgatggttaccgttggcgcaagtatgggcagaaagttgtcaaaggaaacccaaatccaaggagctactacaagtgcactcatccgggttgctcggtgcgcaagcatgtggagcgatcatcgcatgatctgaaatccgtcatcacgacgtatgaaggaaagcacaaccatgaagttccagctgccaggaacagtggccacccaagctcaggctcagccgctgcaccacaggctaccaatggtcttcttcaccggagacctgaaccggcacaaggtggtggtggtggtagccttgctcagtttggctatggctcagctggtcacagaccagcagagcagtttggtgcagcagcagctggtttctcctttggaatgctgcctcgtagcattgcaactccggcgccgtctccggcgatcgccgtgccggcgatgcaggggtacccagggcttgtgctgccgagaggtgagatgaaggtgaacttgctgccacagtctgggaatgctggtgcagcagctagccagcagctgatgggcaggttgccaaagcagcatcctcagatgtaa

SEQ ID NO: 13141 - DNA, 1077 bp, Oryza sativa
  Clone ID: TFbOSC464j.C1.o1.fg
atggcgctgattgccactggtgctaccgctactgctactgcggcgccggtggctagcccggctgcttcttccatggcgtccgagctgatggcgcaggggcgggagtccgccgccgtcctggaagccctgctccatggcgcgtcgctcccgccggcgcacggcggtgcccacgccctcgccgccgagatccttcgctgctgcgaccgcgcgctcgccgcgttgcgcgccggcggcgatgccgaatcgtcgtcagccgacacgaagcgcaagccggcaaccgcccagccgtcgacgcgccggaggagaaggtatatatatatgtatgtctcctcccgttcttgcgatggcgcgcgcgatcgagcagcgactcagcaagagatcttttgcagagcgacggcgagcggcggcggagcggcggcggcggcggagccggcgagggtggagaaggcgcggacgtcggaggacggattcctgtggaggaagtacgggcagaaggagatcaagaacagcaagcacccgaggctctactaccggtgcagctacaaggacgaccatggctgcacggcgacgaagcaggtccagcagtcggaggaagacccttccctctacgtcatcacctacttcggcgaccacacctgcagctgccagacggccgccgccgccgccatggacgacgacgacgacgatgaaaactcgcagcatttcgtcatcaacttcgggccggccaccgcgagccgcagcggttcgccgcctctgctctacgacgacggcgacgacggcgatgtctggagggagacggcggccaccccaccgtcgtcgaggcagtccaggtgctcgccggagggagacggggaggaatccggggtgaagatgagcaaggaagagccagtggactcgtgtccggggccgtcagcggtgagttcgccggccgacgtcgtttcttgttcgtctccggcaatggagcccgatctgctgggctgcttgaactgggatgatgactttggagacagctcgttcgtcgacgccgatgagttcatgaatttcgatgagattgatctgtttcaaatctactcctag

SEQ ID NO: 13142 - DNA, 1320 bp, Oryza sativa
  Clone ID: TFbOSC400284j.C1.o39.fg
atggccgatcggcgccgcagcgacggcggcggcggcatgcagcagcagccgttcacgtcgccggggcaggagagggtgttcgacggcggcggtgttcctgggcaggtggcggcgccgtatgggagtgattttgatcagagctcttacatggcgcttctcgccgccggcgccgtcggcgtcggcgtcggggtccagccgacggcggcgccgtgggctgtcgaagaggacgtcgccgcggcgcctcctgggattagcttggcacctcagttctccatggcgaactatgcgccgccgccgtcgtaccaacaccctgcaaccctcgtctccccgccgctcgccgccggcctccacccctacccgccgtatctccacggagtcgacgcgccaccgccgcaatggcctccacgaccggcgccgccgcccagcttcagcgtcctcgacctcgccgccgcggctgctccgcacgagcagcgccacagcatgcaacagctgctcctccgcgccgcggcgttcggcggcggcatgcacgcggcggcggcgccggcgccggcggccgccgccgccatcgagcagccggcgaaggacgggtacaattggcgcaagtacgggcagaagcagctcaaggacgccgagtcgccgcggagctactacaagtgcacccgcgacggctgccccgtgaagaagatcgtcgagcgctcgtccgacggctgcatcaaggagatcacctacaagggccggcacagccacccccgtcccgtcgagccccgccgcggcggcgccgccagcagcagcagctccgccatggccgccggtactgatcacaatgccggcgccgccgcggacgacgccgccgccgccgacgaggacgaccccagcgatgacgacgacacgttgttgcacgaggacgacgacgacggcgaggaagggcatgacaggggtgtagatggcgaggtggggcaaagggtggtgaggaagcccaagatcatattgcagactcgcagcgaggttgatctgctcgacgacggctaccggtggcgcaagtacggccagaaagttgtcaagggcaacccacgaccaaggagctactacaagtgcacggcggacggctgcaacgtgcggaagcagatcgagagggcgtcggccgatcccaagtgcgtcctgacgacgtacaccggccgccacaaccacgacccgccggggaggccgcccgccgccgctaaccttcagatgcctggcccggcggccatgaggttggccggcggtggcacggctcatcagcaaccgagcggcggcgctcaccagatgaaagaggagacatag

SEQ ID NO: 13143 - DNA, 2445 bp, Oryza sativa
  Clone ID: TFbOSC401547j.C1.o17.fg
atggctgatcaaggattccgccccttctcagccttgatgtccgcgccatctactgcgcagcagcatgtgggttcttcattcagcacagcagtagttcaggtggccgcagcacagcagtcacacacagatcatggtaacatttgcctagctgatgatgatggctactattggaggatgaccggacagagtacaactcagggtgagtcgtctccaacgatattatcccactatcaatgtgcccaagcaaactgtgtggtccagaaaacagtggcatacactgcagatgttgaaacattttacaggggcagacacaatcatctacgacagtcagatagactggagccaatgtctcaagttggtgtgctagttgaggcatcagatgcagcaggggctgcggctggaccttcggtgcctgagacagaaaatggagatgatcaatcgtctggttcaagtgataggaatgaagacgatgctggtgatgtagaaatggacgaggatgcagctgctggtgatcccaatgcaatgcaaaggagaaaacttaagtccaaggtgtggaaggaatttaaacttgtgtttaaggatggaaagctccatactgccatatgtaatcattgtaaactcaggctcgttgcagagactagaaatggaaccagccacctacgccgacatctgaagatctgtcctgaaaaggctggaaccagcagggtgcagaaaaagcgaaggagttcaacttcgcagtcacagcctgatttacctgtttcagagaacttggaaaatggtcaagaaaatccttcacagaacttggaaaatggtcaagaaaatcctcttgaagagtttatgagggctacggtcctgaaactttgtcccttccctgccatgtaccgtgcaagctttgcgtcatttctggcgggtagaaatccagctccgaatatggttccacaaactacagttgaggacaagtttattagtgtttacgagaaggaaaaattgaagctgaaggagaaaataatagctacacctggcggagttttcctgtcagtgaataagtggtactctgggagttatgaaacaggaattgtttgtttaacagtgcactttattgatgaagagtggaagattaatagaaaaacaataagatgttgtctttcagaatcggatggtttagacttgaacttgttcccacactggcaatccgaaattgctaattatgaggatgatgacaagatggtgttgaagaaggtagttcgagattggtgtcttgagccgaagcttttaggagtgacattggagggatcagtggataagaaagccacaatatccttggaggatgaccttacgactggaaagaactaccttgttgccaaatgcaagctattaactatcccttgtatggtagatggcctcgatgatcttatgcaatacaccgttgggagagaggtgcgatcgatgtggtctcgttacatgacaaacactcccgagcgtaagctgaaatgtcaggaagttgtatcacagctgcagctagaccgtccctcttttggatcaaaataccggtacttaacattctattggtgtgaggctgctttgcagttcatcaaatcatttccactttcaaatggcagtgaacgtccatcattagatgatctggaagcaacagagaacttttgcaagattgcaagggcaatctatcatgcaacgaaagctttttatgaaccttataacttgacttttaattcatattttcatgtgatatggagcttaagagcaaccctacaagaattacctagaataaaaaacatagagagggttattaaagtgaagaatatgcaggagaaatttgataaccattggaagaagtggtacttgtggttgtcgatagctgtggttctagaccccagatataagctcgctttcattgaacttcgtttcagagaagcttttagtcaagatgctggaacctatatctctgaggtgcgtgcaaagttttatgagctctatattcagtactctcatgttaatgagcaaagtaatgagatactgaatcaaggcaacaatggttcaggtacacaaattagtgctccattacataaacagagaacgaattacaccatagcacaagctgcacttgaggaattcaaagagctttttgagtatcttggaggggggctctgtcctcaaaacgattcttttgatattctgaaatggtggaaggataattcagcagcgtacccatctcttgctaaaatggcacgggatattctagcaatacctggatgtgcagtttccgctgaatctgcattcaatgacgatagtgatcatcgggcagagctatttaacggaaaattgggccctgagacaactgaagcacttatctgtgctcaaagttggattattaaatcatctggaacagctgatgcagataatggaaataatatcacattatcttaa

SEQ ID NO: 13144 - DNA, 1659 bp, Oryza sativa
  Clone ID: TFbOSC401772j.C1.o3.fg
atggaggaggagctctgcggcaacaactgggacctcgacgccgtcgtccgcctcggctgctgccgacggaggatctctccggcggcggtggcgcagcaggtggatccgttcgcgtcgttcttgcagcagggggtggcgatggaggttgcggcggagaaggaggtcggggtggaggctgcgtggagcttcccggagctgacggtcagggacggcggcggcggcgggctcggccgcgacgccgacgagctcctcaaggcgttctgcgccgcctttccttcttcttcctcgtcgaagtcgtcgcctctgccgacgcctcctcctcctcctccgacgcagccgcagccagagcagcagaaaccggtgacggtgcaggagaatctaccggctccgacgacggctccggcgagggcgtcgcagccggcggcggcgaggcaggtgccagctggcggcgtgcctagatccaagaggaggaagaaccagcagaagaaggtggtgcggcacgtgccggcggacggcgtgtcggccgacgtgtgggcgtggcggaagtacggacagaagcccatcaagggctcaccctacccaagggggtactaccggtgcagtagctcgaaggggtgcccggcgaggaagcaggtggagaggagccgctccgaccccaacaccttcatcctcacctacaccggcgagcacaaccactcggcgcccacccaccgcaactcgctcgccggcaccacccgcaacaagctcccttcctcctccgccgcctccgccgcctccgcgcagccccagccgccgccgccgtcggtggtggtggtcggcgccgggggtggtggagccgaggcggcggggctctccccgaccacaccgctgcggacgccgtccatggaggaggacgaggaggaggaggaggaggaagagctgctcgtggaggacatggagatggccggcgaggacgagctcctcttcctcaacggcggcgacgacaacgccgcattggatggcacccccatcaggggtgctttgctcttcttggctcttcctttctctgttcaacaacctaacctttctgcatgtagctcccttgggatgtttgattgggatctcaattctcatcactcatcactcttcttgcatccccaactattgatggttggagacgacggcggcattgcggatgtagccagtctcggtgatggcaacgcgattacgaccgaagatgatggcggcggcgcggatccagtccgcggcgatggcggtggcggcggctgctcggatgcggtccgtggcggcggcagcggctcgaatgtggcccgcggcggtggcggctgcgctgttgctgcctctggcggcaatgactgcactgttgtggcctacgtcggcgtcggtggtgttagtctgggtggctggatctgggatccttcttcctctttgtctccgggcagtggcatccacgctgggtgtgccattcgggttgagctcaagctcctcagattcaatggagaactccgtggtgaagtttggttgagtccgtttctgtggaggcgaccgaaggggattaacggttcgtcaagcggtctgcatgctaaaggagacccaaggttgcaattgtcatggctttgccgctgctccctgtcgattcgcgccttctgcactgtctag

SEQ ID NO: 13145 - DNA, 1545 bp, Oryza sativa
  Clone ID: TFbOSC16302j.C1.o3.fg
atgccgccttgcgtgtggggatcgcacacacctctctctcttctctcccccccggccgcttgggcgggcgagaggatggagggcgaccaggccggcggcgacctcaccgacatcgtccgcgccgggggaggggccatgccggggagcgtcgtcgtcgacctcccgtcgacggccgccgagtggcagctcccggctgagccgatgctcttcccgccgccgccgtcgttgtcgtcgacgacggacggctgtggcgccgggggagcggcaggcgccgacatcttcggcggtggcggcggcgaccttttctccggcctcgtggacccgttcagcagcgactactcgtccggcgcggacttcttggacgccatgccggacgcgatggcgaaggtcggcttcgacacagctgtcggcggcggctgcggcggcggcggcggaggtggtggtgggagcggtggacacctgttagacatgagcaggaagcctctcttgcccagagggatgccgatggcggccgtcggtgggctggcggcgccgagggtgatgccatcgccgctgtcgccgcgagccatacggccgtacccgccgatctccgcaggcgacatgatgaagctcggcatcacggcagggcaggcggccgggtgcgccatcgacgccgccgtcgccggcatgcagatgtcgtcgccgcgctccggcgggatcaagcgcaggaagaaccaggcgaggaaggtggtgtgcatcccggcgccgacggcggcgggaggaagacccagtggtgaggtggtgccttctgatctctgggcttggaggaagtacggccagaagcctatcaagggctcaccctacccaagaggctattatagatgcagcagttcaaaaggttgctctgcaaggaagcaagtagagcgcagccgtactgacccaaacatgctcgtcatcacctacacctcggagcacaaccacccatggccgacccagcgcaacgccctcgccggctcaacccggtctcaccacagcaagaacagcggcggcggcggcggctcgggttccaagggctctcagaacgacaagtcacagcagcagccaagcgttaaagaagagcagaaggatcaggcgacgacggcgacgacgacgaccaccagcacaatcactaccacgaatagtgcttctcctgtggttgtgaaggaggaagaggcggcactggcaggatcgtcggaagcattggagttggagagagtcatggacactactgcagctggagtagtagaccacagtgagctcatggatcatgttttcagtgagagctacaagccgatgataccggagactggccagccggatgatttcttcgcagacctcgccgagttggagtcagatcccatgagcttaatcttctcgaaggagtacatggaagccaagccaagtggtggcgatcatgcccaggagaaggcaatggccaaggaattggatccattcgacatgctagactggtctactactactaactcttcggcagggagctcatttgagcaagggaagagaggctaa

SEQ ID NO: 13146 - DNA, 771 bp, Oryza sativa
  Clone ID: TFbOSC409885j.C1.o4.np
atacacagtaatcctacggatattaccttataatattgaatttaaacgcaggaagaaccaggctaggaaggtggtgtgcatcccagcgcctgcagcagcaggagggaggaccagtggggaggttgttccttccgatctctgggcttggaggaagtatggccagaagcctatcaaaggctctccttacccaagagggtactacagatgcagcagctcgaaaggatgctcggcgcgcaagcaggtggagcgcagccggaccgaccccaacatgctcgtcatcacctacacgtcggagcacaaccacccgtggccgacgcagcgcaacgcgctcgccggctccacgcggtctcatcacgccaagaacagcagcagcaacagcagcagcagcggcgcctcctcagcctccaagaacaactcctcccacagcggttaccaccaccaccaccaccagaagccactcgtcaaggcggaacccaacgatcaatccgccgccgccacgaccgccgccacggtgccggtgaaagaggaggccgccatggagcacagtgatctcatgcagcagatgttcagccagagctaccggccgatgataccggaggcagcggccggcggccaccacgacgacttcttcgccgacctcgccgagttggagtcagatcccatgagcctgatcttctccaaggatggtggtcatgctggcaatgagcggaggagggcgactagagagacatttgtcgatttttcacgtcggccgatgctggccaaggtacc

SEQ ID NO: 13147 - DNA, 1875 bp, Oryza sativa
  Clone ID: TFbOSC18107j.C1.o12.fg
atgatcaagggagactcaaagcagctagcttctatgtacatgaaagaggagatgatcaagggagagaggcagcttggaacccatgaagatcggttaaaagacgaggttataaaagatggcgataaaatttcagatggcaattttttcaagtccttgcaaaacatatcaagcacaaaggaggaggtgtgttcaccaggcccaatagaaagatcatgtatggactcatcattgctaaacatgaaagctcaaaataagggtcaggatgataagcttgaatcaacaagggcagaaatgggtgaagtacgagaagagaacgagaggctcaagacgttgctgtcgcgcatctcacacgactatagatctcttcagacgcacttctatgacgttcttcagcaaggccgagctaagaagctcccagactctccggccaccgacatcgaggagcctgaactcgtctctctgagacttggaacgagcacgagcaaatgcaagaaggaagacaagagtaccaccagtagcgaagtcaaagggagtactgaagattttctgaagatcaaaggaggtctctctcttggattatcagactgcagagttgatgctaataacagtgagaaggtacagccggatgtgatgacgttgagccctgaaggcagctttgaggatgctagggatgacaccgcagagaccacagagcaatggccaccaagcaaaatgctgaagaatttgaggagcgtcggcgcggaagccgaggatgacatagctcctcagccacaggtcaagaaggctagggtttcagtgagagcgagatgtgatgcgccaacgatgaatgatggatgccagtggagaaagtatgggcagaagattgcgaaggggaacccgtgcccgcgcgcctactaccggtgcaccgtggcagcaggatgcccagtcaggaagcaggtgcagcgatgcgcggatgacatgtccatcctcatcaccacctacgagggcacgcacaaccacccgctctccgtctccgccaccgccatggcctccaccacctccgccgccgcctccatgctcatctccggctcctcctccacctctctcgccgcctaccccgccgccgccgcgtcgccggccctcgcattcgacgcctcctccaagccgcccctcatcggcggccgcccgttcttcctcccgaccgccgccgccgccgccatcacctccaccccttcctaccccaccatcaccctcgacctcacctcgccggccgccgccgccacctcctcccacgccgccttctccctcagtaacaggttctcgcacaccaggtacccttccaccggcttcaccttctccggctccggcccgagtagcgcgccatggccggggtacttgagctacggggcgtcgctatccgctcacccgtacaacgccggcggcggcaagagctcgtcgtcgttcgaggctgcgctgagcagcatcaacggaagcaggcagcagggcggcggcggcggtggcggctcggcgccgccgctctaccagatgcagcagaaggcggcggcggcggcgccgccgccgccgagcgtgatcaccgacacgatcgcgaaggcgatcacggcggacccgagcttccacacggcgctggcggccgccatcacgtcgtacgtcggcaagaagggctcgccgccggcgtcgggaggagaggacagcaaggtcgggctcaagtggggggagcacctcgggctcgggctgacccactcgtcgctgtcgacggcggcggcggcggcggcgagctcgagcagccagatgttcttgcagccatcgctggggttatcaggatcgacgacgagtgcgtcgacgtctcctgtggcgaacagagagcaagcacattaa

SEQ ID NO: 13148 - DNA, 900 bp, Oryza sativa
  Clone ID: TFbOSC400831j.C1.o20.fg
atgtgtgacagcttgttttggcagtcgtcggccgaccaaggggacctctcggatgtggtgagggccagccttcagctgcagacggcgcctcgccatcaggctgcatcgccgccgtatgtgcacctcttaggaggaggaggaggaggaggagaagaccagcttgcagcagtgagccaacacgctgagcagcagcagcagagcatggtggatgcttctgcagcttgcgaccttctccatgcgctgttgccaccaccaccagtagtgcaggtgcagcagcagggagcgtcgaggacgaggacgacgattgaggaggacaccaccggcgacggcgaggagttatttgctggtgctcattatgtcgttccgcccatcaagcgaaggaagagccagacgaagaaggtggtgtgcatcccggcgggggcgagtggcggcggcggcggcgaggtggtgccgtcggacctgtgggcgtggaggaagtacgggcagaagcccatcaaggggtcgccctaccctcgcgggtactaccgctgcagcagctccaaaggttgctccgcccggaagcaggtggagcgcagccgcgccgaccccacaatgctcgtcgtcacctacacctccgaccacaaccatccatggccaacccaccgcaacgccctcgccggctccacccgcccctcctcctccaactcatccaacatacgcctccaagacagtactccagttcatcatcagagtcagactggccacgatcgtcttacgaccactcacctcaagcaggaggacgtgatcatctccccctccctgctgcagcccgaccaccatcagctgtgtaccattattgacaccaagcaccacctcttgtttcatcaagactatcctcacagcttcggcttgttcgactag

SEQ ID NO: 13149 - DNA, 429 bp, Oryza sativa
  Clone ID: TFbOSC900386j.C1.o14.fg
atgaataacagaggggccggaggagggagaggccaaggcgacgacgaggagccgacgccgacgccgccacctgcgccgccgccggagacagcgccatccactgtcggcggcggcggcgacggcgttcagctagtgatgcccgaggacgggtacgagtggaagaagtacgggcagaagttcatcaaaaacatccagaaaaacaggagctacttccggtgccgggaccagcggtgcggcgccaagaagaaggtggagtggcacccgcacgaccccggcctcaacctccgcgtcgtctacgacggcgcccaccaccacggctccccctcgtcggccgccggcgaaggaggcacctccgctgccgccgccgccaaccagtacgacctcagcacgcagtacttcggcggcgccggcgggccccgctcgcagtga

SEQ ID NO: 13150 - DNA, 798 bp, Oryza sativa
  Clone ID: TFbOSC401716j.C1.o1.fg
atggttaagaggagcgacaacatggacagctccagtgaatgttctagaggagcccataaaaggcttctgcaggacagtaggagctatgaccaggagaacgctatgaaaaaggtttgcatcggaacaagaactgagtacacatatgcaccatatcatgatgggtaccagtggagaaaatacgggcaaaagatgatccggggcaactccttcccaaggtgctactacaggtgcacgtaccatcaggaccatggctgtccagcgagcaagcacgtggagcagcacaactcggaggacccgcctttgttccgggtgatctacaccaacgagcacacatgcggcaccagcaattctgcctccgattacatggcttcctccatgcaaatccagcagattgccgacgcctccttgagaaaggcacaggcggcggaaagactgagaaaggcagaggtggaaacacctcgcctgatgcattctcctcctcctcgctgcagcggcggctacaacatggcgatgaaagaagagaaggatgtgatcgtctcctcgctgctcaccgtcatcagaggctgtcacattgcagaatcagctggtaataatagcgccgctgctttgccggtaaacaggccgccgccggcggtggccagaagcgaccattacagctgcagctatgcgatttcgcctgaattgttgccggcgtccgacgacctgacactggacttcatgctggattcagtactggatccccactgggtcgagcctctggatttggcttggctcaaagaatccacgcacactggttga

SEQ ID NO: 13151 - DNA, 5649 bp, Oryza sativa
  Clone ID: TFbOSC401547j.C1.o22.fg
atggacaatcaatcaggacaaccgcagtacggcatggctgatcatggatttcgccccttctcagcctcaatctcggcaccatctactgcacagcagcacacgggttcttcgtcgaacactgcagtaattcaggtggcaaccccgccatcccacacagattatggtaacatatacctagctgatgatggctaccattggaggatgtgtgggcagaacacaattcagggtgagccatgccagacgatattctactatcagtgtgcccaagcaaactgcatggtccagaaatcggtcgcacgctctgcagacggacagaccactcaaacattttctatgggcgttcataaccacccacagagggggccaacgccgccaagaagtccctccgtcgacccacccgtgccgttctcttcgccgtcatgctcaccccctcggtcgccggttgaatgcgcggagcgtggctgcgcctctctgtcgccggcgcgcgcaaaccccccttcggagttcgagcatgttccacctggcgacccggagctccgggtaaacagggagatctgtgtgctgccgttctcggccgcgatgagggagcgggaggcgcagctccggcgggcggtggtggcggtggtggttggggcggctcgtacgccgtccgcggcccaggtgcacgacgagctatgctcggagttctctctgtctcctcacagcttctcggtacgccgtttcttcccggaggatttcctcgtcaccttccagtccgacgaaatcttcgaccgtgttgcgcgccgccgctccatccctctcggtcagttccgtctcttggtcgcgccttggtcgaggcagctgcatgcgagggaggggtcgatgcttttccgggtgcggctgcacctggaagggatccccggtcacgcctgggatgaggcgacggcggctgcggtgctcggttcttcctgccgtatcatctcctgtgatccggtcagttcctcagccagtgacatggcggtcttcaagctctacgcttggacctccgaccctgcctccatcccgaaggagaaatggctgcgcattgtcgaggatggtggcccggttgtcacgccgcagggcacctgtgagcgctacctcgactacgtcgttctcatccacctcaccgccatggaggatcacatctcgccgccggagccgtacctccctttcgcgccgtccagcggtgattctggtcgccctagctcggacgactcggacgacggccctcctcgacggcacttcttccacacctccagaggtcgacgagatggttccccccctccgccgcagtccggtcagggctcgacaggcggcggtggaggcggtgggcacagggccgctccggtggcggtgatgccggcggagctctgttccggccgccttcttcggcgggctggggcgctggcgccggagaagcctgtccgggctgtggccggcgcggaggcggccatggcgcggcggaggaggcctcgtggtcggcgacgtcagcaaaaggtgctaaagtggaaaagcaagttcttaaagcttagccctgttcgcagctgttgcaggtggcagccacgaaaaggacaagacacttctgagccggtctcggtcgcaaaggcaaaggagagttctgctctgcaatctctgtctcttggctctgtggtggggcaggaggacagggagtttgtcttgcctgtgagcgcggcgtctgaggctgattcggcagtctcttcgaggagagacatggttgggctggccgcctctccagttgggttggaggcccaacaaggcggtttggtgctatcgactgtcgctgggccggctgttgagtcagctgggtctcggcctgaggtgcagtcacagcccagcccgctagcaatggaggaggcccaccatgacgcttctaccttccttcaagggtctgtttcagcccatgcagacccgttcctctcggtcgttctggcagcaaagccaagcatggcaatggcagcgccgggtgagtcagcgcttccgccgcctgactccgtgccagacgcgacacttggagtggaggctgtctctgctcctttggtgtgcccagaacagcatttggcggcgtcctcgacgccgttatcacaagttttctctccggtctcggctttgccgactgcctccgcggtggtcgtggtagctgagatcggggggccgtttcccgatgaggtcgttccggtagatgagatggccgcatctccgcctgctccatctactgccgtgttcgcagcggctgtggaggaggcttcagctccgccgccgacgcttatcaccttctccaggagagccaagaaagcaatccccccggcactgcttcccccaccagcccctcagcagccgccgcaaccagcgccgctgcagacgccgcgtcgcagtgtgcgtcaagcgcttcaagcgacacatggcgccccaactttctcccgctgccagtcagtgttagctaagaagatgggggagaaggatactgctgtcccagctgcgcctgcaccgactgtgtgtactatccagcagtacaacgagctgttcgagaaggagctgtctcaggatcagatgttggcgctggccgacctctttggcatttgtctaccgcctcctgccagcgcggtggaaaccaaactggatgctatctctgtaccgttggctacccaatttttgggtcctaatctagcagacttttgctacctgccctccattcagacaagaggaggagtgctcttggcctgggatcgtagcgtcgtttcttgcgattcgcattctctaggagaattctctcttacagcgcgcctctccttttgcgatgggaattcctgttggatcacggtcgtttacggtccacaacccgacgcagataaggtgcgttttctgcaggaacttagggacaccagaagcacccgtgatgggccgtggatggtcgttggtgacttcaacttgatttaccaagatcaggataaaaataactccaacctgaacagaaggatgatgggtcgcttccggcgggcgatcaatgacctggcgctgaacgaacttcatctgaatggacgctctttcacgtggtcgaatggatgggaacatccaacgttggagcgtcttgacagaatattcgttacttcggacctagaagagctcttcccacaaagtttcctcaaagctcttccttcggtgatttctgatcactgtccactgcttctttcaacactgccttctcttccggcgaaagggaggttccggtttgagaatttttggtgcaaattggaaggttttgaggaggtcgttcaggaagcatggtcggctgattgtagactgcaggatccaatctcccggttggacttcaaactaagatcaactggtcgtgctctccaaagctggagtgacaaaaaggtcggcaatgtaaagttgcaattggagatggcccgggaactcatcggcaggttcgatcgcatggaagaatcgcggggcctttccggccaagagcgttttcttcatcgcgaattgaaaaggaagtaccttgctcttgcctcccttgagcgaactatggcaagacaaaggtcgcgcatctcttggctgcgagaaggcgatgccaacacgagattttttcatcaacatgctgcctggcgacgacgaagaaattttgtgcagcaactggagcatggctcacaggtcgctactgcccctgacgagaaggctgcccttgcccacgacttctttgatggagttcttgggtcagtgagccaccgtaatttctcggtgaaccttgatttcttcgaatctaggggacagcatatcgaggagttggaagatcctttcaccgaggatgaggtgcggaaggcaattgctgacagcccgcatgacaaggcaccaggcccggacggcttctcgggcatgttctaccaccgctgctgggtcatcatcaaggacgacccttgcctggtacacagcttcgtgaagcttttcaccaaaattctctcacgccgtctctcgccgaagctagactctttggtcgccaaaaatcagagcgcttttatcaagaaacgctgcattcaagacaactttatgttagtgcggcaatcagcaaaatacctgcatgatcgtagaactccttcggtgctgttgaagctggacatcgctcaggcctttgactccatctcatggcagttcattctcgaagtgctggagcataaaggtttcggcgttcgatggcgctcgtggattgctatgctctttcggacagccagctcgcgagtgctcatcaatggtgagccgggttgcccgatcatacaccgaagaggggttcggcagggagatcccatctccccgatgatgttcatcctagcaatggatgtgttgagttctatccttgcgaaggccgagaatgttggcttgctgcgaccgttggggattcctttccgggtctcgctctatgcggacgacgtggtcgcatttatccgtccggcagtagaggagatccatgtggcgacggaggttctctccatcttcggtgaagcatctggccttcgaacaaactttgctaagtgttcggctcttccaatccaatgtaatgaggcagatcttcagatcctccatgacgagttaccatgccaggtcgcatccttcccatgcacatatttggggctccctctttccatctttcgtctgaaaaaagaggatttgcaaccgctgattgacaaaatcggtcgtcgactgcctttctggatgtctcatttgatgactcctatcggtcggaccaccatggtgaaagcagtactaagttctatccccatctacttgctcatggcaatcaatgcgcctaagtgggtaattaaaggaattgataagatccgtcgtggttttctttgggccgggaaggccacggcaaacggcggtgtctgtcgcgttgcgtgggctcgagtttgctcgcccatagagtatggtggtctaggcatcctcgatcttgagagattgggtatagccttgaggtcgcgatggctctggcaacaaagaacctcgtcggataagccgtggcaaggacttaacatcccagtttcacagaaggaacgcaaccttgtctcgatttctttggtttgctcagtgggcgatgggaagctggtacggttctgggaggattgttggctgcagggctcttcaattcggtcgctggcgcccgcagtctacgcagctgttcccgctcggttccggaacagacgaacggtagctgaggctttgcaagacaggaggtggattcgagacatctgtgcggcactggggattcaggcaatcctggaatatctcaagctttgggacattctgcgatcgattcagctaggtgaggaaccggacacgatctcttggcgttgggaaagctcggggtcctactccgctcgctcggcgtatcgtcttctcttcgcgggaagaaccagccttgagcacaagccaatttggaagtctctagcgcccccgcgctgtcggtactttctgtggctggtcgcactgaatcgttgttggacagcagatcgtcttcggagtcgaggactgtcacacccggctcgctgccctctttgtgatcaatgcgatgagacgattgatcacttattggttgcttgctcggagtctcgctag

SEQ ID NO: 13152 - DNA, 213 bp, Oryza sativa
  Clone ID: TFbOSC4096j.C1.o6.np
atggacgccgccgccgaccggacgtgggctgcgagatgccgggtccgtgaactgcatcgtctgcagctggtgacgcgaggccattgtcctcgcgtgcagactgcagagactattttcaggcacacaaggattgggaagaggcaagcaaaactatggataagggttagtgataccatggagattatatatggtggagatggaggtcctacttca

SEQ ID NO: 13153 - DNA, 678 bp, Oryza sativa
  Clone ID: TFbOSC900242j.C1.o3.fg
atggaaaatcacaaggatcacacctgcaaaattgcaaccactactttagtaatagtgccattgctattatctcttcaccagctatatctcttcttcctccacctgctgccatatgcttgtgtagtcagtgttgcagaaatgacaaagatgagcagcatgaaagctgatggcagtgtccccaagagaaggaggcaggatgttcagaaggttgtggtgtctttgaaagatcataaggttgagcaagggccacctgctgacagttggtcctggaggaaatatgggcagaaaccaatcaaaggatctcctcatccaagaggctactacaagtgcagcagttacaggggatgcccagccaggaagcaagtagacaagtgcaggaatgatgcatctctgctcatcatcacctacacctcagatcacaaccatgacaactatgctgctactactacaaattcagtccaagaacaggcacataatcctgacacaagtgatcctctcagcaatggcatgtcccttgctgaggtagtaacagttgcatcctccaagctgtccggtgaagaggagagctgtgacttctttgatgagcttgaggagctcccagtgtctgcatctcccttgccaagcttatctttcatggtccaagagtgcagcttctctgatgcaagaacactgttgtag

SEQ ID NO: 13154 - DNA, 950 bp, Oryza sativa
  Clone ID: TFbOSC418164j.C1.o6.np
ttctccaaccacggcctcctccaggacctggcccgggacggcgacgcctccttcgtgggcgccgccaccaccgcgccgggcctcccgctggtttgcgggccctaccgcgtccccttcctcctcaacctccccggcgccggacaccgcgtctccggcgagctctacgcgtattcacgtccagtgtcagtacttattaacataacaaaaatctacaagcggaaaactatttgatataataagaacatgctagcaataacaacagcttgcatagagagaactgacttttccaaagttcaaagtttctgatcatacaggctttcacttggctgcaacataaaggcaaaggtcagtccttaatgttcacatcatatagatagaagagaggaggtatattaaatattaactgtgggaaggaaccaaacacatgcatacatagcgctaatgatccacagtgttacctttgtggtgagctttttaacaccaagccctccagtcttgccatatactacaggaagaatgaggtgaagaaagtggtgtgcatcccggcgccgccagcgacgagtagccgtggaggtggaggagaggtgatcccgtctgatctatgggcatggaggaagtacggccagaaacccatcaaaggctctccttatccacggggttactacagatgcagcagctcaaagggatgtatggcgaggaagcaggtggagcgcagccgcagcgaccccaacatgctggtgatcacctacgcggcggagcacaaccacccatggccgatgcaacgtaatgtgctcgccggatatgcccgttctcatcacagtactcatgctactgcctccagcagccgccacaagcaacagcagcagcagcagaccaaccagctgcagcctgcactgatcacaagctcatggtcttcttcctcctccccattcaatctctacgccgacgtc

SEQ ID NO: 13155 - DNA, 431 bp, Oryza sativa
  Clone ID: TFbOSC418197j.C1.o1.np
gcatccttagcttcagtaagctcatcaatggatcataattttctgcatatatactacaggaagaatgaggtgaagaaagtggtgtgcatcccggcgccgccagcgacgagtagccgtggaggtggaggagaggtgatcccgtctgatctatgggcatggaggaagtacggccagaaacccatcaaaggctctccttatccacggggttactacagatgcagcagctcaaagggatgtatggcgaggaagcaggtggagcgcagccgcagcgaccccaacatgctggtgatcacctacgcggcggagcacaaccacccatggccgatgcaacgtaatgtgctcgccggatatgcccgttctcatcacagtactcatgctactgcctccagcagccgccacaagcaacagcagcagcagcagaccaaccagct

SEQ ID NO: 13156 - DNA, 1692 bp, Oryza sativa
  Clone ID: TFbOSC900002j.C1.o20.gm
atgagggaattgaaggaggtcgacgacgacgcggctcgaggaggacacggacgcgacgcgacagaaactagaaagagcgagcacgccactatggatatgatggaggaggaggctgccaacgccgccactgctcaagctgctgctgctggcgacctcgccgacgtcgtggcccgtgccaatgcacgcgcattcctcgtctccacccctcaccatcacccctcacctctgcatcctcttcctcctcctcccatgcctcaggcgcctcaccaatactatcccgccccccagatcaccatcccttaccaccaccaccaccacggagagcttcggcgccctaccaccatcgcttacaccgacgcacctgtgccgttcgagacggcggggccgccatccacggtcgtcgactcataccaccacctcacacccggcgacgccggctacgggatgccgcggccgcttgctctccagatctcccagcacgccctctgtggcggcggcgacgtggtgatgggcggcggaggcgcaggcgctgccgatgatggagaagaagccatcaggatctcgccactgacgccgtctgctcatcatcaaatgatgaaaaggaagaatgaggtgaagaaagtggtgtgcatcccggcgccgccagcgacgagtagccgtggaggtggaggagaggtgatcccgtctgatctatgggcatggaggaagtacggccagaaacccatcaaaggctctccttatccacggggttactacagatgcagcagctcaaagggatgtatggcgaggaagcaggtggagcgcagccgcagcgaccccaacatgctggtgatcacctacgcggcggagcacaaccacccatggccgatgcaacgtaatgtgctcgccggatatgcccgttctcatcacagtactcatgctactgcctccagcagccgccacaagcaacagcagcagcagcagaccaaccagctgcagcctgcactgatcacaagctcatcgtcttcttcctcctccccattcaatctctacgccgacgtcgtgctcggtggccaacaggccaacatgatgatgacgacggagggcgccggcgctggacttggcatccaaccttcagcagctgatgaggtctttgcagagctggaggagttggagcctgataatcctactatgatcaatgcaaacatgcaggtgtactccaccaccagcaggccaggggcgtccgtcgatactcgcacagggtgcacgaatatcgggacgcaactagatggttacaaggggacatggctcaagatgttcaaagcttcacggctcgcggtggaacgcgcgcacggggaggggctgaccggggtcggctcgacccggccgagctggcgcctacgtggcgcctacgtggctgccacgcgggctggcgggaggaagacgaaggcgccggccgcgaatggaccgcgggcggcggcggtttctccgggacgccttgcgacgatgaggggcgacggggcgtacaccgggatgacgagggagaataagagcgagcgagccaacggcttggattcgccggagggagtccgtcggcggcggattgcggcggcggcgcccggcggagggaaaagggggaaacggcgacgaggtcacgaggggccaattcccggcggcgagagcatctacgcggctacgggaatccgatgctag

SEQ ID NO: 13157 - DNA, 1878 bp, Oryza sativa
  Clone ID: TFbOSC413566j.C1.o5.fg
atggagtcctacgtgggtgtcaaggggaagaatgtcgtcgggggcggcgacgtcggcagggagatgccggtggcgccaccgtcgtcgtcgtcggcggcggtagggatggtggagttcccggcggcggcggcggggctggggtacgccgggatgacggcgaaggaggccgggggtggttaccaggagaggagggtggtggtcggcgagatggacttcttcaagacggcggagaagcgtggggagaggaaggagccgccgccggcgacggcgacggcggcggcgagtggacacgccggtgcctcgccggatgacctcagcctcaacaaggacgacctcaccatcaatatgggattgctcgtcggccggaggaggaacagcggcagcgaggaatccatcgtcgacgatggcggcgtctcctccaacgacgaggagcaccgcgaggccaaagctgcgctggcagtaaccaaagctgagattgggcggctgagtgaggagaacaagaggctcaagaacatgctgagcaacgtgaccacgaaatacaactctctccagatgcagttcgtcacactgatgcagcagaggagatcagtcctagccgctccgatccaccagcaagagctgcttgatccggagaagaaggagcaagaggggagccagcagcagcagcagcagctgatcccgaggcagttcatcagcctcggctccgcgtcgctgcagcccgacgtcgaggcgccgcactccgtcgtcgtcgtcggcggcgatgtctgcgcgccgtcgtcgagcaaccccgacgcggcggtgccggcgatgatgccgttgccgcatttcgaccaccacaaccaccaccaccccatccatggtggaagggagagggggagcagcccggcggaggccgaccaccaccgccaccatcagcaagagcagccgccgccgccgccgcagcagcagcagcagttgccgccgagctggcttcccgccgacaaggtgcccaggttcctccccggcaaggggcccgagcccgtcccggaggccgccaccatgcgcaaggcccgcgtctccgttcgagctcgctccgatgcacccatgatcagcgatgggtgccaatggaggaagtacgggcagaagatggcgaagggaaacccttgcccgcgcgcgtactaccggtgcaccatggccgccggctgcccggtgcggaagcaggtccagaggtgcgcggaggacaggacggtgctgataacgacgtacgaggggaaccacaaccacccgctgccgccggcggcgatggcgatggcgtcgaccacggcggcggcggcgtccatgctgctgtcgggctccatgccgagcgcggacggcagcctcatggccgggtccaacttcctggcgcgcgccgtgctgccgtgctcgtccaccgtcgccaccatctcggcgtcggcgccgttcccgacggtcacgctcgacctcacgcagacggcgccgccgccgccgccggcgtcgtcgacgcagccgcagccgccgcgcccggagcccgcgcagctccaggcggcgctcgccgaggccgcgcggccggtggcgctgccccagctgttcgggcagaagctctacgaccagtccaagctctccgccgtgcaggccgtggccggcaccaagggctccgacggcggcgcgctcgccgacacggtgaacgccgcgacggccgcgatcgcgtcggacccaaacttcaccgccgtgctcgccgccgcgctgacgtcgtacataggcagtagaagcggcagcggcggcgccggcgccggcgggagcagcggcacggtgcagccgctgatgagcggcggcggcgatagctgtagtagagacgacaagataggagagcaaaacagctaa

SEQ ID NO: 13158 - DNA, 1008 bp, Oryza sativa
  Clone ID: TFbOSC419984j.C1.o2.fg
atggcagttactgaatcagcttgtttgagttatgagcaagaagcggtggcagtgagggaggtggcgcaggtgtacgagctgatcaagacgcagcagcctctcctcctcgtacaccagcagccgcagcagctagcgcacggcctcctcaaccacgccctgcgagccctcaacgtcgccctctccgtcatgaaccaaccacatgcttcttcttctgctgctgctgctgccgttccggtgatgagcttgatcaaagcagaggcggcgactccagcgaacagtagttcccctgcagcagatgttgcagctgacaaccatgtcgttggaaagccaagaagatcatcatcggccgccaaaagaagaaggattaatggtgaggagtacaagtcgtcgtcatggtctcaattcacgcccgtgcctcatgaggatggctttcagtggagaaaatatggagagaagaagatccagggcactcacttcacaaggagctacttcaggtgtacgtatagagatgatagaggttgccaggccaccaagcaaatccaacaaaaggataagaacgacccacccatgttccaagtgacatacagcaacgaacacacctgcaccaccactaggcttattaacaacatcaataatcccgcagcattgcacaacttgacagccaatccaaatggtcaccatgattcagatgatgatgataccatcttcaccaagatgatcaagcaagaagaacaagctgcttggctgcctcctcctcctcctgctgatctagcaaccatttctaacaatttcgatgaaacgccaggattacatgtgtgccaagaggtgcctccttcttcttccaattcatctgtcatatctcactacgctgatgaattcgaccatcatcagatgttggagacgacggtgatggaggaagcattagggctaggagcagatctagatgatccttatttctacgatccaaaccttctcctcatctatgagagcctcatgaactgctactag

SEQ ID NO: 13159 - DNA, 798 bp, Oryza sativa
  Clone ID: TFbOSC400524j.C1.o2.fg
atgtcgtcggcgccggagacgttctcgctggaccacctctcgcagcatcagcagcagcagccgccgccgctcgccgagcaggagcagctctgctacgtgcactgcaacttctgcgacaccatcctcgcggtgggcgtgccgtgtagcagcctgttcaagacggtcaccgtgcggtgcggccactgcgccaacctgctctccgtcaacctccgcggcctcctgctcccggccgccgcctccaccgccaaccagctccccttcggccaggctctcctctcccccacctcaccgcacggcctccttgatgaggtgccgtcattccaagcgccggcgagcctaatgaccgaacaggcgagtcccaacgtgagcagcatcacgagcagcaacagcagctgtgctaacaacgcgccggcgacgtcgatggcgtcggcggccaacaaggctacccagcgagagccgcagcagccgaagaacgcgccgtcagccaacaggacttcagagaagcggcagagggttccctcggcatacaaccgattcatcaaagatgagatacaacgcatcaaggcaagcaatccggacatcacccacagggaggctttcagcgctgctgccaagaactgggcccatttcccacacatccattttggcctgatgccggaccagggcctgaagaagaccggcatacaaagccaggacggagctggggaatgcatgctcttcaaggacggtctctacgctgcagccgccgccgctgcagcagccacagcagcatctagcatgggtgtcactccattctaa

SEQ ID NO: 13160 - DNA, 822 bp, Oryza sativa
  Clone ID: TFbOSC400297j.C1.o6.fg
atgtcgtcgtcgtcctcgtcgtcggcgtcgtcggcggcggcggccgcgtttcggccggctgttgtgcagcgggagcagcaggtggtggaggagaaattccccgcggcggcggcggcgatgcgggagatggtcctcccgccggtggcggcggcggcggcggactccgagcaggagcagctctgctacgtgcactgccactactgcgacaccgtgctcgtcgtcagtgatctcagatcaaaccacgcacacttcctttccatttgtgttcatcttgctctcgactctcgagcttttcttgttcatccatggcggcgtgtgttgcaggatgagatatcgacggcgaactccccgacgcagctgctgctggagcagcacggcctcggcggcctcatggcgagcgcggcaagctgcaggaacaacaactccccggcggcggcggcggctccgccgccgccaacgtcgcaggggaaagcggcggcgaaagagccgtcgccccggacgaacaccgccgtcatcaacagacctccggagaagaggcagcgtgtgccatcggcgtacaaccgcttcatcaaggacgaaatccaacgcatcaaggctggcaatcccgacatctcgcacagggaggccttcagcgcggctgccaagaactgggcacactttccgcacatccactttggactgatgccggatcaccaggggctcaagaagaccagcctgcttcctcaggatcatcagagaaaggatgggctactaaaggaagggctttatgcagcggcagctgctgctgcggcggcggccaacatgggtgttgcaccgtactaa

SEQ ID NO: 13161 - DNA, 771 bp, Oryza sativa
  Clone ID: TFbOSC401780j.C1.o15.fg
atgtcgtcctcgtcctcgtcgtcggctgtcttcccactggaccacctcgcggcgccgtcccccaccgagcagctctgctacgtgcactgcaactgctgcgacaccatcctcgccgtcggcgtgccgtgcagcagcctgttcaagacggtgacggtgcggtgcggccactgcgccaacctgctctccgtcaacctccgcggcctcctgctccctgcgccggcgccggcgccggccaaccagctccacttcggcccttccttgctctcccccacctccccccatggcctcttggacgaggtggcgttccagacgccgagcctactgatggagcaggccgcgagcgccagcctgagcagcatcacgggccgcagcagcagcagctgcgccagcaacgcgccggcaatgcaaatgcctccggcgaagcctgtgcagcaagagcctgagctgccaaagaacgccccggcgtccgcgaacaggcctccggagaagcgtcagagagtcccatctgcgtacaaccggttcatcaaggatgagatccagcggatcaaggccggcaacccggacatcagccaccgggaggcgttcagtgcagccgcaaagaattgggcccatttccctcacatccattttggcctcatgccggatcaggggttcaagaagaccttcaagcctcaggatggttctgaagacattcttctcaaggatagcctgtatgctgcggcagccgccgccgccgctgcagccgcaaacatgggcgtcactccgttctag

SEQ ID NO: 13162 - DNA, 235 bp, Oryza sativa
  Clone ID: TFbOSC29392j.C1.o1.fg
ggaggaaatacagcgtatcaaagctgccaagccagatatccctcacagggaggccttcagcatggctgccaagaactgggcgaagtgcgacccccgctgctcatcgacggtttccacctccaacagcaaccccgagcccagagtagtagctgctcccattcctcatcaggagagggccaacgagcaggtggtcgagagcttcgacatcttcaagcagatggagcgcagcggctag

SEQ ID NO: 13163 - DNA, 585 bp, Oryza sativa
  Clone ID: TFbOSC400152j.C1.o13.fg
atggatctcgtgtcgccgtccgagcacctgtgctacgtgcgctgcacctactgcaacaccgtgctcgcggttggagtcccatgcaagaggctgatggacaccgtgaccgtgaaatgtggccactgcaacaacctctccttcctcagcccgcggccgccgatggtgcagccgctctccccaactgatcaccccttgggcccgtttcagggaccttgcactgactgcaggaggaaccagccgctgccgctggtctcgccgacatcaaatgagggtagcccaagagcacccttcgttgtgaagcccccagagaagaaacaccgcctcccatctgcttacaaccgcttcatgagggaggaaatacagcgtatcaaagctgccaagccagatatccctcacagggaggccttcagcatggctgccaagaactgggcgaagtgcgacccccgctgctcatcgacggtttccacctccaacagcaaccccgagcccagagtagtagctgctcccattcctcatcaggagagggccaacgagcaggtggtcgagagcttcgacatcttcaagcagatggagcgcagcggctag

SEQ ID NO: 13164 - DNA, 477 bp, Oryza sativa
  Clone ID: TFbOSC423581j.C1.o2.fg
atggctcaagcttctccaggcaaagagctagctaagctctcaaaagggagacacacttgggaaaaggtgaatgtgccaaacaattgttcctacaacattgtgactgttagatgtgggcattgcacaatggtgctctccatggatcttgctccttttcaccaagcacgcactgttcaagatcaccaggtacagaacagaggatttcaagcccctgagaaaagacagcgtgtcccatctgcatacaacagattcatcaattcaactattagggatgaatatacttatatattcaaaggcaggagaaaacctcaattaagaatggggttagtggaggagatacagaggattaaaaccagcaatcctgagattagccacagggaggcattcagtgctgctgcaaagaactgggctcatcttccccggctccattttggcctcagcgtcgccgacggcggcggcggcggcggcagcaactaa

SEQ ID NO: 13165 - DNA, 1014 bp, Oryza sativa
  Clone ID: TFbOSC400415j.C1.o6.fg
atgcgggtgcagtgcgacgtctgcgccgccgagccggccgcggtgctctgctgcgccgacgaggccgcgctctgctccgcctgcgaccgccgcgtccaccgcgccaaccgcctcgccagcaagcaccgccgcctcccgctcgtccacccgtcctcctcctcctccggcgacggtggcgccgccgccgcgccgctgtgcgacgtgtgcagggagaagaggggcctcgtgttctgcgtcgaggaccgcgccatcctgtgcgccgactgcgacgagcccatccactccgccaacgacctcaccgccaagcacacccgcttcctcctcgtcggcgccaagctctcccccgccgcgctcgccgaacagccgctcccgtcctccgactgcagctccgacgacgacgccgccgccgccgccaccgaggaggagtaccactcctccgccgcatccaccggcgccgcagtgagcgcgcctcttgacgcctccagcaacggcgccggtggcggaggaggagtaggagggagcagcatctccgactacctcaccaccatctgccccggctggcgcgtcgaggacctcctccccgacgacgacgccttcgccgccgccgccgcggtgagtactaccaacccatcgctccgccgtgttcttgctacgtctccatcgatgaagccgagactaacctacgattccttggagcagcaggcggggaaagagaaggacgagcgcgtgccgttcctcgacgccgacctgttcgacgtggtcgccggccggccggagaagaagggcggcgcgtgggcgccgcacgtgccgcacctgccggcgtggtgcctcgacgaggtgccggtcgtcgtcgccgcgtcggcggcgccagcggcgacacctgtaaaggcgaagcagggacacgtgcgggacagccactggagcgacagcgacgcgttcgccgtgccggagttctcgccgccgccgccgccggccaagagggcgcggcccagctcgcagttctggtgcttctga

SEQ ID NO: 13166 - DNA, 753 bp, Oryza sativa
  Clone ID: TFbOSC101266j.C1.o1.fg
atgaaggtgcagtgcgacgtgtgcgcggccgaggccgcctcggtcttctgctgcgccgacgaggccgcgctgtgcgacgcgtgcgaccgccgcgtccacagcgcgaacaagctcgccgggaagcaccgccgattctccctcctccaaccgttggcgtcgtcgtcgtccgcccagaagccaccgctctgcgacatctgtcaggagaagagggggttcttgttctgcaaggaggacagggcgatcctgtgccgggagtgcgacgtcacggtgcacaccacgagcgagctgacgaggcggcacggccggttcctcctcaccggcgtgcgcctctcgtcggcgccgatggactcccccgcgccgtcggaggaagaggaggaggaagcaggggaggactacagctgcagccccagcagcgtcgccggcaccgccgcggggagcgcgagcgacgggagcagcatctccgagtacctcaccaagacgctgcccggttggcacgtcgaggacttcctcgtcgacgaggccaccgccgcctcctcctcctcagacgggctatttcagggtgggctgctggctcagatcggtggggtgccggacggttacgcggcgtgggccggccgggagcagctgcacagtggcgtcgctgtcgccgccgacgagcgggccagccgcgagcggtgggtgccgcagatgaacgcggagtggggcgccggcagcaagcgacccagggcgtcgcctccctgcttgtactggtga

SEQ ID NO: 13167 - DNA, 1155 bp, Oryza sativa
  Clone ID: TFbOSC28112j.C1.o11.fg
atgctgaagttggagccggagttccccggcctgccgcagcggtgcgactcgtgccggtcggcgccgtgcgcgttctattgcctcgccgattcggcggcgctctgtgccacgtgcgacgctgacgtgcactccgtcaacccgctggcacgccgccaccgccgcgtaccaatgggcgtggtggctgcccccggcgccgggggagccttcgtcgtccgccctgcaggcggtgtcaactcctcctggccaatccgagagggcaggaggtgcgactacgacgatgacgacgccgacgccgctggggaggaagacgaagaggcgacgtcgtggcttctgttcgacccgctcaaggactcctcggatcaggggctgccgccgttcggcgacgcgctggtggccgacttcctcaacctcggcgggggcgccggggagaaggaggacgcgtcgtcgagcaaggactgcagcagcagccacgggaagagcagcgagggcagccacgagttcgccgtgcccggcgagcccgtaccggagcgccagggcttcggggcggtgagtatggacattaccgactacgacgcctccaatttcaggcgcgggtacagctttggcgcatcgctcggccacagcccgccagcgacgacgaagctcgtggcgcgcgcatcggtcgacgggcggagcactggcggcttggttgacgggcggagcaccggcgactcgcggggcggcggatccggcggaggcgactcgcggggcggcggatccggcggcgacgactcacggggcggtggatccggcggaggcgactcgcggggcggcagatccaacggcggcgactcgcgggggggcgtcgcccagcggcggcgactcgcggggcggcgcggtgcggcgagtccggcgacggtgacaaggagaaggggcgactcgtggggcggcgtcgcccgacgaatccaacggcggcgactagctttgcgaggcggcaggtctgattcgcaccggtggatggcagctcggcgacgaggtgcagtggctgggctctacggcagtgacccacctcctcgtcgaccttgggcctccctgtcgccggcgatggaggatgggcacgccggtgattttgattttttttttcaaaatctggattccaattttcttcttttttaa

SEQ ID NO: 13168 - DNA, 1098 bp, Oryza sativa
  Clone ID: TFbOSC900353j.C1.o17.fg
atgctgaagttggagccggagttccccggcctgccgcagcggtgcgactcgtgccggtcggcgccgtgcgcgttctattgcctcgccgattcggcggcgctctgtgccacgtgcgacgctgacgtgcactccgtcaacccgctggcacgccgccaccgccgcgtaccaatgggcgtggtggctgcccccggcgccgggggagccttcgtcgtccgccctgcaggcggtgtcaactcctcctggccaatccgagagggcaggaggtgcgactacgacgatgacgacgccgacgccgctggggaggaagacgaagaggcgacgtcgtggcttctgttcgacccgctcaaggactcctcggatcaggggctgccgccgttcggcgacgcgctggtggccgacttcctcaacctcggcgggggcgccggggagaaggaggacgcgtcgtcgagcaaggactgcagcagcagccacgggaagagcagcgagggcagccacgagttcgccgtgcccggcgagcccgtaccggagcgccagggcttcggggcggtgagtatggacattaccgactacgacgcctccaatttcaggcgcgggtacagctttggcgcatcgctcggccacagcccgccagcgacgacgaagctcgtggcgcgcgcatcggtcgacgggcggagcactggcggcttggttgacgggcggagcaccggcgactcgcggggcggcggatccggcggaggcgactcgcggggcggcggatccggcggcgacgactcacggggcggtggatccggcggaggcgactcgcggggcggcagatccaacggcggcgactcgcgggggggcgtcgcccagcggcggcgactcgcggggcggcgcggtgcggcgagtccggcgacggtgacaaggagaaggggcgactcgtggggcggcgtcgcccgacgaatccaacggcggcgactagctttgcgaggcggcagtaagtggatgattatggatgcttacactggaaatttgaaggactgggtgcttgccgtggtatatctgactggatgtagatgttgccaatatgaccggaggtccacacttgattgcccatga

SEQ ID NO: 13169 - DNA, 1383 bp, Oryza sativa
  Clone ID: TFbOSC401426j.C1.o7.fg
atggatacttttttcccccttatatgctttacagagaacatgcgcttacagtatcctggtaggatcccactgaattcaactgttgaacaaaaagccaggaaggtggctgttcttgtggcactcagtgctagtggaagtgctccagtactgtacaggaccatggatgctctttgtgatttctgcagggagcaaaggtcaatggtctattgccgatcagatgcagcatccttgtgcttgtcgtgtgatcgtaatgtgcattcagccaatgccctttcccgacgccatacaagaacccttctttgtgatcgttgtgttggacagcctgcagcagtccgttgtcttgaagagaacacctcactttgccaaaactgtgactggaatggacatggggcagcatcctcagctgctgggcataaaaggcagaccataaactgttactcggggtgcccatcgtcggcagagctctcgagaatctggtcctttagtatggatatcccaactgtagctgcggagccaaactgtgaggaaggaataaacatgatgagcattaatgacaatgacgtcaataaccattgtggtgctccagaagatggccgcttgttggatatagctagcacagcactcatgagtgatttacctacaggagacaagttcaaacctttaataggttcttcttcaggagatgggatgaatcttctgccacttaattcagatcagccagctgagccagtttcaacgacgcctaaggcaccctgtgtcacagacaaagatatgttcaatgatgggagcgtatatggagacttctgtgtggatgatgctgacctaacatttgagaattatgaagaattattcggtacctctcacgttcaaacagaacaactctttgatgatgctggaattgacagttattttgaaatgaaggatgtgccagcagatgaatctaatgagcagcccaaacctgtgcagccagaatgtagcaatgtcgcatctgttgattctgggatgtcaaacccagctgcaagggctgattccagccattgtattcctggtaggcaggctatatccaacatatccctttccttctctggtttgactggtgaaagcagtgctggatattttcaagattgtggggtatcgtcaatgatccttatgggtgagccaccctggcatcctcctggtcctgaaagttcatctgctggaggcagcagagataatgctcttacacggtacaaggagaagaagaagagaagaaaatttgacaagaagataaggtatgcttctcgtaaggctagggcagatgtgagaaaaagggtcaaaggacggtttgtaaaggctggcgaagcatatgactacgatccgctgagccaaacaagaagctactaa

SEQ ID NO: 13170 - DNA, 1347 bp, Oryza sativa
  Clone ID: TFbOSC401365j.C1.o4.fg
atgagcagcacggcgaaggcggcggccgccggggcggtgggtgccaagtcggcgcgggcgtgcgacggctgcctgcgccggcgggcgaggtggtactgcgcggcggacgacgcgttcctgtgccaggggtgcgacacgtcggtgcactccgcgaacccgctcgcgcggcgccacgagcggctgcggctgcggccgtcgtcgccgccgccgctggtgccgccgtcggggtcggggcggcgcgacgaggccgtccccgcggcgtggttcaagcgcaaggcgcggaccccgcggtcgcacgccgccaagagcgccgccgccttcgggcagctgctgtcgaggcggctcgtcgtcgttcccgaggcggcggctggtagtggaggggactcgccggaggagcggaaggacgagggggagatcgtggaggagcaggagcagctgctgtaccgcgtccccatctttgacccggccctctcggagttctgctcgccgcctcccctcgaggacgcggcggccgccgtgtcctgctgcaatgaggacggcgccgtcgagaacccgacgaagccgtccatgacgacgacgacggctacaacgccaccgctccagttcttccccgacggccaagccaatttcgggccgaccgacgccgagctgagggagttcgccgccgacatggaggccctcctcgggcgtggcctggacgacggcaacgacgaggactccttctgcatggagacgctggggctcatcgagccggtggacgacgacgccgggcgggtcaaggtggaggccgacggcgacgccgggatgaccctagcgtggtgccacgagctggacacggagacatcgtccggcgagatgctggacatcgacttcgactgcggctcacctcaggcggcgacgacacccgacgagaaggtcgggagcagcgggcccgccgccgccgacgacgacgcgcagctccagcagagcaacctcgccctcagcctcaactacgaggccatcatcgagagctgggggacctcgccgtggaccgacggcgagcggccgcacgtcaagctcgacgactcctggccccgcgattactcgggggtgtggatggcggcggcaggggtgttcgggcacggcggcgaggagcaggcgctgacgccgaggctggggatggacggcggcagggaggcgcgggtgtcgaggtacagggagaagcggcggacgcggctcttctccaagaagatccggtacgaggtgcgcaagctcaacgccgagaagcggccgcggatgaagggccgcttcgtcaagcgcgccgccgccgccgccaccgccgccgtcgccacggcgtgcgtcgcgtag

SEQ ID NO: 13171 - DNA, 1359 bp, Oryza sativa
  Clone ID: TFbOSC401751j.C1.o9.fg
atgagctgcagctcggagaaggcggccggggccgtgggcggcaaggcggcgcgcgcgtgcgacagctgcctgcggcggcgggcgcggtggtactgcgcggcggatgacgccttcctgtgccaggggtgcgacacgtcggtgcactcggccaacccgctcgccaggcggcacgagcgcctgcgcctgcgcgtctcgtcgcccccgccgctgacggcgcgggcgtcggtggaggaggaggcggcggcggcggtggggacgacgacgacgacgacgtcgaagagagagggcggcgtcacgccggcatggtcgaagcgcaaggcgcgcacccggcgcccgcaggtcaagagcgtcgggcagctgctctcgaggcggctcgtcgtgccggagatggcggtggagtcgtcggacgaacggaaggccgacgaagacggagctcacgaggagctcgaggggcagttgctgtaccgcgttccggtctttgacccctccctcgccgagttctgctcgccgcccccgatcgatgacgcggcggccgcatcctcatcgtgcttcaaggaggacgccgccgacggcgccgtggaagacgcaaagtatccggcagctgcggcgtcgtcgcccgtgcagcagctcccggatagctttgtcaacttcgaaccgacggacgccgagctgagggagttcgccgccgacatggaagccctactcggacaaggcctggacgacagcaacgagctgcaggactcgttctacatggagaccctagggctaataacgccgccggtagaagaatccggccgggtgaagatggagctcgacggcggtgttgcctccaacagcagggtatctctcccatcatgccgcgctcatccgaagccggaggacgtcgaatccgccgacgtgctggacatcgatttcaactgcacctcgccggacgaacagaagtcgtcggcgagcaacggcgccgcagccgattcgcagttcttccacaggagcctggatctcaggctcaactacgaggcgatcatcgagagctggggcaactcgccgtggaccgacggccggccgccgcacggccagctcgacgacttctggcccaacgaccaccattactcggggttgtgggctgcgggagggggcgggcatggcgcggaggtggggatgatgacggtgaggccgcggatggacggcccggggcgggaggcgcgggtgacgaggtacagggagaagcggcgtacgcggctgttctccaagaagatacggtacgaggtgcggaagctgaacgccgagaaacggccgcggatgaagggccggttcgtcaagcgcccctccgccgccgccgccccgtgcgccgtcacctag

SEQ ID NO: 13172 - DNA, 1074 bp, Oryza sativa
  Clone ID: TFbOSC401367j.C1.o31.fg
atgaaggtgctgtgctccgcgtgcgaggcggcggaggcgcgggtgctctgctgcgccgacgacgccgccctctgcgcgcgctgcgacctccacgtccacgccgccaaccgcctcgccggcaagcaccaccgcctccccctcctctcctcctcctcttcttcctcctctccctcccccccgacctgcgacatctgccaggacgcccacgcctacttcttctgcgtcgaggaccgcgccctcctctgccgcgcctgcgacgtcgccgtccacaccgccaacgccctcgtctccgcccaccgccgcttcctcctcaccggcgtccacgtcggccttgacgccgccgccgacgacgacgacaaacaccccccacaccccttgtcgtcgtcgctgccgcgcaacacggcaccgcccccgcagccgccgccgaagcgcagcccctcgccgatctacagcgatgacgacgtcatcgactgggccaccggtggccacgacatcggcatcaccggcaacctgcccgactggtcgctcgtcgacgagcagttcaacacccctgcgctgccgccggtggtgaccaagaccccgccgaagcgggcctcccgtggccccgtcacggccggcaccgccgcggcggtgttcggcaacctcgccggcggatcgccggactggccgctcaacgagttcttcggcttcgccgacttcagctccggcttcggcttcgccgagaacggcacgtccaaggcggacagcggcaagatcgggagcatggacggctcgccgaacggcggcaggtcgtcgtcgtcgtcctcctcctcctccgccgccgccgccggcggcggcggcggcggccaggacttcttcggccaggtgccggaagttcactgggccgtgccggagctcccctcgccgcccacggcgtcagggctccactggcaacgggacccgcgctacggtggcggcgccaccgacgccagcgcggtgttcgtgccggacatctcctcgccggagaaccccttccgttgcttcgccgccgccgccgccggtgaccataccatgaaacgccggaggagatgctaa

SEQ ID NO: 13173 - DNA, 831 bp, Oryza sativa
  unsure (1)..(831): unsure at all n locations
  Clone ID: TFbOSC419638j.C1.o6.fg
atggcaagcgacggcagcgcgagcccggccagctgcggcggcgcggcgtgcggggtgtgcggcggcgcggcgacggtgtactgcgcggcggacgcggcggcgctctgcgtgccgtgcgacgccgcggtgcacgcggccaacccgctggcgtcgcgccacgaccgcgtgccgctcgcggtcgccatggcggcggcgagctccggggtgggcaggggcaggggagccccaacgacagctcgtcgagcttcaccaacgacagcgccggcggcggcggcngcggcggcgccgaaaggagcctctttgacctgctctccgacgtcgacatcatgtcctgcggcggcggcggcctcgcgtcgtcgttcgacggcgccgccgcgccgncgctggggcttgcacccaggccagctcgccgcgttgacgccgtggtcaccggccgactccgtcgtcgtcccgacctcggcggccggcgcggtcgccgcggcggcggcggcgagggaggagagggtgaggcgctaccgggagaagcgcaagaaccgcaagttccagaagaccatccgctacgcctcacgcaaggcctacgccgaggcgcggccgaggatcaagggccgcttcgtcaagcgcgccaccaccgccgccgcctcctcgtcatcggacgacgacagcacggccgccgccggagtcagcggcgccggcggcgccggcgccgccgccacgaaggaggccaagttctggctctccttctccgacgacggccgcgccgacggcgtagggttctacatggacagcaccaccgctgccaccgcggcctacggcgtcgtgccaaccttctag

SEQ ID NO: 13174 - DNA, 999 bp, Oryza sativa
  Clone ID: TFbOSC401179j.C1.o19.fg
atggaggcggtggaggacaaggcgatggtgggagtgggaggagcggtggcggcggggtactcctcgtcgtcgtgggggttggggacgcgggcgtgcgactcgtgcggcggggaggcggcgcggctctactgccgcgcggacggggcgttcctgtgcgcccggtgcgacgcgcgggcgcacggcgccgggtcgcgccacgcgcgggtgtggctgtgcgaggtgtgcgagcacgcgcccgccgccgtcacgtgccgggcggacgccgcggcgctgtgcgccgcctgcgacgccgacatccactcggcgaacccgctcgcgcgcaggcacgagcgcctccccgtcgcgcccttcttcggcccgctcgccgacgcgccgcagcccttccccttctcccaggccgccgcggatgccgccgcggcgcgggaggaggatgcggatgatgaccggagcaacgaggccgaggcggcgtcgtggcttctccccgagcccgacgacaatagccacgaggatagcgccgcagccgccgacgcgttcttcgccgacaccggcgcgtacctcggcgtcgacctggacttcgcccggtccatggacggaatcaaggccatcggggtaccggtcgcgccgcccgagctggacctcaccgccggcagccttttctaccccgaacactccatggcccacagcttgtcgtcgtcggaggtcgcgatcgtaccggacgcgctgtcggcgggctcggcggcgccgcccatggtggtggtggtggcgagcaaggggaaggagagggaggcgcggctgatgcggtacagggagaagcgcaagaaccggcggttcgacaagaccatccggtacgcgtcccgcaaggcgtacgccgagacgcggccgcgcatcaagggccggttcgccaagcgcaccgccgacgccgacgacgacgacgaggcgccatgctcgccggcgttctccgccctcgccgcgtcggacggcgtcgtgccgtcgttctga

SEQ ID NO: 13175 - DNA, 1143 bp, Oryza sativa
  Clone ID: TFbOSC411062j.C1.o12.fg
atggcgcgggatgacgacccggccaagaaattagctgtggatggcggcgtcgcggcggcggcgcggtgctgtgacttctgcggcggcttgccggcggtggtgtactgccgcgccgactcggcgaggctgtgcctgccgtgcgaccgccacgtccacgccgccaacacggtgtccacgcgccacgcccgtgcgccgctctgctccgcctgccgcgccgcgcccgccgccgccttccaccgcggcgacggcttcctctgctccagctgcgacttcgacgagaggctccgccgcggcagcatcggcggcggcggtgacgagctgccgctcgacgaccgcgccgccgtggaagggtacacgggttgcccgtcgatcggggagctcgcggcgatcctcggtgtcgtcggcggcgattccgacaagccggccgacgacggctggtggtccgcgagctgggaggaggaggcgccacaggtgctgagcctggatgacatcatcgtgccgaccacctcctgccatggcctccgacctctcctcacaccaccctcccctgagaatcagagttcgccggacaacggggagctggacggcgaggttgtccggcagctaggggagcttgccaggtcagaggcggcggcgcaggccacctttgtagccggcgatcagctggcttcatgggcatcaccggagttcacttctgggcatggtgattttggcattgaggcagcaagcactacagtaccttcttgtgagaatgaaacatggatcatgtcaaccgattgcactgaccctaccgatgcaagcaagacggacatcgcacgcgaggaggctccagcaagctcatctgccgagccatgcctctcttcgctcgtcgagatttcagagatttgccgcagcatgagctacagcggcagtggcatcgacaatggcggccatgatccatcaaccctggcaataatgccaacgcaagctctgcccaagaagggagtctatgacatcgcctaccctgacaggggcacggtgatttcgcgctacaaggagaagaggaagaacagaagattcgacaagcagatccggtacgaatcgcgcaaggctcgtgccgatggcagattgaggatcaagggacgcttcgcgaagtcgaactag

SEQ ID NO: 13176 - DNA, 1083 bp, Oryza sativa
  Clone ID: TFbOSC415950j.C1.o4.fg
atgaagatccagtgcaacgcgtgcggcgcggcggaggcgcgggtgctgtgctgcgccgacgaggcagcgctctgcacggcgtgcgacgaggaggtgcacgccgccaacaagctcgccgggaagcaccagcgggtgccgctgctctccgacgacggcggcgccgcgcccgccgccgccgccccggccgtgcccaagtgcgacatctgccaggaggcttctggatacttcttctgcctggaggaccgtgcacttctttgcagagattgtgatgtttctatacacacagtaaactcctttgtttcagtacaccaaagattcctactaacaggtgttcaagttggccttgatcctgctgatccagttccacctgttgctgacaagcatgttaagagtgctggtggttcagtggattcagcaactaaacatttgcaaaggaatcctacagacttatctggtgaaaacagtgcatctttgcccagccaaaatgtaatcaatggtaattattctaggcagagttctgttacaatggccaagacaggacaggtcaattggactatgagcaacaacacaattagatcaatagaccctccacccaagtattcatcagaggaaagtccagcacttctgctagctagccacactagcaccatggcagcgtactccagtcaaatcagtaaggatagtgatcggatctacaacttaccattcacaggtggtaatgggtcagatagtctacatgattggcatgttgatgagttctttagtaactcagaatttggctttgctgagcatggttcttctaagggtgacaacgctaagccagggagtgctggtggatctccgcagtgccgtctggctgaaggcctgtttgtcgaaggacttctaggtcaagtgcctgacaatccatggacagtgcctgaggtcccctcgccaccgacagcctctggtctctattggcaaaataatttgctttgcccttcgtacgacagcaccatgttcgtccctgagatttcctccttggagaactctcagaacaacttcactgtatctgctggtttgaagcgccgaaggaggcagttttga

SEQ ID NO: 13177 - DNA, 1515 bp, Oryza sativa
  Clone ID: TFbOSC400903j.C1.o13.np
atggacagtagccgagattctgaagaagaaaggcctcaaaggaaggacaatggcgaagaaactgaaaatggggaagatggtggaaatgctttgagcctcaaggatgttgccaatgagcttcttggttgtgttgtccataggcaaaagatggaggcggagtggcatatcccgtcttctccaccgaatccaaaatccgcctcccgtctcctcccctccctatccatcaccacccctcgcccaactccaaaccaaacaccttgtgggcgcgacctcgccgcgctcgccatgccgcctcccctctccttcctccacctcgccgccaaccccacccccctccacgcctcgccgcttcgccgcgcccgcctccgccaccgcctctccctccgcacggaccacccgtcccggcgcgccgtggcgtcggcgtcggcgtcggcgggcgagaacccgtccaccccggggggtcctatagccgacgtcgagatggtccgtggcaaggacggcgtgtggacggcgcggccgccgacggtggtggtgctgtgggacctcgacaacaagcccccgcgcgggccgccgttcccggccgccaccgcgctccgcgacgcggcgtccctcctcggccgcgtcgtgtccgtctcggccttcgccaaccgccacgccttctcccacgtccccgcctgggtcgccgacgagcgccgggagcgccgcgccatggaccgcgccgagcgcgccggcgccgcgtccccgcccgtcccttactcctgcgccgtgtgcggccgccgcttccccacccgccccgacctcacccgccacttccgccagctccaccagcgcgagcgcaacaagaagctctcgcgcctccgctccctcaagggcaagaagcggcagaagttccgcgagcgcttcatctccgggaacaccaagtacgacgacgccgcgcgggagctcctcacccccaaggtcgggtacggcctcgccgccgagctccgccgcgccggcgtccacgtccgcaccgtctccgacaagccgcaggcggccgatcacgcgctcaagcgccaggtgaagcattccgtggcctgcggcgttgactggctcgtgctcgtctccgatgactccgatttcaccgacactgtgcggaaagcgcgcgccgccgacttgagaacggtcgtggttggcgatggttgccgtgctcttggaagtgtggctgacatttggttgccatgggaccgcgtcgagaatggggaggttgatgaggacatgctgcggaatgggacacatatgggattcagagatgaagaggaagatgagcaagatgatgatgagttcatagtggattgggatacgagtgatttggatggtgttgtcgatgacattgtcgcgacgaggaccaagttgttcggtgctacaacgatgtctgcatttgctgatgaggaaattatggatggcatattgggtgttgggataaatggcggtgacatgttatggagtagcgacgacgaggatgaggatggttatttt

SEQ ID NO: 13178 - DNA, 675 bp, Oryza sativa
  Clone ID: TFbOSC402699j.C1.o3.fg
atggcgatggcatttttgggacaaagtcgtttgtacgatggcatttcttggaactcacacttgtcgatggcatttctggtcccacctgtcagcgtggccacgtcagcaccctctctctctcttccccctcctctcccttcctcatctctctctctctcactcttctcggcaagccggccggtggctggggcgaaggccgccagggtgaggcggcggcggcaggtcgcgaatggcgagacggaagcgctccacgccgcggtgctcaaggaggaggagcagcagcacgaggtggaggaggcggcggtcgtgacgagcagcagcgccacaagcggggaggagggcgggcacctaccgcaggggtgggcgaagcggaagaggtcgcgccgccagcgatcggaggaggagaacctcgcgctctgccttctcatgctcgccctcggcggccaccaccgcgtccaggcgccgcctcctctctcggcgccggtaggtgcggagttcaagtgctccgtctgcggcaggtccttcagctcctaccaggcgctcggcggccacaagacgagccaccggttcaagctgcctactccgcccgcatctcccgtcttggctcctgcctcctccgaggtccagagccccctcgccttctcaccgcgtaattcagcagctgcacggatctga

SEQ ID NO: 13179 - DNA, 2142 bp, Oryza sativa
  Clone ID: TFbOSC100644j.C1.o16.gm
atgtcccgctatcacctcgacgcggcagctggaggagccttcttctctaaaatggttcaaggagccgttgaactaatagagaagatggtctccaatatgggttggaacgaggaacgacttcagatgcgtcagcgaggcatgcacaccgtcaaggagtcggagttacttgctgccaagctggacctcctcatgaaatgcttggacgaccacgagaaacggccacaaggcaccgtcaaggccttggactctcacgtcacatgtgaggtctgcggcaacacaggtcattctgggaatgactacccggaaacccgtgaggaggcgatgtacatgggcaacaacaatgggtatcgttcacaaggaggaactaacgggatatcaaaacaagcgccatctagtgactcggctgacaaagaggttcagccagagaagaccgtgccgcaggaatactgcgacacacggttgctgccgtttccccaacggtgtaggaaaccgtcagtggacgagcaattcgctcgttttgttgaagtaatccagaagatccatatcaacgtgtcgttgttggatgctatgcaagtaccaacatacacccgttatctcaaggacatagtcaacaacaagagaccgctcccaacaacagaggtggtcaagcaatgcagcaacgtgatactccacaagctcccggagaagaagaaaaatcagggcatcatgccgaaagacgtcttcgatagactcaacttcacagtgttggcaccaacaccgatgcgccttcaactggctgattcgtcagtccgttacccggcagggatagcggaggatgtgtcagtcaagacacgggatttctttatcccggttgacttcgtggtgctggacatggacacgggaaaagagacgccgctcatcctggggcgcccgttccacgtcaacggcaaggaagagaagtttgagtttcaaccgaggacggaacaatactccatgaatttcatggagaaggaaacaactatgcctaagaaccgttattggaagatgccggtagaaccacccatactggccaagaaactagagcagccggctcagaagaagccgccatccgcaccaaaaccaaagaaggtgtggaggaagaagccaaagacgcccactccatcacctccggagacggatgttttgatggaagacgccgaagctccgcgacgactcctgaacgacaccgacctcgaccttgtcagtgatcggaagagacaagcctactacatgctgagcgaccgggagtatgctcacacgcgagaatactcaccggagctgctgaaaaagataggtggaacatatagggagacgcgcaacatgataaggaacgaacaagaaagttcatcatcctcaacacccgtgcagatgtatgaggcagcaaggtactggatcttggccaggaggaagctgggagatcagaaggcgcctctcttccccacccctcacatcaccatcggcgccggcggcagctccacctcctactacgagtcatgggaggaacgtgccttcgcggaagactccgcagggcatctcgggggctgcatctggccgccgaggtcctactcctgcagcttctgcggccgtgagttccggtcggcgcaggcgctgggcgggcacatgaacgtccaccggagggaccgggcaaggctcaagctctctggggttgtggaggacggcaccggcggcgaaagccacggcatgccgccaaaccaaaactacatgatacaaccatgccctccccaaattggcaccctgcagcacgcctacagcccaaaccctagaagtggcagtattctcgctgctgacactaaccctaattccatatgtgatgttgtcgcgtaccctgctagatccttgcttcaagttgcagctgctagaactgccttgggcaaacaagtcctgaacgcccctcttgtctcatcgaagtcgccgtcggctggtagagaacatggtaagagggagacgttgtttcttggtgctgttcgattggcacaggatcatgacacgcaagatggtggtgatgaccaacatcatgaaaagatactaaaactttatcgtagctcctcggttgaagaactagatcttgagcttagactcggggaagccccaaaagaacagtag

SEQ ID NO: 13180 - DNA, 947 bp, Oryza sativa
  Clone ID: TFbOSC102397j.C1.o1.fg
caaggtactggatcttggccaggaggaagctgggagatcagaaggcgcctctcttccccacccctcacatcaccatcggcgccggcggcagctccacctcctactacgagtcatgggaggaacgtgccttcgcggaagactccgcagggcatctcgggggctgcatctggccgccgaggtcctactcctgcagcttctgcggccgtgagttccggtcggcgcaggcgctgggcgggcacatgaacgtccaccggagggaccgggcaaggctcaagctctctggggttgtggaggacggcaccggcggcgaaagccacggcatgccgccaaaccaaaagtacatgatacaaccatgccctccccaaattggcaccctgcagcacgcctacagcccaaaccctagaagtggcagtattctcgctgctgacactaaccctaattccatatgtgatgttgtcgcgtaccctgctagatccttgcttcaagttgcagctgctagaactgccttgggcaaacaagtcctgaacgcccctcttgtctcatcgaagtcgccgtcggctggtagagaacatggtaagagggagacgttgtttcttggtgctgttcgattggcacaggatcatgacacggtgagttctaatcttgacctgcgtgttgggaaaaatgaattgaagataactactgttttggggtgccgatcaagaagggactttatgtacgataacgaccgcgcggatgatgaaaagactgttgaagcaagtcacaagaaaagaagaatcgatttggaggtaaaccccctgattctaacttcttcaaccagtaatcatcaacagcaagatggtggtgatgaccaacatcatgaaaagatactaaaactttatcgtagctcctcggttgaagaactagatcttgagcttagactcggggaagccccaaaagaacagtag

SEQ ID NO: 13181 - DNA, 312 bp, Oryza sativa
  Clone ID: TFbOSC416211j.C1.o3.fg
atggacggcgagggggcgccggcgaggcgggcgccggcggcgtcctactacgagtgcaccttctgcaagaggggcttcaccaacgcgcaggcgctcgggggccacatgaacatccaccgcaaggaccggagcgccggcggcaagtcgcagggcggcggccagcaccacgaaggcggcggcagcggcagcggtggcggcggcggccagcagcacggcagagatgtccacctgggcctcaccctggggaggaacgaggaagagagggacggcgtcgacctggagctcaggcttggccatgcccactatccttga

SEQ ID NO: 13182 - DNA, 390 bp, Oryza sativa
  Clone ID: TFbOSC900062j.C1.o12.fg
atggatcggtacaacggcggcggcggcggcggcgaggagggggatgagcagctggacctcaacctgtcgctgcagccgtcgcaggcgaacgagccgccggggtacttcacctgcacctactgcgacaagaagttctactcgtcgcaggcgctgggcggccaccagaacgcccacaagttcgagcgcagcgtcgccaagcgcacccgggagctcgccgcggcgcgccgccagcaggccgccgacgaggaggcgcggcgaggggcagggaccaccaccaccagggagcccacgggcaatgcctcgtcgtcgtaccagagggcgtcgccgccggcggaggctcgccgccgggacctcctcaccgacgacatcgacctgtccctgaagctatga

SEQ ID NO: 13183 - DNA, 1251 bp, Oryza sativa
  Clone ID: TFbOSC400899j.C1.o35.fg
atggccccttcccggatctcctcatcggagtcggagcgccctgttgggagctatcgcttccacatcccccgccaaccaccacgcatccaagctgagggaggcaagcgccacatgatcataggtgaccgccgccatgggggcactgcactttggcgccgtggctcgatgttgccgccttcacttcctcgttggggtgtggaagatggccatgggcatgtggatggaagcagcaggcaacatccatcggaattgggcttctcctctgccctttcagtgccgataggcgggtggatctggaggttggcggctgcacaagctcatggggaagtgattgatggtggccgatgtgaagatgaagctggcgatcacatgcagccacctccagcatcctctgcttctatggcaatgttgtccgaagagcggatctcagcctcaggaattgtggtgcgagaacggcagctgcatggatacggggagcggcccttccagccatgtttggcaaccatggcagcaaaggggacagcaagagagatctcaactaagaaaattgccaagaaggatcatggggaagtgggtgatctcactatggctgtgctgatgcccagctggacctccactggcaaccacagcagtaggaaccccacccgatgcctggaacagttaccggagccgtcgaagcgggctcacagcgaggcgtatggcaacatgcagctggctactggggacctcatcgttggcctccacaagcaggccaccatcactgtccccccacccaacatttctgagattggtggtcatctgactgcacacaagaataatgagatgactatgggcaagggagtgcagcacaccatagatgtctccgttgccaaggaggcaacccgctcattggtcagcagtgccaggcagagcaggagagggccatatgagtgccgcaagtgtggaacgatgttcagcagtggacaagcacttggttggcacatgaagagtcacaactcagacgagcgatggggtgacaagagggttcccagtgcctttgttggatcatttttatcccttatcactccaatagatgtcagtaatgtttctgttcctagcagccgcaaccctcatacatcctccatccccaacaaagaggaggggagggtgctggtgatgggggctgcacctctcaacggcgtacccaagggtagtttccgtctctttggtgaaaacattgctgaagctcccaaggaagaaccaatggagtag

SEQ ID NO: 13184 - DNA, 645 bp, Oryza sativa
  Clone ID: TFbOSC20529j.C1.o3.np
ggctaggagccctcagattgatatctgtggttcgaataagaccttgggctggcaccctagtgttaggtgatcatttggacagagagctgttcgcggtagcgtagcgaccaccataaccataggcgatgggaagacaacaggcttctagagcactcgcattgattgcgccggcaatctacacagcctccataagcaagaatagatctgtctgtgaggccctcctctccaacaagtgggtcagagagacatccagttgtaccatatcacgacgagagagcatctttgctgatacgtcgagctttggaccttgatatgcaatgctctcctgctagctagggcaacaacgcgacaacatcgtctggaaactcaccacaaatagggaatacaaggcaaaatcagcttaccagctcctattcctgggggcggcaaggtcaactttcaatgagacaatatggaaatgatgggcatcgccgaagtgcaagttcttcacatggctggtcatacaaagcagagtctggacagcaaacaggctaaaaaaagttggacaaatcagcaaatatgcccctctactacaccacacaggaaatggcattgcacctctttgcacgttatagactctcctgccgaatctgggtagtgattcag

SEQ ID NO: 13185 - DNA, 738 bp, Oryza sativa
  Clone ID: TFbOSC900003j.C1.o8.fg
atggaggagcaaagaggcgaggaggagtgggtgatgtggggatcggcagggagaagacgaatcatcaggcaatcggcgtcgtgggaggagcaggcgttcgcgcgcgatgcggcggccaacgccaacctcggcggctgcgtgtggccgccgcgcttctacacgtgcagcttctgccagcgcgagttccggtcggcgcaggcgctcggcggccacatgaacgtgcaccgccgcgaccgggctcgtctccgacagaggcagacctcctcctcctcctcccccagccaccaagaagaagaagctgaagcaccccaagatcagcaagctggcccttactatacctctttctctaaacctagcaccacctccaccgataatactacttgcagtaacgacatactactgctagcaagagatcaagaaaccatcaagaagagggtaccgagacagcaagtacaagtagttgcagatcaggacgaggacgaaccggccgggagaaggtacaagaggaggaggcttggtttggtggatcagctgccgtcgtcatgtgaaggaggagatcatcatcatcaggtactgatcatcacaccaacaacagccgccgcaagccctagctctataattgcttctgcttctgcccttgtggttggggatcagcagcatcaacaagcaggatcagtactagatctagagcttaggcttgggactagtactcctcctaaagctgttgtgcacgcttaa

SEQ ID NO: 13186 - DNA, 1332 bp, Oryza sativa
  Clone ID: TFbOSC33060j.C1.o2.gm
atgaggtcgaaggccataagatcaggtgtccctctgacctcgggaaggctggatctgcgattcttagggcagcggaccatgcttaggagtagagccagaatgcaacgccattggtgctcaacaacggtggtggagatgacactggcgaggctcttggggataaaggagtcgacaccggtcattactaacgtgttaaaaaatactctcatcacagatgagtacctcatccgtgacggcgatgtgtggccgccggcgacgaagcggccccgcacgggcgggcgccgcggcgttggccacggaggtggaggcggggaagggcgccgcggcggtggccgcggaggtggagccgtggaggcggggtcgagcaccgtggagctggactcggagccccggcctgctctcgcgccgcatcctccctttctcagcgtcgggagcgtcgtcgtcgtcgtcgggcggcttgcgagcaaggcgggcagcgacctcgctctcgcgtgcggcgtcggcgtcgtcttcatcctccgcagcgagctcccaggcgacgaggctgctcatcacccggaggcgctcggcgtcgccgcgacgaggctgctcatcaccctatcagcgcacatggggcacaccatcgccgagaggctctgcaagacgcagggccagccgaggagcgccggcttgtcgccgcgggctggggatgagagccaacgccagcggaggaggcgtacgaggggcggagggccgcgctgctgcgggcggtggtcgtgggcgcgacatgtgaaaggattttttagctcgccattaaggaataaacgcgctgctctcactgtcgtcacccgcgtggccacgtcgatggcaccgacgtcgtcgtcgacgccggcgggcagcagggcgctggcggcggagggggtgttcgagtgcaagacgtgcaacaagtcgttcccgtcgctccaggggctgggcgggcaccggacaagccacacgcggctgcaggcgaagctgctgagcgaccccgccgccgcagcggccgagagggacagggcacgcatccacgagggcgagacgggcacgacgaccgtcgtgctcacggccgccgacgtcgacgactcgggcggcgccaccgtgccgcagccgccggaggccatgctggacctgaactacccgccgccagtggcagttcctccctcgccggccgctgcccgcgcccgccgctcggccgcgcccatctgctctctgccagccgcctgtgcttccgctgcggccctgcctgcctgcctcttgaaccgcgtggcgccgccgccgccgccgggattcacaaaaccaacggagcatacggactag

SEQ ID NO: 13187 - DNA, 954 bp, Oryza sativa
  Clone ID: TFbOSC400622j.C1.o29.fg
atgtcactggcgtccacgtcgtcgacggagatcgagatggatgagaagaaggagatgacgaagaagacggagcaggagaagacgctgacgtcgtacgtgttgcgcgagaatcccaagaggagctacaaggtgagcgccggtgaattctccggtggtggtggtggtggtggtggcggcggcgagtcgtcggtcgtgcaggacggcgagagcgacacggagtcgtccccgccgcgcggcggagcggggtcgttcttcgccgtgagccggaggcggtcgaagcgggcgcggcggcggcgtcgcgcgccggatcccgaaccggcgagcagcgtctccgacgcgacgacggaggaggacgtggccatgtcgctcttgatgctgtctcgggactcgtggacgcgttccagatccgagcacgagacccaccaccggggggcgagctcggaggccgagcagaacaacaacaacgtcgtcaacgtgttcgacgaagaagacgaggacgcccgcgacgtggccggcgaggatcacgacgaggagctcagctacggcggcggcgaggcggcggcggcgcgccaccgcaccagcaggttccagtgcggcgcatgcaggaaggtgttccggtcgtaccaggcgctcggcggccaccgcgcgagcctcaagagaggcaagggcggcggctgcgtgccaccgccacgtccggcgccggcgagctccgccgccgcgccggccatccacgagtgcccattctgcttccgcgtgttcgactccggccaggccctgggcggccacaagcgcgcccacatgccatccggcggcgcgcggccctcgccctcgccgtctccggcgaaatgcggcgagagctccggctccatcgatctcaacatgccggcgacaatggaggacgacttcgagctctccgccgtgtacgacgccgagttcgccagcacgagacagtga

SEQ ID NO: 13188 - DNA, 2574 bp, Oryza sativa
  Clone ID: TFbOSC400502j.C1.o32.fg
atggggaagaagaagaagcgcgtggagaaggtgttctgctactactgcgaccgcgagttcgacgacgagaagatcctcgtgcagcaccagaaggccaagcacttcaagtgccacgtctgccacaagaagctctccaccgccggcggcatggccatccacgtcctccaggtccacaaggagtccgtcaccaaggttcccaatgcaaagcctgagagggaatcaacagagattgagatctttgggatgcaagggattcctccagatgtgttggccgcccactatggagaagaggaagacccttcatcgaaggtagccaaagtggaagtgccatcgctaaggcctcctgttatgcccaatccagcgggcatggtatatcctccacgaccggcctatggtgtagctccacctatgtataaccctgcactgaatccattgatggccagacctccaatctggcctgctccacctccgcaaccttggtttacacaaccagtagtttcggttcctcaaatggcttctgggcttgcaccacaacagccactatttccaattcaaaacatgcctgctcctatgacatcagcacctgcaaatttacttcagacttcgttccctatggcccatgttggagtaccttcacctgttacccctcaggtgtcacaacctctctttcctgtcagtacatctgctggaaacggtgcagtaagttctccatatgtagcatctgttgcacctggaagcatcccaacaagctctccatcagttgctcctgcaggagtaggatatgcagctactaaccaaggtacaggaggtccagcggctgtacctccacccgcttctaataataaagcaccagccacccaacctggtgcaaatgaagtctatctggtgtgggatgatgaagcaatgtcaatggaggaaagaagattgtcgctacccaagtatcaggtgcatgatgaaactagccaggagttccaagtaggtatttacattgttctacctgctagagcaagagtgttaaggccagatgagctactactcgatcactactactaccactcgtcgtcgtctgatccatactacagcacaccgatccttccaccctacggcgacgcattctcaccgccgaaccctcctccccctcctcctccgatgtcacccagctgcctcctccctccgatcattccggcaccaacattcacatacagttctcctccaccgccgccactctactaccctccaccgccggatataagcccaagcccgccaccgtctgttacaccattgccacctgtagtctacccgagtccaccggaagtcacacctagtccaccggaaattgcaccgtatccaagcccacctgaaattgttcctagcccaccagagatcacaccgtacccaagtccacctgaaatcgttcctagcccgccggagatcacgccatatccaagtccacctgaagttgttcctggcccaccggagatcaacccgtatccaagcccgcctgagattgttcctagcccaccagaaatcacgccatatcctagtccacctgagattgttcctagcccaccagagatcacgccatatccaagtccacccgaaattgtgccaagcccacctgaaatcgcacctagtccaccgatcgttacaccgatgccacccataatctacccaagcccaccggaagtcacacccagcccgccagaaatcacaccttatccaagcccaccggaagtcacaccaggcccgccagaaatcacaccttatccaagcccacccgaaatcacacctagcccgccagagatcacgccgtatccaagcccacctgaagttgtacctagcccaccaaagatcaccccatatccaagcccgccggaagtcacacctagcccacctgagatcaccccatatccaagcccacctgacatcgtccccagcccgccaagctatgagcctagcccacctagctatgaacctagcccaccggagtacgcgccagaaccaccggtgtacgcgccgtatccaccggggatcttcccgagtccaccggagtactcgccggagccgccggcatacgtgccaagcccaccgcagtacgcgccgcagccgccgtcatacgtgccaagcccaccggagtacgcgccggagccgccggtgtacgcgccgtatccaccggggatcacaccgagcccgccggagtacgcgccggagccaccgccgggcccgcccggcggtggtggcgggtacctgccgccggtggtgttcccgccgccgtacgcgtcgcgggggccgccggggaggcgcgcggtgtggtgcgtggcgaagccgtcggtgccggaggggataatccagccggcgatggactacgcgtgcggctccggcgccgactgcgactccatccagccgtcggggccgtgcttccggccggacaccatgatcgcccacgcctcctacgccttcaacagctactggcagcgcgccaagtccaacggcgccacctgcgactttggcggcaccgccatgctcatcaccaaggatccaagttatggtggctgccattacagtacgatgtga

SEQ ID NO: 13189 - DNA, 459 bp, Oryza sativa
  Clone ID: TFbOSC401614j.C1.o1.fg
atggcttccagctcgcagaccaccgtgtccatggaggtggcgatgaaggttgaggggagtggtggtggtggtggtgatggggaggaaggcgaggtggtggccaagaaggaggaggaggtggcggcggcggcggcggcgatggagctcgatcttcttggcgcgctgcgagcggaggaggtcatgccggcggagaaagggaaggccgccgtcgtgatggtgggcgaggcggtggccccgtccgtggaggagagggcttctgctgtggcggcggcggcggcgaacggtggcggcggcggcggcgaggcgaggcgccggctgttcaagtgcaactactgccagcgcaagttctacacgtcgcaggcgctgggggggcaccagaacgcgcacaagcgggagcgctcccctcgccaagcgcggcgccgccgtggcggccgcggcggcggccgccgggcgcggcct

SEQ ID NO: 13190 - DNA, 1437 bp, Oryza sativa
  Clone ID: TFbOSC401275j.C1.o67.gm
atggagagcaggagcgcgagagagcatggccatggccaccttcatcagcagcatcagcggccatggagctgcagcttcggcttctcatggccgccgctgcagaggtcgccgccgccgtcgtcgtcgtcgtcgtcgtacacctgcggctactgcaggagggagttcaggtcggcgcaggcgctgggaggccacatgaacgtgcacaggagggagagggccaggctcaggcaattccccaaccctagacctcatccccttcccaacctcaacctctcgccgccgccgccaccgccgccgccgccgccgccgccgcagcagcagcagcagtgctactgccccggcgatcgtccggccatcgtctacagcttcttctccacggcggcggcggcgatggcggcgacgaagggtttggaggtggatttggagcttggagtcggtggtgaccctctcgacggctgcgcgcatgacgctgacgagctgtggcatgaagcattcagccagggcgcccgggccgcagccaacgtgcagctccgtggcggtccaatcccgtcgggctcccaggcccaggactcacgcacttgcatggccggtcgatctcgcctccagcggcgccggcgccgacctccgtggcagtggcgagctcagctcccgtcgccgctccagcccgtgctccccgcggccgcgtgggagtacggcgaggagaacgtacgaggaggagaaggtcgagccgatgcgatcgactacgttctctacatcgacgcgcgctacttcccgagagttccttcgacttctcagcgtcttcttccgctgcgcggcgcgtcgagtgctcctacaccatccaattttaacttgcggtctattcttgagaaagagaagttgactggaacaaacttcatggattggtatcgcaacctgagaattgttctcaggcaagagcacaaagagtttgtgcttacacagccttttccagttgacttgcccaacaatgctattgctgctcaatgtagggagcatgaaaggcgatgcaatgaataccatgatataagttgtctcatgcttgctactatgtcccctaagattcaaaggcaatatgaggcattggatgctcatacgataatcacgggactacgtaacatgtttgaggaccaagcaagagctgagaggtttaatacctcaaagtccttgtttgcgtgcaggcttgcagaagaattgcatgggatgctaaagactgccgaggaaagcattaagaaaaactccaaccatgtgatggttatgcataagcgcaagcccaacaacaagaagagtggtcaaaagagaaagctaaactctgatgagatcatgagtactagcaactctaagaccaaggttcaaaagacaggacccgctaagaatgcagagtgcttcttctgcaaggagacaggggctgaaaagaagtag

SEQ ID NO: 13191 - DNA, 245 bp, Oryza sativa
  Clone ID: TFbOSC32420j.C1.o2.np
ataggggggaggcaaaaatcgccctcccccagggcggcaagggggccgcctgcaaaattccatgccccatcgccgcccatttgcaggcggccccccccacagtacaaaatcgccctagcggagggtggcaagggggccgcctgcaaaattccatgcccccctcgccgcccatttgcaggcggccccccgcacagtataaaatcgccctagcggagggcggcaagggggccgcctgcaaatttcgt

SEQ ID NO: 13192 - DNA, 1814 bp, Oryza sativa
  Clone ID: TFbOSC401200j.C1.o51.np
atgcatgaagcaagtgaagtgaaaatcccggctaggcctaggagtaatactatatgcaatccgaggctcgacgtgatcgtggcggccaaccacagcgtcttcatcaagggagtactttcgctagctatatgcatgcaggtgtccactgccgttggcagttgcgactacgcctcaaccgtgccggccgctatagtgtctagtggtagtggagtagtaaatcacactagttactgtacatgcagatccatagacatcatgctgcaactgccgctgccatggccactagctctgcacctgaactgcacaaatggagtggagtagtagtactctgctccagcaacatccaaagcataaggaagcaacaagctaagaagcagcatcattcactccacgagctagcaaaaaggatagcaatggtggaaccggggagagcgcgggagacgaaggtcaccgcctcagcctcaagctctgcaggctcagacgccgctgtcatgaagaagaagaagaagaagaagaagaagctggtggtagcaagcaggaaggtggatgagaaagacaagaagcaggtggattacaagtgcagtagaagcagcggcagagacgagtgctgcaaggtggagagccgtcatcagcagtgcacagagccggagagcccttcctacagaaacagcagcagcagcagccacgccggccaccaccaccaccgcgccgccgacggcaagaagctcggctgcaattccgcctccatctgcaaggtcaagcaagacaacccgatgcagcagcacatgcgcagggcggaggatgagctcaaggtgaaggacaagccgccggtcgccgagccgtactgcaagcgcagagcttcggtgagcgcgtgcaacatcagcagcgagcggtcggtgaagaagtcagtgaagcagcagcagcaggaggcgagcagcagcttgcagtcgtcggcgtcgatatcggcgtcgtcgtgttcgtcgacggcgggtggtggggggtcgttccgggggatgcagcagttgagcctgaggcggctgtcggggtgctacgagtgccacatggtggtggatcccatcagcggcgtcttccgggacagctcctccatgagggccaccatctgctcctgccccgactgcggcgagatcttcgtcaggcccgactccctccacctccaccagtccatcaggcatgcagtgtcggagctgggggcggaggacacgagcaggaacataatatcgataatattccagtcgagctggctgaagaagcagagccccgtgtgcgccatcgaccgcatcctcaaggtccacaacgccgcccgcaccctcgcccgcttcgacgactaccgcgccgccgtcaaggccaaagcaatggcccaccgccaccctcgctgcaccgccgacggcaacgagctcctccgcttccactgcgccaccctctcctgcgacctcggcctccacggcgccacccacctctgcgaccacctctcctgcgccgcctgcgccatcatccgccacggcttcaggccgcccgcgccgggggccggcatccgcaccatggccaccagcggccgcgcccacgacgccgtcgtctcgtccgggtcggagggcgaccgccgggcgatgctggtgtgccgggtgatcgccggccgggtgaggagggaggaggcggcggcggcggcggcggaggaagaggaggaggagtacgactcggtggccgggacgacgccggggctgtactccaacctggacgagctggacgtcttcaaccccacagccattctcccttgctttgtcgtcgtctacagggcc

SEQ ID NO: 13193 - DNA, 375 bp, Oryza sativa
  Clone ID: TFbOSC407914j.C1.o1.fg
atggagtacgcggcgccggcaggggcaggggcagggggctactactactacccgccgtcgcagcagcacaagcctcgccgtcccccgcggcccgccgcccgctgggtcaagcactggatcccgcaggatctcgccacctcctccggcaaatgcgccctctacaagtgggtcagggaggatgtgtacaagaatctcaaggacggcaaggccgtgccggagccggaggcggtgaagcctgaacccaccacggagatcctcttcctctgcagctatgaaaactgtggcaaaacctttgtcgatgtcgccgccttaaggaagcacgctcatgtgcacaacgagaggcagtatatttgtcaggagcctggctgtgggaag

SEQ ID NO: 13194 - DNA, 1536 bp, Oryza sativa
  Clone ID: TFbOSC400103j.C1.o2.fg
atggcgctctccactctcctcctcccctcctcctcctcttcctcctccaagacggccactgccaccgacacctccgaccgccgccgccaccaccaccaccacaaccacaccaagcgcaagaagaagccgccgccgccgccgctctcaccgacgccgagaacgccgccgcctgcagggagtggaagccaccgcgccatggccgcgtcgtccaagaagagcaccaagcaggtcgtcgtcgcggccaagacgacgaccggccaccgccccaagaaggcggcggcggcgccgacgacgccgtctcgtggtgcgccgtcggcgtcggccgcgccggtgtcgtcgtcgtgggagcagctgaagagcctgctgagctgccggagcgcgacggcggcggcgcgcgtgcacgaccccgccgcgccgtcgtccgcgttgtcgcggctccgcagccacggcgccggcgcgtgcggcgcgtcgctctgcgccatccgcgacgtggtcgacgccgccagctccgcctccgcggcgtccaccgccgccgcgtccctcgaccgcgacaccaccccgctcacccgctcctcccgccgcgcccaccgcgccgccacctcctcctccggcggcggcggcggccaccacgcctccctccgtggcctctccggttgctacgagtgccgcgccatcaacgtcgagcccatgtcaaggaggtatccgaggccacgggagctgtgcgcatgctcgcagtgtggggaggtgttcaacaaggccgacagcttggagcaccaccaagccattcgccatgctgttaagattggatggcaaaaatacatcaaaaggtatctgtgcctagccatcttttgcatgcttgcagtcgcatctgcatctccatttgttgaagtgtcggagctggggccggaggactcggggcgaaacatcgtggagataatcttcaagtcgagctggcagaagcgcgaccgtccgatctgccagatcgaccgcatcctcaaggtgcacaacgcggcgcgcaccgtggcgcgcttcgaggcctaccgcgacgccgtccgcacccgctgccgcgccaccgccgcccgcgccgccgccgacggcaacgagctcctccgcttccaccccgccgccctcgcctgcccgctcggcctcaacggcgccacctcgctctgcgacgacgacgacgcctgcggcgtgtgcgcggcgatccggcacgggttcgcgccgtgggcgggcgcgcacccgctcggcgtgcgcaccacggcgagcagcggccgcgcgcacgactgcggcgcggcggcggcggcggcgcagcaggcgggcgggtgccgggcaatgctggtgtgccgcgtaatcgccggccgtgtccgccggaacgacgacgatggcggtgcggaggaggaggagggagcgttcgactcggtggccggcgacgaggcggcgagcagcgtgtacggcaacctggaggagctgttcgtggcgaacccaagggccatactgccgtgcttcgtcgtcatctaccgtgttgtccccgagtga

SEQ ID NO: 13195 - DNA, 1215 bp, Oryza sativa
  Clone ID: TFbOSC409369j.C1.o1.fg
gccgcgccggtgtcgtcgtcgtgggagcagctgaagagcctgctgagctgccggagcgcgacggcggcggcgcgcgtgcacgaccccgccgcgccgtcgtccgcgttgtcgcggctccgcagccacggcgccggcgcgtgcggcgcgtcgctctgcgccatccgcgacgtggtcgacgccgccagctccgcctccgcggcgtccaccgccgccgcgtccctcgaccgcgacaccaccccgctcacccgctcctcccgccgcgcccaccgcgccgccacctcctcctccggcggcggcggcggccaccacgcctccctccgtggcctctccggttgctacgagtgccgcgccatcaacgtcgagcccatgtcaaggaggtatccgaggccacgggagctgtgcgcatgctcgcagtgtggggaggtgttcaacaaggccgacagcttggagcaccaccaagccattcgccatgctgttaagattggatggcaaaaatacatcaaaaggtatctgtgcctagccatcttttgcatgcttgcagtcgcatctgcatctccatttgttgaagtgtcggagctggggccggaggactcggggcgaaacatcgtggagataatcttcaagtcgagctggcagaagcgcgaccgtccgatctgccagatcgaccgcatcctcaaggtgcacaacgcggcgcgcaccgtggcgcgcttcgaggcctaccgcgacgccgtccgcacccgctgccgcgccaccgccgcccgcgccgccgccgacggcaacgagctcctccgcttccaccccgccgccctcgcctgcccgctcggcctcaacggcgccacctcgctctgcgacgacgacgacgcctgcggcgtgtgcgcggcgatccggcacgggttcgcgccgtgggcgggcgcgcacccgctcggcgtgcgcaccacggcgagcagcggccgcgcgcacgactgcggcgcggcggcggcggcggcgcagcaggcgggcgggtgccgggcaatgctggtgtgccgcgtaatcgccggccgtgtccgccggaacgacgacgatggcggtgcggaggaggaggagggagcgttcgactcggtggccggcgacgaggcggcgagcagcgtgtacggcaacctggaggagctgttcgtggcgaacccaagggccatactgccgtgcttcgtcgtcatctaccgtgttgtccccgagtga

SEQ ID NO: 13196 - DNA, 786 bp, Oryza sativa
  Clone ID: TFbOSC400700j.C1.o5.fg
atggccgcgccgcatggcatgcatggcgtcgccgcggcggcgccggacgccaccatccgcctcttcggccgcgacgtcgtctccaacgacgacgctgtcgtcgtcgtcgtcgacggccagctgcccaaggaggaggcggaggaggaggcaggcggcggcgcggcggcggcggcgggggagacgaggaggttcgagtgccactactgccgccgcaacttcccgacgtcgcaggcgctgggcggccaccagaacgcgcacaagcgggagcgccagcacgcgcggcgcgcgcacctcgaggcctccctcgccgccgcgcactacctcggccagtccgcccacctcgtctacggcggcgccgccctcttcggctacggcggccacgccgccgccgtgtcgccgcagtacggcccggtgtgggcgagctccgccgtggcgccgccggggctgtacgccacctccatgggcatggcgcggcctgcagcctacggcgccggcgtggacgtgtccgcgctgtggagagcctcgtcgtcgtcgtcgtcgtcgccgccgatgatggggagtggtggtggtggtgcttttggtacggtggccggcggcggtcggcacggcgaggcagcggcggcggcgttggtggggtgtcgagccggtaaggatgagaacgtggtgatgagcgttgtgacgtcactgccttcgctgccgtcgtggcagctgccggcgccggagaagatgggtaggtctgagctgggtcaggaggccggggttgtgagcttggaactccgtttgtag

SEQ ID NO: 13197 - DNA, 678 bp, Oryza sativa
  Clone ID: TFbOSC400939j.C1.o50.hg
atggcgccaacaagtagcactgaggaggtgaagcacctgacgcttcaccacttgttgaagcggcagcaccggctcaagcccgccgccgtggtgtggagatggccgacgtcggtggtgcccggcggcggcgccgggcggccgccggtgcccgacgagcagctggcggcggacgacgtggacggcctgggcgggacgtggccgccgcggtcctacacgtgcgcgttctgccgccgcgagttccggtccgcgcaggcgctgggcgggcacatgaacgtgcaccgccgcgaccgcgccaagatgcgcggccacggcctccacggcgccgccgggcagcagctcggcgcggcggaggcgcctgccgccgccgccgccgcgaggacggagtacgccgtggcgctgtaccccatcctgaactccggcgcgggcggcgcggcggtgcgcataccgcacggagacgtgctgctctccgcgcccgtcgcgctggcggccgcgcgccgtggccatgatcaccggtgcatcgatgtaggtgacgacgagaacgacaagaagattgacctggagctgcgccttggaatcctaatgacgattaaaatgagggacgacaggcaggccgtgaagcaaacgagcgaggcggttgccgggacttctagaaagagaagcagcaggcggggtgtatag

SEQ ID NO: 13198 - DNA, 588 bp, Oryza sativa
  Clone ID: TFbOSC101556j.C1.o17.fg
atgagtcaaaaaaccagcaaggacgaggtgatcggtggaaggtcgccgagcggcgacggagacaaggcggaggaggagctccgcgaggcccgcagcggcgacgacgacgacgacgacgaggccggcacgaggcagccgtacaactgcaccttctgcaggaggggcttcccgacggcgcaggcgctcggcgggcacatgaacgtccaccggaaggacagggttggaagagcgacgccgtcctcctcgtcgtcgacgacggcggcggcggcaaggcgaagcgtcagctacgatacgctcgtgaggttgtttcgtccgccggcgagcggaggaagcgaggatgcggcggcgtccacggcggccggcggcggcgcgagcctgaggtcccgtaccgccgagccggcgccgcaagagctaaggctgtttgggcgcggcgccggccgtcgggaagaaggtggtggtagagatcgacgagatcgctacggctgctgctccaaggatggggatggcaatggtggccatgatcatggggaggaggaggaattggatttggagctgagacttggtggttcaggctctgcaggctcatga

SEQ ID NO: 13199 - DNA, 1019 bp, Oryza sativa
  unsure (1)..(1019): unsure at all n locations
  Clone ID: TFbOSC400464j.C1.o1.fg
atggaagctagtgcagccaaggagaaagacaaggatggcaagaagatgagcagggttggaagctggggatccatggcgttctactcctcgtcttcttcctccagaagccaaccagtgtctgcagcagaaggcaagaatggtggcaagaaggagaagaggaggagcagcatcagcaggagcatcacgtgtgccggatcgatctgcagcaccaaggagagttcggtgtcgagcagggggagaggccggcgccgccggagcggcggcggcggcggcggcgatggcggcggcggagggagcacgtcgagcaggtcgctgatgggtcccgggtaccacggcgactccgcggcggctgtctccgcgtcgtcgtcgttcaacnctgtgatgacggcggcgacatccgccaccgcgaccaccaccaccaccaccaccagctcgtcggcaacctcgccgccgtcggcgctgtcctcgccgctgtcatccatcggcggctcgttcagggcgatgcagatcaggaagctctccggctgctacctccactgccactcggtgctcgacccgcgcaccctcgccgccgtcgtcttctcctgccccgactgcgacgaggtgttcgtcaagcccgactccctcgagctccatagatcaaccagacacgcagtttcagagctcggggcggacgacacgagcaggaacatcgtggagatcatcttccagtcgagctggctgaagaagaacgcgccggtgtgcaggatcgagaggatactcaaggtgcagagctcggacaagaccatcaagaggttcgagcagcacaaggaggcggtgaaggagaaggcgaggagcgccggcgacgaggccgggaggaaccccaggtgcgtcgccgacggcaacgagctcctcaggttccactgcaccaccttcgcctgctccctcggcctcgccggcggcaccgccctctgctgcgcctcctcgtcgccgccgccgctgcactgcaagctctgcagcatcatcaaagacngattcag

SEQ ID NO: 13200 - DNA, 1239 bp, Oryza sativa
  Clone ID: TFbOSC900002j.C1.o28.hg
atggcgttctactcctcgtcttcttcctccagaagccaaccagtgtctgcagcagaaggcaagaatggtggcaagaaggagaagaggaggagcagcatcagcaggagcatcacgtgtgccggatcgatctgcagcaccaaggagagttcggtgtcgagcagggggagaggccggcgccgccggagcggcggcggcggcggcggcgatggcggcggcggagggagcacgtcgagcaggtcgctgatgggtcccgggtaccacggcgactccgcggcggctgtctccgcgtcgtcgtcgttcaactctgtgatgacggcggcgacatccgccaccgcgaccaccaccaccaccaccaccagctcgtcggcaacctcgccgccgtcggcgctgtcctcgccgctgtcatccatcggcggctcgttcagggcgatgcagatcaggaagctctccggctgctacctccactgccactcggtgctcgacccgcgcaccctcgccgccgtcgtcttctcctgccccgactgcgacgaggtgttcgtcaagcccgactccctcgagctccatagatcaaccagacacgcagtttcagagctcggggcggacgacacgagcaggaacatcgtggagatcatcttccagtcgagctggctgaagaagaacgcgccggtgtgcaggatcgagaggatactcaaggtgcagagctcggacaagaccatcaagaggttcgagcagcacaaggaggcggtgaaggagaaggcgaggagcgccggcgacgaggccgggaggaaccccaggtgcgtcgccgacggcaacgagctcctcaggttccactgcaccaccttcgcctgctccctcggcctcgccggcggcaccgccctctgctgcgcctcctcgtcgccgccgccgctgcactgcaagctctgcagcatcatcaaagacggattcagggtggatggcaatgggaggatcacgacgatggcgacgagcgggcgggcgcacgacacggcggaggtttcgccggacggcgagaagagggcgatgctggtgtgcagggtggtcgccggcagagtgaagaagctccacagcagcaattcttcagaggatcatgactgtgactctgctacattggataccagtggaataaaaactgagggccagaaagatcgcaacacaaaaatgtcagcaacgctcaatgatgatgaggccagcaagatcctcctctcaccagagcctgactaa

SEQ ID NO: 13201 - DNA, 597 bp, Oryza sativa
  Clone ID: TFbOSC400555j.C1.o31.fg
atggcgccggtgatgagctcgccggggcagcaggaggcggtggcgtcgcccacggcggcgccgaccgctgccaggccgtactacgggtgcgtgttctgcaagcgcggcttcaccacggcccaggcgctcggcgggcacatgaacatccaccgccgccaccgccaccgcgccatgccgtcgcggcggcccacggccaccggcacaacgtcgatggtgtcccgggacgacgtggactgctataaccagcaccgctacctggagtactctcctcctcctcctaccccggcgccaccgccggtgacatctccgccgatgagcagcagcttcgccgccacgtcctacgccggcggcacggcaacggtggccggagtggacggggaagccatgcgcgctgcaggtagcagtgatagccatatcagggagctgagcctgcttggtggcgcagactctagtactgatcgtgatcatgacttgcacctgcgcctcgggcgccatggccgcggcggcgacgggtcgccgcgcacgccagaaggctcgccggagaggaagccggacctggacttggagctcaggctcgggcgccgtcctcggcattga

SEQ ID NO: 13202 - DNA, 804 bp, Oryza sativa
  Clone ID: TFbOSC400851j.C1.o59.fg
atgagcatgacgagccccaggctaaagctcttcggcttcgacgtctccgaggaggagacggcggagcacgaggagcagtactcggctgagccggagagcgcgccggtctgcgggggcaacggtggcggcggaggcggcggctcggactcgtcctcgtcgtctactacgaccaccacgacggccacggccggcggcgacgggcggaggtacgagtgccagtactgctgccgcgagttcgccaactcgcaggcgctcggcggccaccagaacgcgcacaagaaggagcggcagcagctcaagcgggcgcagctgcaggcggcggccgcggccgccggccgtgtcgcgggcggcgccgccgcgctctacccgcgcgccaacccgatggtctccgccttcgctccgaccccccacctcctcggcggcggcgaggcggggcccaccagctgggtctacttctccccgcgcgccgccgcggtggccggcggggcgcaaggccagcagttccacgtgtcccacggctgcgtcttccccgcccgcggcgccggccctgccgccgtcgccgccgcctcgccggctgtgttctcgtacactccggcgacgtctgccgccgccgtcgccgcggcctcggcaccctacgtgacgacggacgagcaccacgggcggaggatccacgcgagctcggcggccagccttgcgagatatcccggtccggcgatggtggtggcggagccggtggccaccgtgccggaggacacctgcctggggcttgacctccagctcagccttgcgcccgccggcttgtga

SEQ ID NO: 13203 - DNA, 504 bp, Oryza sativa
  Clone ID: TFbOSC900255j.C1.o9.fg
atggatccctcatcggcttcttggccggctccggcttctccgccggtggagctgtccctgtccctgccggcggcggcggcgaggaaccgcgacgaggcggcgccgacggcgatcgtcgacggcaagcaagtgaggctgttcccgtgcctcttctgcgccaagacgttccgcaagtcgcaggcgctcggcggccaccagaacgcgcaccggaaggagcgcgtcgccggcggcagctggaaccccaacgtctacggcgacggcggcggatcagcgtccatgcccatcgcctcccatggcgtcacggcggcggggagtagtacggcagccgacggccggtggtgcggcggcgctgccagcgacgacgacacaacggcggcgcccatgccttccctcggctcaggctcggcggcgctcggcgccggcgccggtttcgcttcgaccgaaaggggctcttccggcggcggcgtcgccggcgaggagcttgtcctcgagctcggcctctag

SEQ ID NO: 13204 - DNA, 723 bp, Oryza sativa
  Clone ID: TFbOSC401400j.C1.o15.fg
atgaagagcagcagccaagaagcgggagaggaggtgtccgagatcagcagccaggcggcgtccaacaacaacgagacgtgcaactcctcctccggcaaggtcagcctcgacctgtcgctcaccgtcgccgccgccgccgcggcggctgcctccgccaccgagtcgagcaccacggacagcggcggcacgcggccggcggcgacggcgacggcgacggcgcgcgagccggcgcgggtgttcacgtgcaactactgccagaggaagttcttcagctcgcaggcgctgggcgggcaccagaacgcgcaccggcgggagcgcacgctggcccggcgcgccgtgcggctcgacgcgttcccctacggctacgccgacgtggcctcgctgccgctgtacggcgccggcctgtaccccatcggcatccaggcgcacgcgtcggtgcaccaccaccaccctggcgtggcggcgccggcggggcgcgccgagttgaggtcggcgcgcgcgctgctcggcccgatgccgttcttcgtgcaggcggcaggcgatgaggatgccagcttcgggtggccgggcagcttcaggccaccgcccaccgccgccaccaccatccccgccgccgccgccgccccggtcgccgtcaactccggctcctccaactccaaccacggcggcagcgtcgtcgtgcaggccgccgccgacgagcccgacctcacacttagactctag

SEQ ID NO: 13205 - DNA, 729 bp, Oryza sativa
  Clone ID: TFbOSC400758j.C1.o29.fg
atggcgggcgtggtgcagaccgtgcagtgcgaccagccgagcaagcagcagctgacggaggcggcggaggcagcggctgcggctgcggcggcggcgtcgctgaggatatttgggtacgaggtggggggtggtggtggaggaggaggcgtggcggcggcggcgggtgcaaggcgggaggcggcggacgtggtcgtcggggcggggaggaggttcgagtgccagtactgttgccgcgagttcgccaactcgcaggcgctgggcgggcaccagaacgcgcacaagaaggagcggcagcagctgaagcgggcgcgtctgcagctcgccgtcgccgccgcggggacgccggcgggcatgggcttcgcggcggcacaggcgccggcgccgccgccggggcacgtgatcgccgtagggcatcacgcggggtcggttgcctcctacgcgctgcccaggtgggtctacctcgcggcgcaccacctgcagcccccggcggtgggcctgccgttccacgccaccgttcaggcagcagccggcgcgtgccacggcggcggcgacgtcgagacgcggttgctcagcgtcgccgccgctgggcggggcagcagcactgcaggcagcagcgctcactcgtacgaggtgtgtgctcctgcggctccggcggatgacagcgacgaggaagcctcggcgatggggttggacctccatctcagcctagctccggcgagctcggcatga

SEQ ID NO: 13206 - DNA, 431 bp, Oryza sativa
  Clone ID: TFbOSC401716j.C1.o200.gp
gcggccgcggcggcgtcggctgcctcccgaggcatagccccgcgtcgtcggcgccggcgccgccgccgagcgcgtgctgctgctgctgcctcggccgcttgtggctggcgcggtggcccccgagcgcctggaacgtcgggaactgccggttgcacgtcttgcactcgaacacgcggtcgtgcgcgccgccgcgcaccaccaccggctgcgcgccggcggcgaagccgccgccgcccagcaggccgtgctggctctgctgcgcgaggagcatcagcacgcgggccgtgtccacgctgccgacgaactcctgcatgtcccacatgctcctgctcctcttgctcatggctatagctagcttaattagccacgtaattaattaacccagctgatcactaacgtcgccgatcgaaatctgtatatccgctgcactg

SEQ ID NO: 13207 - DNA, 567 bp, Oryza sativa
  Clone ID: TFbOSC409799j.C1.o26.gm
atgggggagggaaggtggccggctgcgacggaggccgtcggggcgaaggaggttgcggccggcgtcggcgacctggtggcggcgcccaacatggcgcggcggtgccccagcgccgatgaagacgacgatgcgggtgaggttaaaacgccgaacgacggtttaccagagaaggtggtggtggacatgtcgtcgccggcgagcggcggcggcgggcggcggctgttcccgtgcctcttctgcgagaagaagttcgtcaagtcgcaggcgctcggtgggcaccagaacgcgcacaggaaggagcgcggcgccgccgccgccgccggctgcctgaacccctacgtcttctacggcgccggcgccggcgccgcccccgccccggcgacgctgtcgttgttgctgcaggtggacaactcgtacaccaccaccagctacatcgacgaacacggccgagcagcagcgccgccgccgccgaattccgaccacttcttctggacgacggccggcgccgcctcacgtggtggcgccggcgccggcggcgaggtcgacctcgagctgaggctcttctga

SEQ ID NO: 13208 - DNA, 1365 bp, Oryza sativa
  Clone ID: TFbOSC100047j.C1.o3.fg
atggcgggcggtggcaggtgcagctcgctgctccgtggcttcgtgtcactcttcttcctcctgttcatccacattggccatgccggttgctgcttctcgacgggatcttccacgcagacgctggaggaagatgacactggacatggggccgacgggaggggcggcggtggcggcggcagcaagaggaggaagatatcgccgctcgcgttctccccgtcggtgtcgtcttctacggtggctgacgagaggtccagagccaggcggaggcaggtgtcgtctctagccaccagcgtccgcttctacctccaccgcatcttctcctactcgtccggagccaagaacggcgctggcgctccagccgcggaggaggaagacgaggcggtgacgacgaccgtgtcgtcgccgctcgcgcagtcgtcgtcgtgcctgcctcagcgccaggcctcgtcgtcggtggtgctgtccacgccgtcgtcgccatgcgcgtcgccgttcctgtccccgctctcgccgcagtctctcagcattactcctgcggtgccgtcgtcgccgcacaacaggcagatccctcaggcgaccaccaggcagtcgtcgttcaggtcgttcgccgcccgcggcgacgtgttcccgtgcaaggtgtgcggcgaggtgctgagcaagccgcagcagctggagctccaccaggcgatgaagcactccctctccgagctctccagcctcgactccagcatgaacatcatccgcatgatcttcctcgccgggtggaagccggccgttatgcccggcgccggcgagccaccgtcggtgcggcgcatcctcaggatccaccacaacccccgcgtgctcacccgcttcgaggagtaccgcgacctcgtccgcgcccgcgccgcccgccgatgcgcgggcgccggcgcggcggcggtggaggagcggtgcgtcgcggacggcaacgagcggctgcggttctactgctccaccatgctctgcaccctgggcgcgggcgtgtgcgggagcccctactgctgcacctgcagcatcctgcgccacgggttcgccgggaagcaggccgacgtggacggcatcgccacctactcctccggccgggccgcgcacgcctctctccccgacgacgtggagcgcgagttcgcgttcctccaggtgcgccgcgccatgctggtgtgccgcgtcgtggccgggcgcgtcggccgcggcgccgcggacgacaaggtggcctacgactccatggttccactactgccaacctcctccttcgctgcagctacccgtggcgacgacgacgtcgagctgctcgtgttcaacccccgtgccgtgctcccatgcttcgtcatcatctacagttgctag

SEQ ID NO: 13209 - DNA, 951 bp, Oryza sativa
  Clone ID: TFbOSC25771j.C1.o3.fg
atggcttctgagtgggactcaccatgccagttttgtggcaagaacttcaagagaagaggtgatctgctaaatcatgagttgacttgcaagtacatttcggatgtgcatccgcaaacagaatcttcaggagatgctcaggctcgcaaggatattttgggatttcatataccaaggcaaaagcgaacagttcccgcattcccagcttctgattatgctcagggtggcatcaatggtgcaacaaacgatgaaccagctgctagtaataatccagatcaggtgctgaagatgtgctctgacaagggttcatctcctgtggaatgttatggaggtgatgagaggagggtcggtgcgtgcgccattgcgggggtggaggaggatgatctcagcccaaatgttggttgtcgaggggtcaccgattgtgttgatgagtctaatgtgattcaaaagcaaaaaagacagcctgatcttagcgttgccgatctcagggaccttgttgagatgaaacagcaaaacatgaaggctgataccaatattcatgaccaaggacatccttctgtgatgcagatgcaaaaaaatgagcttagtcttgatctactgcctcacaagaacagttcagatcacgaggtaccaacccttagtgtcagctctatggatgatcccgatggcctggtttccactgatacaaactcagataaggagacggagactgtcaatgttggtattgatatcaatattcctgagcagagagaatcttcagtgacgcggatgcaaaacgagaagcttggtctcaatctgctgcctcgcaatgacagttcaggtcatgaggtaccaatcctcagtgttagctctaccgatgatctcaactccctgattcccactgatacaagctcagataaggatacaaactcaaatgtagcagacaggttaggccactgtcctgcacaagagtag

SEQ ID NO: 13210 - DNA, 1083 bp, Oryza sativa
  Clone ID: TFbOSC900043j.C1.o16.fg
atggcttctgagtgggactcaccatgccagttttgtggcaagaacttcaagagaagaggtgatctgctaaatcatgagttgacttgcaagtacatttcggatgtgcatccgcaaacagaatcttcaggagatgctcaggctcgcaaggatattttgggatttcatataccaaggcaaaagcgaacagttcccgcattcccagcttctgattatgctcagggtggcatcaatggtgcaacaagtgaagtgaaagtggattgggatcccgaagaagagactgatgttttagaggctctcttgcttctcagggagcaacctgcctatcctggagaagagacattttctgatgatgaaccgggtgctggtaatgtagacgatgaaccagctgctagtaataatccagatcaggtgctgaagatgtgctctgacaagggttcatctcctgtggaatgttatggaggtgatgagaggagggtcggtgcgtgcgccattgcgggggtggaggaggatgatctcagcccaaatgttggttgtcgaggggtcaccgattgtgttgatgagtctgatgtgattcaaaagcaaaaaaggaagcctgatcttagcgttgccgatctcagggaccttgttgagatgaaacagcaaaacatgaaggctgataccaatattcatgaccaaggacatccttctgtgatgcagatgcaaaaaaatgagcttagtcttgatctactgcctcacaagaacagttcagatcacgaggtaccaacccttagtgtcagctctatggatgatcccgatggcctggtttccactgatacaaactcagataaggagacggagactgtcaatgttggtattgatatcaatattcctgagcagagagaatcttcagtgacgcggatgcaaaacgagaagcttggtctcaatctgctgcctcgcaatgacagttcaggtcatgaggtaccaatcctcagtgttagctctaccgatgatctcaactccctgattcccactgatacaagctcagataaggatacaaactcaaatgtagcagacaggttaggccactgtcctgcacaagagtag

SEQ ID NO: 13211 - DNA, 528 bp, Oryza sativa
  Clone ID: TFbOSC413151j.C1.o3.fg
atggagtttgggatggtggaggacgcggcggcggcggcgggggaggaagggctgacgctgagcctgtcgctgcagccgtcgccgccgaggttccaggcgctcttctcctgctgctactgcccgaggaagttccggagctcgcaggcgctcggcggccaccagaacgcgcacaagctgcagcgcaacctcgccaggcggggccgcgaggccgccgcctctctcgccgccgccgccgccgcggcggccgcggcggccgcttcctcgggggatcagcagcagcaaggcaggacgacggcggcggcggcggcggtgcttgccggcggcgagagcgcgccgcctgctgctgctcgcgccgccgcggatctcgacggcgccggcgtgtggggaggagctgggatgaggggccggccggcgcaccaccaccgcctgatgcagggtggttactcttccggcggctcgtcggccgccggtggcaggggcaacggggagctcgccgacgagatgattgacctgtccctgaagctatga

SEQ ID NO: 13212 - DNA, 403 bp, Oryza sativa
  Clone ID: TFbOSC101188j.C1.o1.gm
atggcgagccgccacgtgtacccgcgcctcccctccccggccaatcgggaggcctcgtccctctgggatccacctcggcgagcgagcgagatggactccccgtcgcctatggcggcgcaggcggccgacctgtcgctgacgctggcgccgtcgggagggggtggtgggggaggaggaggcggcggcggtggtgggtcgtcgtcggcgtgcatcgacggcaaggacgtgcggctgttcccgtgcttgttctgcaacaagaagttcttgaagtcgcaggcgctgggcgggcaccagaacgcgcacaagaaggagcggagcatcgggtggaatccctacttctacatgccgccgacgccgcaccccgccggcaatgccgccgccgccgccgcggcggcgacgcccg

SEQ ID NO: 13213 - DNA, 633 bp, Oryza sativa
  Clone ID: TFbOSC22205j.C1.o1.fg
atggaggctcccccttctctttccatcgtcgacgaagacggcttcgtcatcgacctctcgctgacgctgggcctgacatcgcctccgccctctccaggcggcgcgtctccttccattcctccgggaagaggcggcggcggcggcacgagtggtggtgacaacaacagaggcagcagaggtggtggcaatggtggtggtggtggtggtgtgaggctcttcccttgcctcttctgcaacaagaagtttctcaagtcgcaggcgctagggggacaccagaatgcacacaagaaggagaggagcgtcgggtggaacacccacctctacctcccggccggcgtcgccgccgccacgacgacgacgacgacgacgacggcgatggccgtccctgacatggtcggcatgcccacccaccagatgtcctccatggcgttgcactcctgccggcctcaccagggctcccatgtcaccgccgccgacatcgccacgctggctgcgccgccacattacaccgtcgaccatggcgttgccggcatcgccagcggcggtggtgacagctcggtggggtggcgccaaaggcaaagggaggccggcggcgagaagcagaggcaggttgatctcaacctgaagctctag

SEQ ID NO: 13214 - DNA, 903 bp, Oryza sativa
  Clone ID: TFbOSC409246j.C1.o4.fg
atgagcgttgagcgagatgggcgcgaccagcccaacatcgactcgttctcgcagctgccgttcatccgccaggcggcccgcgagaagccgccgtcgtcgtcgtccggcggctccgtcgtcgtccctcctgcgcccatccggctgttcggcttcgacgtgccgccggacgcgtccaccaccgccgatgtgctaggagagaacaaggagagcgccgccgccgtcgtcgccgctgaggggagtaaacaaacggcgtccggtctggacgcaatcggcggcggcggcgggagccggaagttcgagtgccactactgctgccggaacttcccgacgtcgcaggcgctgggcgggcaccagaacgcgcacaagcgggagcggcagcgcgcgaagcacgcgcagttccagacggccatggccatgcaccacggccacggtcagtactacccgctcccggacccctacgcggcggcgttcgcggcgtaccccggccaccaccaccaccaccgtttcgccgccaccgccgccgccgccatgcctccgccgccgcactacccgtcgtgggctgcaggctccaggtactacagcggtccaggatccatctcgcagccgatcaacgggagcccggtggcgccggccgggatgtggcggctccctgccgccgccagctgcgtcggcttggcgacgacgacgactacggcggcgccgctgcccgcgcggcgccaagagcggccggcggcgacaattccttcgctgctcggaggcggcgaggagcccgtggtgctgggaggagctggctccacctcgttctcgccgtcgacgtcctcctcctcgtcgtcggcgtcgccgcacgagcggcgcgcgcagccagcgcgtaaagagaatgtgagtttggatctgagcttgtag

SEQ ID NO: 13215 - DNA, 840 bp, Oryza sativa
  Clone ID: TFbOSC900375j.C1.o18.fg
atggcgaagccgcaggacatgcgcagcgtcgactcgttctcgcagctgccgttcatccggccggcgccgccgccgcagcagcaggcgcgggacacaatccggctgttcggctgcgaattctccaacgacctgcagctgcggcccacggaggccggtgcaggctcccccgacgcggccaacggcagcacggtcacgtcagagggcagcaacggcggcgacggcggcaccaagaacggcggcgccgcgacggcggcggcggagcgcaagttcgagtgccactactgctgccgcaacttcccgacgtcgcaggcgctgggcggccaccagaacgcgcacaagagggagcggcagcacgccaagcgagctcacctccaggcctccctcgccatgcaccgctacatgccggggcacatgtacggcctcttcaactaccaccaccacatcggcggccgcttcgaccaccacccgccgccgccgccgccgccgccaccgccggcgcactacccgatgtggacgagcgccgccccgggcgccttcgccgggccaggttccatggcgcagcccatcaacggtagccccgtgcaggccgggctgtggagcgtgccgccgccgacggagaatttcggcagcacggccggcaggcagggcgctgacaagctggctactacggtggcgggcacgccggcggcgggggaggtggcatgcaaggacgagatggtgccgatgagcttgctgtcctcgtcgccttcgttgtcgtcgtgctcgtcgacgtcgccggagatgctaggtaggtgtgaattggggcagaaggagggtgtcagcttggacctccatttgtaa

SEQ ID NO: 13216 - DNA, 408 bp, Oryza sativa
  Clone ID: TFbOSC900062j.C1.o13.fg
atggaggtgaataggggggaggaggaagacgtgaacctggagctcaccctctgctacacctcggcctcctcgccggagcccatcggcttcttcctctgcatgtactgcgaccgcaagttctacagctcgcaggcgctcggcggccaccagaacgcgcacaagtacgagcgcagcctcgccaagcgccgccgcgagatcgccgccgcgctgcgcgcccacggcgcgccgccgccgccgcccgcgcccggtggcgccggcgcagctgcagctcagaaggcggtgggcgtggaggcgcagcagaagcaccagcacgctcccgtggtcggcggcttcgcgcgcggcggcggcaagagctcgccgccggccgccgagtacggcgacgggctggacttgtccctcaggctttga

SEQ ID NO: 13217 - DNA, 1998 bp, Oryza sativa
  Clone ID: TFbOSC400992j.C1.o60.gm
atggaggagtttgagctgcagcagcagccgtattacagcaagctgctcctgggtagcccgctggagatcgccaatgtcgacgacagtgatctgcagcttgtcgccggagttccctcggatccgccgcctgcgccgccgacggccgtgaagaagaagaagaagagaagccttccagggacaccagacccgagcgcggaggtggtggcgctgtcgccgcggacgctgctggcgacgaaccggttcgtgtgcgagatctgcggcaagggcttccagcgcgaccagaacctgcagctgcaccggcgaggccacaacctgccgtggaagctgcgccagcgcggcggcgctggcggcggcggcggcggcgagccgccgcggaagcgtgtgtacgtgtgcccggaggcgtcgtgcgtgcaccacagcccgagccgcgcgctgggcgacctcaccggcatcaagaagcacttctgccgcaagcacggcgagaagaagtggaagtgcgaccgctgcggcaagcgctacgccgtccactccgactggaaggcccactccaaggtctgcggcacccgcgagtacaagtgcgactgcggcaccgtcttctccaggcgcgacagcttcgtgacgcacagggcgttctgcgacgcgctggcgcaggagaacaacaagctcgcgcagccgatgaacatggcggcggtcacctccgctctgcagggccagcagcaggctcaccaccccgtcgccgacgacgatgacgccgcgggcgtcaagagcccgcacctcaagatgttccccgacgtcgacaacatcgtcgccgccgccacggccggaaacccgctcttgccgccgccgcttagcatggcgggatgcatgctgtccagcctcgccgcgccattgtcgtctccgttcctccccgggtgcaagcttggcgtggacgcggcgcgcgacgccgccatggtgttcccgccgccgccgccgccggccgggtcagcggcggcgatcatgtccgccacggcgctgctgcagaaggcggcggagctgggcgccacgacgtcgacgggctgctacggcggcgtcgcgttcccggccatgggcattgccggcggtctcgaccggcttcccgccataggccatcatctcgcgccgtacgacgacgtcgtcgtgccggcggcgctgcaggggcagacggcgacgcagctggtcgggttcgacctgggcgggctgttgcccggccagctctacggcggcggaggcggcgcgatgacgagggccatcgggtcgctgatgcacggcggcgaccagcacgccgccctggatcacagagcgtgctcgaagattcccagattccgaatggaagacggcgggaagcacttcgtgttcgtccatggcctcggccacggcgcgtggtgctggtacagggtggtcgccgcgctgcgcgccgcggggcaccgcgcgacggcgctcgacatggccgcggcgggcgcgcacccggcgcgcgccgacgaggtgggctccctcgaggagtactcgcgcccgctgctcgacgccgtggccgcagcggcgcccggcgagcggctggtgctcgtcgggcacagcctcggcggcctcagcctcgcgctcgccatggagaggttcccggacaaggtcgccgccgccgtgttcctcgccgcctgcatgccggccgccggcaagcacatgggcatcacgctcgaagaggatctgacgctggcgacgatgctggtgaggcctggcaccaactacatcgatgatccgatcatgaaggacgagacgctgctcactgaaggcaactacgggtcggtgaagagggtgttcttggtcgccatggatgatgcttcgagcgacgaggagatgcagcggtggaccattgatctgagcccaggcgtggaagtcgaggagctcgccggagcggatcacatggcaatgtgctccaagccgagggagctgtgtgatttgctgctcaggattgcagctaagtatgactaa

SEQ ID NO: 13218 - DNA, 1380 bp, Oryza sativa
  Clone ID: TFbOSC401656j.C1.o8.fg
atgtcggtgggtgcagatccggaggcggaggtgatcgcgctgtcgccgaggacgctgatggcgacgaacaggttcgtgtgcgagatatgcgggaaggggttccagcgagaccagaacctgcagctgcaccggcgagggcacaacctgccgtggaagctgcggcagcggagcgggaaggagccgaggaagcgggtgtacgtgtgcccggagaagagctgcgtccaccacaacccgtcgcgcgcgctcggcgacctcaccgggatcaagaagcacttctgccgcaagcacggcgagaagaagtggaagtgcgacaagtgctccaagcgctatgccgtccagtccgactggaaggcccactccaagacctgcggcacccgcgagtatcgctgcgactgcggcaccctcttctccaggagggacagcttcatcacgcaccgcgcgttctgcgacgcgctggcggaggagacggcgaggctgaacgcggcgtccggggccgccgcggcggcggcggcggccacggccacgtcgctgtgcgggcagagctacctgttcgccgggtcgggtgggccggggatggcgggcatgcggccaaacatgatgatgccgccggcggcggcggcggctggagggcagctcagggcgggtcagatgctcggtccggcggcggggggcgtcggtggggacctgtgcgacggcggcgtggcgcggcacggcgggctgtcgctgtggggtggcgaggcgttgccgtccatgggccacattggcgtcctggccagcggtggcgcggcgacagtgccgccgcagctgtacgtggatctcttcgcgccgagctccggcgcgccgccgccgcagttcgacgcggcgcagctgagctggctgtacgggaacggcaagctctcgtcgtcgaatgccagcgagctgacgagcgccacggcggcggcgaaggaggcggagagcgtgccgtccgtgttcagcaaccagcagcacgcgaagcccgcggcgcccaccgacatgtccgcgacggctctgctgcagaaggccgcgcagatcggcgccgtgacatccaccgccgcgatgcccctagtgtccccgttcgagccgaccaagcccggcggcgccaccgcctcaccggccgacgagtgcggcaagttcgacggtgcagccctattcgccgccgcgagccatcacaatgccaacctcggcggcgcaatgagcgagctcacgggggccgccggcaacgtgccttacgacgtcttgtcggcggtgcgccaccatgccggcctgaaggacgccggcggcgtcgggagagaggaaactagggatttcttgggcgttggcgtgcaagcactgtgctcgtcgtcgatacatgggtggatttaa

SEQ ID NO: 13219 - DNA, 621 bp, Oryza sativa
  Clone ID: TFbOSC420432j.C1.o6.fg
atgagcaagcggcagtttggagagatggacggcggcatcgacacggcccgcgtcctcatgctcctctcccggcggcggcggcagcacggcgacgtcgggcacgcgcgcgcggcccgcgtgttcgagtgcaggacgtgcgggaggcggttcccgacgttccaggcgctgggcggccaccgcgccagccacaagcgcccgcgccacggcgccgagcgcgcgccgcggccagcaggcgacgacgacgtcggcgccggcgccggcgccgcgctccgcctcgtcggcgcggcgtcgtcgttgtcgacggacgaggcgcgcgcgggaggcggcggccgcaggacgaggggcgccggcgccgcgcacgggtgccccgtctgcgggctggagttcgccgtcgggcaggcgctcggcgggcacatgcggcggcaccgcgccgccgccggcgacgtcgcggcgccgcgtgtgaagaccgacgacgttgtcgttggagacgagtgcaccggcgggatttgcttggacctgaacctgacgccgtcggagaactgcgacaagtgccggcacgcccagctcggcgtcgccgtgaactctgtgcaaagaacgatactactggaccgtcccctttga

SEQ ID NO: 13220 - DNA, 1761 bp, Oryza sativa
  Clone ID: TFbOSC414116j.C1.o1.fg
atgacttatataccggtcagagatgggttatctgtgacgggtgtttcatccgtcacagagctggagagattggctaggttggaggaggaaggggaattcttggttgtaagggaagaggtgggagtggtcaccggcggtgcgcgcgcggaggcggacatcatgctgagttcttgcgcgccgacggccgtgccgccgcaggatgcgtccggtgcggcgacggagccgttccggtctctgcagatcgccaccgccggtgccgccgcgaagaagaagcggcggccagccgggacacctgacccggacgcggaggtggtgtcgctgtcgccgaggacgctgctggagtctgaccggtacgtgtgcgagatctgcaaccaggggttccagcgcgaccagaacctgcagatgcaccggcggcggcacaaggtgccgtggaagctgctgaagcgggaggccggcgaggcggcgcggaagcgggtgttcgtgtgcccggagccgacgtgcctccaccacgacccctcccacgcgctcggcgacctcgtcggcatcaagaagcacttccgccgcaagcacagcggccaccgccagtgggcgtgctcccgctgctccaaggcctacgccgtccactccgactacaaggctcacctcaagacctgcggcacccgcggccacacctgcgactgcggccgcgtcttctccagggtggagagcttcatcgagcaccaggacgcgtgcaacgccggcaggccacgcgccgccgaggcgtcatcgtccccgggacgcggcggtggcgtcgtggttggtgcgccggcggcagcatcgtcgtctcagcagcagcagctttttgcggtgccggcttcgttgtcgcggacggcgtccagcgccagcccgtcgagcgacctggtggtgagcccggtggcctggcctgctactggtggtggtggtccggcaatggtgagtccccgtgctgcggcgccggctcctgctggcggtagcatcgcggcgttccaccaccggttcactgacccggcgctgtcgccaccgacgccgtgtggtggccggcgaggaggatgccacactacccacagcctggagctgcagctcatgccaccgcgcaccaccaccacctgcgcaggcggcagcctcggtggtactccagttgccaccgccgttgggtactacgcttcctcttcgccgcattcgcctgctgctgctcttccgtcgcggcagccggtcgccgacgcaatgcggctgcagctctcgatcgggttcggcggcgcacgcgatgatggcaacaacaacagcagcagcagcagcggcgaggtgtcggcctcggcgacgaggctgaaggaggccgcccacgagcagctgcgtctggcgatggccgagaaggcggccgcggacgaggcgcgcgcgcaggcgaagcggcaggcggagctcgccgaccaggagctggcgaccgcgcggcggatgcggtaccaggcgcaggtggagctcagccgcgcgcacgtgctccgcgaccacgccatacgccaggtcgacgccacgcagctgcagatcacctgctacagctgcagccacaagttccgggcgagagcggccgccatgatcagctccgacgtcgccagctacgtctcgtccgtcgtcaccgagggcggcgacgccgaggtcgacaacgacggcaacttgcaccgccgccgcctcaacgctgacgatggcatgccaaggggccattctaggacgatggcaatggacctcaactag

SEQ ID NO: 13221 - DNA, 915 bp, Oryza sativa
  Clone ID: TFbOSC101118j.C1.o4.fg
atggcgcagcagcactcgccgcctccacctcctgccccgccgtcacctccgcccgcgctgccgtgtgatccgatgccgccgccgccgcgccatgacgacaccacgctcacgctgtcgctcgcgccgcccgccgccgctcgcccgctgcaggccatggtggcgcgggccaagtgctcgtcgccgaccggggacgcgccgccgtgcaccgagtgcggcaggcagttcctctcgtggaaggcgctgttcggccacatgcgctgccaccccgagcgccactggcgcgggatcacgccccctggcggtggcggcgcaggcgcggcgtcgtctaccgccgccagccagttcacgctcagggagcgcgaggtcgccgccagcctcctcatgctgtccggcgctcaccccgcccgctccggcgccggcaagggcaagggcaagaagcgccttctcgcccccgccgccgccgctgctcctcatcattccccggcaacctgcgccgaccacaagtgcgccgtctgccaccgcgggttcgccaccggccaggcgctcggcggccacaagcggtgccactggccggatcgttcctgtgccgatcaggcgatatcgatgctcgccgtctccaccgccggcagcagtagtaccactaccacgtcggcatcacctccgccggcgccggcgaccgccgccaccgcgctggacctcaacctgaacctgccgcctccattggcgctttggtgtatattgcttttgctagatttgtgtttgttaaattccattcgaggcataagcggctctctggaatggaaatctctgcaagttcttagctttggttacgtgtgcctggttcagataagagcgtttctaatcgttctgaacacagagataggtgtgctgattgatcagaagagcgctttctaa

SEQ ID NO: 13222 - DNA, 1596 bp, Oryza sativa
  Clone ID: TFbOSC401442j.C1.o12.fg
atggcagccgcctcgtctgcacactacttcggtctcggcgagccgcagatgcagcagcagcagcagcagcctcccctgcagaacaacgcggctgctccggtcgcggccacgccgccgcccaagaagaagaggaatcagcccgggaatccaagcaagttcgtgtgcgaggtgtgcaacaaggggttccagagggagcagaacctgcagctgcaccggcgagggcacaacctgccatggaagctgaagcagaagaaccccaaggagacgcggcggcgggtgtacctgtgcccggagccgtcctgcgtccaccacgacccgtcgcgagccctcggcgacctcaccggcatcaagaagcactactcccgcaagcacggcgagaagaagtggaagtgcgacaagtgcaacaagcgctacgccgtccagtccgactggaaggctcactccaagacctgcggcacccgcgagtaccgctgcgactgcggcaccctcttctccaggagggacagcttcatcacccaccgcgccttctgcgacgcgctggcgcaggagagcggcaggattatgccacccatgggcgccgccctgtacgccgccgccggcgccggcatggccatcggcggcctcaccggcatggccgcctcccaccagctccaaccgttccaggaccactcctccgccatcaccaccgccgccaacgccgccgcgcagttcgaccacctcatggccacgtcgtccgccgcggccggctcccctgcgttccgcgccgcgcagccgacgtcgtcgtcctcctcgccgttctacctcggcggcggcggcgacgacggacaggcccacacctcgctgctccacggcaagccggcgttccacggcctaatgcagctgccggagcagcaggggagcaatggcggcggcctccttaacctgagctacttctccggcgggaacggcggccaccaccaccaccaccaggagggacgactcgtcttcccggatcagttcaacggcgtcgccgccgggaacggcgcccgcgccggcagcggcgagcacggcaacagcggtaacaacgccgactcggggagcatcttctccgggaacatgatgggcggcggcggcggcttctcgtccttgtacagctcgtccgaccagaccgtcccgccgccgcagatgtcggcgacggcgcttctccagaaggccgcacagatgggcgcgacgacgagcagcggcggcgccggcagcgtgaactcgctactcagaggtctcggaagcggcggcggcggcggcgctctgaacggtaagcccgccggagcagccgggttcatcatgtccggggagagctcgtcgaggagcactgcttctcagacggcggagaacgagagccagctccgggagctgatgatgaacacgctctcggcgaccgggggcggcaccggcgccggaacggtgttcgtcggcggcggcttccccggcgtggacgacggcaagctgagcacgagggacttcctcggcgtgagcggcggcgcgccggggcttcaactgcggcacggcggcgccgccgggatgggcatggccggctcactggaccaagagatgaagtaa

SEQ ID NO: 13223 - DNA, 4050 bp, Oryza sativa
  Clone ID: TFbOSC422884j.C1.o2.fg
atgtcgctgcagccgccggcggtggagccgccggagtggctgcggacgctgcccgtggcgccggagtaccacccgacgctggcggagttcgccgaccccatcgcctacatcctcaggatcgagccggaggcgtcccgctacggcatctgcaagatcgtgcccccgctcccgcggccccccgaggacgacaccttccgccgcctccaggccgccttcgccgccgcggcctcctccaatggcgacccctccccgaccttccccacgcggctccagcaggtcggcctctccgccaggaaccgccgcgccgccagccgccgggtgtgggagagcggggagcgctacaccctggaggcgttccgcgccaaggcggccgagttcgagcccccgaggcacgccgcgccgcccaggaaccccacccacctccagctcgaggccctcttctgggccgcctgcgcctccaggcccttcagcgtcgagtacggcaacgacatgcccggctccggcttcgcctcccccgacgagctccccgacgccgccaatgccaccgacgtcggggagacggagtggaacatgcgggtggcgccccgcgcccgggggtcgctgctccgcgccatggcccgcgacgtggcgggcgtcaccaccccgatgctgtacgtggccatgctctacagctggttcgcctggcacgtggaggaccacgagctccacagcctcaacttcctccacttcggcaaggccaagacctggtacggcgtcccccgcgacgccatgctcgccttcgaggagacggtgcgcgtccacggctacgccgacgacctcaacgccatcagagtggcctttcaaacgttaaatgagaagacaactgtcttatctcctgaggtgcttctttctgctggtgttccctgctgcagattggttcaaaaagcgggagaatttgttatcacattccctggagcttatcattcaggctttagccatggatttaattgtggggaagcatcaaatattgcaactccccattggttacaagtggctaaagaagctgcaatccggagggcttcaactaattgtggtccgatggtgtctcattatcagctgctttatgagctagcactctcattgcgtccaagggagcctaagaatttctattctgttccaagaagctcacgtttaagggacaagaataagaatgaaggtgatataatggtcaaagaaaattttgttggaagtgtaaccgaaaacaacaatttgcttagcgcccttctggataagaattcttgtataattgttccaaacgctgatttcttcgttccatcctttcctgttgcactggaatctgaagttactgttaaacaaaggtttacagctggtccctgcagtattagccagcaaggagcagaaaatatggctgctgatcatgtggctgtagacaaggttacagagattcaggacatgagtggatccttatatccttgtgaaaccagtcttgtgggctgtagcaatagaaaactttatgaaacaaaatatggccaacgggatgctgctgctttgtgcttatctacttcagagattcagagcagaggaattgatacagcaagatcacatccagcaggcgggatcttagatcaaggacggttgccatgtgtacagtgcggaatactaagctttgcatgtgtagccatcattcaacctagagaagcagcagtacagtttatcatgtctaaagagtgcatctcatcgagtgcaaaacaaggaggaattggtgcatctgatgatacctcaaactggattgaccagagtcatgagattagtcctccaccaggtccagcatctggaacagatgataatgtaaagcatgccgtaagtttggcccatgtctctgatcggtgtagagaactatatgccagcaatacagatggatgcacctctgctcttgggcttctagcttctgcatatgactcatcagactctgatgatgaaacaactgaggatgtttcaaaacatagcaagaaaaatgattcagtaaaccaaagcacggatcctcaaatcttggaaacatcagctagctgttccagtacagttcagtgtcaaaagacaaattcacacttgcatgaagaggaatgtgaggcaagagccacatcattgatgaaacctgtaagccataatagtaggcccattagtcagtctaacagggatacagatatcgaccattttatagaactgggaaagtcaggaacacagtgttcaggttatcttgatttggttgatgatctaactacatcagttttaaaatcctcttcagatacttgtgtaagtgcagctaaagcctcaatggatccagatgttttgaccatgctcagagaaaaaaaaacatgtgtttacaactacatgagcaactacaccaagggcataaactgcaaataccctagagcagagtcagcagcaaaagtcatagcagaagaacttggtatcaagcatgattggaaagatatcactttcaaagaagcaactgaagaggacgttaaaaagattcagttggctttacaggatgaagatgctgaacccactggcagtgactgggcagtcaaaatgggtatcaacatatattacagtgccaaacagagcaaatcaccactttacagcaagcagataccatacaattccatcatttataaggcatttggccaagaaaacccagacagtttgacagattatggatgtcaaaagtcaggctcaacaaagaaaaaggtggctgggtggtggtgtgggaaagtttggatgtcaaatcaagttcatccacttctagctcgtgagcgtgaagaacagaacagtagcgtagtgtacggcaaagcaatgttcactactatttcccatggcaaagtacaagatgaagcgtcaacaagatgcaatacaagcaaccgaaccccatcaagaagaacatcaagaagaaaaaagggggtatctgctgagaaatctaaaccaaaaaacaagagatccactgcttctgatgaagctagtatgctttgcagtggccttggaatgaactctggagttatccatgaccaaactgaaaactctgatgattatgacaaacatggcaatggagatgaaattgaggaaggaacaaatcctcagaaatatcaacaacgtaaattgcaaaacgtgaccaggaaatcaagttctaagaagcggaaggatgagaaaagaacagatagttttcatgaactatatgacgaggataatggtgtggattattggcttaacatgggtagtggagatgatgccacactaggtaactctcgacaacaaagtcctgatccagtgaaagtgaaatctggaggcaaattgcaaggtaagagaaaatctagcaagtacaagtccaatgatgatttgttgaatgaagaaaataagttacaaaagatgaacaaaaaatcaagctctaagaagcaaaagaatgataagataaatagacaacttcaagaagatcaaaccgaagatgaccatatggaccacttagttgacgtagcggttgcagatgaagtcacactagacaatgaggataaaattacagaagacaaaattgatgacgtgaaagtgaaatctagaggaaaatcgcaaaatggtaagagaaaaggcagcaaacatcaggctaccgatggtttgcgcgctggaaataaagtggccaaatttccgtgtgatatagaaggatgtgacatgagcttcagtacccagcaggacttgttattgcataagcgtgacatttgtcctgtcaaaggatgcaagaagaagttcttctgccacaagtacttgcttcagcaccggaaggtgcatatagatgaaaggccacttaagtgtacatggaaggggtgtaagaaggcattcaagtggccatgggcgaggacggagcacatgagagtccatacgggggtaagaccttacgagtgccaggaacctggctgtggtcagacattccgattcgtttcagatttcagccgccacaagagaaagactggccattcctctgataagagaagaaagaacagtacataa

SEQ ID NO: 13224 - DNA, 1416 bp, Oryza sativa
  Clone ID: TFbOSC900043j.C1.o14.fg
atgcggtttttggttctttggtgttcgcgtctctgttcttggttggttggtttggtgctgttcgtggctaatttctcggtgttgcttccggtttcggttgagttttgcttcctctcgagtgaggatttgagtgttttgcaagctgaagaaacaatagccgagttcatgtttgctttatcttacaatgttcatagaatatccagtttggccactgtagaaacgattgagtcgtcatctttccctgagcaacccggagtgccccacctattctgcttcctcttctccacacggatcgtcgagacaagaagcaagaagcatccagatatggcaccaagaggaaagccttggaagcattgttgcaacaagtgcgacaagagcttccgttcagggaatgctcttggaggccacatgtcctgccacaggagtgttggtaatcagccaaagagcacgtcaagcccacccactgttgttgatctgcacatgccactgctgagttcctgtgatgataatcttttgcttttgcccccagaaacacaatgccagatgtgctcaaaggtgttctccacctccggatcgctgagggagcacatgatgatgcacggtggggagaaggtggtggtcaaggctgaggaagaagctgccgggctgattgaagcactgggcattgctgatagcatgcaagatgtaatggtgttttcttcagtgaagcgtaagcgatcattccgatcaaagaggcagacaccagcactcagtttggaggagatagaggctgcagatgctctcctactgctttcagggtgctttgacaagacttcagcttatgaggattgctatctgggagatatagaagacagtagcttgagatccattgtgctgacagaggttaacatgaatgccgtggatcgttgttcggttcgatctgttggctccaaggagccaataaatgataataactcaggttacaaggattgctatggacaaagtgacaaggaaaactgtttgatcgttcccaaggaggagatggatccaaatgattttgatcatgagctggttagagatgctgctctcaggaaaccaagaaccgacaattcagatgaggagatgaagtttggtgatcttccagctgctgctatgaaggacaacagccaccgttgcaatacctgcggaaagtcatttggatcagggcaggcactgggaggccacatgcgacgtcattatgttcggaagtgcaatcgtcaacggggggttgctgaccacgctggttctgttcttatgaaagtgcaaaagctgaagcttagattggaccccatcttgtttgatgtcacacttccagctctcactgatggagactgctgcatttctgtgggtgtgaagcctgaacctcagctgtggtgtgtcacgagcaatcttcagtga

SEQ ID NO: 13225 - DNA, 699 bp, Oryza sativa
  Clone ID: TFbOSC100181j.C1.o3.fg
atgaagtgtagtggcatcttccaaggcggccaccatctcagcaatacaaccgctactgctaaaaactacgcactggaccacatgatggtgagctcggtgtccgacgccacgtcggaggaggacgtagcgctgtccctcatgatgctctcccgcgacacctggccagccacgccgccgccgccgccgccctaccgtctccgcggcgcaggctacgacgacgggagcgacgggggcgacgcacctccggctccggccgcagcggccgcgcagaagcggacgcggttccagtgccccgcatgcaagaaggtgttccgatcgtaccaggccctcggcggccatcgcgctagccacatgcgcggcggcaggggcggctgctgcgcgcctccgcctaaccctcctccttctcccgctacgcctctccagccattgccggagtgcgacggcggcgaggaggagggcgcgaagccgcatccgcacgagtgcccctactgcttccgcgtgttcgcgtccggccaagctctgggcggccacaagcggtcccagctgtgctcagccgcggcggcggccgcatcgggcgacgatattccagccatgattaaaagcaacggcttcattgatctgaacctcccggcgccgttcgacgacgtggagctctccgccgtttcagatcctttcctctcctcgaagccaggttcttga

SEQ ID NO: 13226 - DNA, 745 bp, Oryza sativa
  Clone ID: TFbOSC400958j.C1.o2.np
gaagccacgagccaaaccctcacgttggaggagtcggagccccaggcgtcgcctcgtccggtccccccatgcaactgccccaaatccctcggcggcggcgccagatccgccgccgccgccgccgtggtcgtcgtcgtggtcgtcgtcgccgccagatccgccgccaccggtgctctctgccgccgagctcgcgccggagaggggaggggagcagccggtgagctccccgccaccagatccgcccgcggcgcctgaggagctccgcttccggtgcaccgtctgcgggaaggccttcgcctcgtaccaggcgctcggcggacacaagtccagccaccggaagccgccttccccgggagaccactacggcgccgccgccgcggcgcagcagctggcatccgctggtgactcgaaggaggactcggcgtcgtcagcggccgggagcactggcccgcaccggtgcaccatctgcaggaggagcttcgcgacggggcaggcgctcggcggccacaagcgctgccactactgggacggcacgtcggtgtccgtctccgtctcggcgtccgcgtcggccgcctcgtcggccgtcacggcttcggcgtcaggttccgggtcgtcgagcgtgaggaactttgacctcaacctgaaaccggtgccggagacggtggccgctggcgtcagaaggtggggagaggaggaggaggtgcagagccctttgccgttcaagaagcgccggctgtcaagccca

SEQ ID NO: 13227 - DNA, 1677 bp, Oryza sativa
  Clone ID: TFbOSC101382j.C1.o4.fg
atgcagccgtcgccgtcatcacctcgggcaccgccgccgacggcggcgcaggcgtcggggtacaagcacttctgcagagtctgcaacaaggggttcacgtgcggaagcgccctaggcgggcacatgagggcccacggcgtcggcgacggcgatgggttgggtgccgatgatgacgacgacgacgacgacgattcgctcggcgatgaggccgtgcggcgtgcgcgcggcggggcagatgatccttggaacgcgggcggcccgtcgtcgtcaggggcagcgacacacgtctacgagctccgcaccaatcctaaccgggtcacgaggagccgccaggtgtgcaagaactgcgggaaggagttcacgtcgtgggagcatttcctcgagcacggcaagtgcagctccggcgaggacgacgacgacgaggacgacgtggatcactcgctgcaaccgtggtcgccttcgcccgaggccgacggcgaagaggattctgcaccggccgccggttggttgaaagggaagcgctcgcgtcgctgcaagggcacaggagtcgatttgtcaccgacaccctcagcgtgcgctgccggcgaggaggaggacctggccaattgcctggtcatgctctcgtcgtccaaggtagatcaggcaggcgtcactgaagcagaacaacggtcatcttcttccgcgagtaaggaacataagagactgatcacgttcatggagccgacgacgtatgtactggatacagtgatggcgcttcccccgccggcgccggcgccacagtatgtctcgaccgtgcctcgaggcatgttcgagtgcaaggcgtgcaagaaggttttctcttctcaccaagctctcggcgggcaccgtgccagccacaagaaggtgaagggctgcttcgctgccaagctggagagcaacgccgcagaggtggctgagccatcacaccatgcagaggtcgctgatcggagcgaggacaatcccgccaaggccacttctgatgccaggaggaacgtgcacgcaagcatcgacggtgatggaaacgccggcacgagcgatgccgcggcagaactgtcgatggccatcgtgcccatagaaccgccggtcgccgcgctcgccgctgcaccgttgaagaagaagggcaagatgcacgaatgctcggtctgccatcgactgttcacctccgggcaggcgcttggaggccacaaacggtgccactggctgacgtcaagttcggcggatcacaccgcctcagtcccacccctagccgacgaccttgtcccgctctcgttccggccaatgttggacgcaccggagcccgctctcgacctcagcatcgcggcgaacccgccactgctggcctcggccgcaacagtccgtccgaaggtcggcggcagctcgtttcatctcgacgcgccaccaccggtatacatcccatcgtcgccggcgatacccagccaacggaacaaggctaccgcgacaaccggcagccagaacgccaacgacgcggtcgggttaagcaccgccgcagcagaggacgaggcggacagcaccaccgtcaagagagcgaggcttagcgatctcaaggacgtgagcatggcaggggagacgacaccgtggctgcaagtcggcattggctcctcgtctcgcgggggtgctgatgataacgacaaggagtga

SEQ ID NO: 13228 - DNA, 2181 bp, Oryza sativa
  Clone ID: TFbOSC400149j.C1.o10.gm
atggcgatggtcgtcgcggggagccatcggccgccgccgccgccgcagtcgctgcggctggtcccgccaccgccgccgcagcctcctcctcctcctctgacgtacaggcaccactgcaaggtgtgcaagaaggggttcatgtgcggtcgcgcgctcggcggccacatgagggcgcacggcatcggcgacgacaacgacacgatggacgacgacgacggccgcgatgatgatcattcgctgtcaccgtgcgatggtggtggcgagccgtcggaggcagccgggagcccgacgacgacgacgacgaaacgtatgtacgcgctgcggaccaatcccgggcggccaaggaactgcaggacatgcgagaactgcgggaaggagttcacgtcgtggaagacgttgctggatcatggcaggtgcggccttgacgaggaggacggtcgcctcgacgtctcgctccgttcgccgccgcttcacgacggtggcgacgaaaacgacggcgaggaggaggaggagggggacgacctcacactggctgcgggcgggtggtcgaaagggaagcgctcgcgccgtgctaaagtgatggccgtcgggaccggctccgtgtccgagctacagctgccggctccgtctaccgaagaggaagacctcgccaactttctcgtgatgctctcttcttcttcgtcatcatcgtcgcgtgttgcacagccagccatcgtcgtcgacgacgcggaccaagagtcctgcgcatcaggtagcaaggacgaggagaggaacaggttcttggtgccgcagccaatctcgatggcagcccccatgatggctcagatgacagtgatcgctccgcaagtggtgccacagcacatctcgaccgtgccacgtggcatgttcgagtgcaaggcatgcaagaaggtgtttacatcgcaccaggctcttggcgggcaccgtgccagccacaagaaggtgaaaggatgcttcgccgcgaagctcgagagcagccgcaacgagactagtcagactcagactcagcagcaacacgtctcagccgctcctcatgacaataccagggccaccacctctcatgtcatcaccagcgatatcagcatggatgcaaacacgatcggtgccagtgctgatgctgacggcaaggcagcggcaagcggcgttggcgcaggtgaaattgtcctcgccggagcttcgtcgacggatatggccatgatgatgtcggtcgaggacttcgcgccgacaccgttggcgccatccgccgtctcaccgttcaagaagaaggggaaggtgcacgagtgctccatctgccaccgggtgttcacgtcggggcaagcgctcggcggccacaagcgatgccactggctgacgtcgggcgcaacggacccgctcacgaagctccagcccgtcgcccaagaccacgccatgatggccgccatgtgccaccagctcacgctcgggcgcccaatattcgaccctaccgaccagcggatactagaccttaacgtgccgacgaacccactggcagaagcggtcgcggccaggcagcagcagcagcagcaggtcgccgctctcaacgacggcgcactctgcctcaacgcggcggcgtcggtgtacctgcagtcctggacagggcacagcaacgggagccacgtgaacaagaccaccgcgacgagcagccgcatcaacgacgcggccggcggcgtgaccacggaggacgatgaagcggacagcacgagcgccaagagagccaagatcggcgacctcaaggacatgaaagtggcaggggagtcgttgccctggctgcaggatcaaactgactggcacgcccgcatctcatcaatctttgtacctgcacaggagctaagcagatctcctaggccggagcaaactgactggcacgcccgcatctcatcaatctttggtcctgcacaggagctaagcagatctcctaggccgcgctactggatgactgatcttctccagaagcgtggcatcgatagtcacccggtctgttccttttgtgctcaggagcttgagatgacgaaccacattctgctcgactgcgtgttcgcttggcaagtctggctccgtgtgctgtcgtcttctggttgggctgccctctctccaccctgtggggttctagagtcatcctctcagaaggccatctatggtcgttag

SEQ ID NO: 13229 - DNA, 1803 bp, Oryza sativa
  Clone ID: TFbOSC4083j.C1.o1.fg
atggcgatggtcgtcgcggggagccatcggccgccgccgccgccgcagtcgctgcggctggtcccgccaccgccgccgcagcctcctcctcctcctctgacgtacaggcaccactgcaaggtgtgcaagaaggggttcatgtgcggtcgcgcgctcggcggccacatgagggcgcacggcatcggcgacgacaacgacacgatggacgacgacgacggccgcgatgatgatcattcgctgtcaccgtgcgatggtggtggcgagccgtcggaggcagccgggagcccgacgacgacgacgacgaaacgtatgtacgcgctgcggaccaatcccgggcggccaaggaactgcaggacatgcgagaactgcgggaaggagttcacgtcgtggaagacgttgctggatcatggcaggtgcggccttgacgaggaggacggtcgcctcgacgtctcgctccgttcgccgccgcttcacgacggtggcgacgaaaacgacggcgaggaggaggaggagggggacgacctcacactggctgcgggcgggtggtcgaaagggaagcgctcgcgccgtgctaaagtgatggccgtcgggaccggctccgtgtccgagctacagctgccggctccgtctaccgaagaggaagacctcgccaactttctcgtgatgctctcttcttcttcgtcatcatcgtcgcgtgttgcacagccagccatcgtcgtcgacgacgcggaccaagagtcctgcgcatcagcccccatgatggctcagatgacagtgatcgctccgcaagtggtgccacagcacatctcgaccgtgccacgtggcatgttcgagtgcaaggcatgcaagaaggtgtttacatcgcaccaggctcttggcgggcaccgtgccagccacaagaaggtgaaaggatgcttcgccgcgaagctcgagagcagccgcaacgagactagtcagactcagactcagcagcaacacgtctcagccgctcctcatgacaataccagggccaccacctctcatgtcatcaccagcgatatcagcatggatgcaaacacgatcggtgccagtgctgatgctgacggcaaggcagcggcaagcggcgttggcgcaggtgaaattgtcctcgccggagcttcgtcgacggatatggccatgatgatgtcggtcgaggacttcgcgccgacaccgttggcgccatccgccgtctcaccgttcaagaagaaggggaaggtgcacgagtgctccatctgccaccgggtgttcacgtcggggcaagcgctcggcggccacaagcgatgccactggctgacgtcgggcgcaacggacccgctcacgaagctccagcccgtcgcccaagaccacgccatgatggccgccatgtgccaccagctcacgctcgggcgcccaatattcgaccctaccgaccagcggatactagaccttaacgtgccgacgaacccactggcagaagcggtcgcggccaggcagcagcagcagcagcaggtcgccgctctcaacgacggcgcactctgcctcaacgcggcggcgtcggtgtacctgcagtcctggacagggcacagcaacgggagccacgtgaacaagaccaccgcgacgagcagccgcatcaacgacgcggccggcggcgtgaccacggaggacgatgaagcggacagcacgagcgccaagagagccaagatcggcgacctcaaggacatgaaagtggcaggggagtcgttgccctggctgcaggttggcatcggaatttcatcagagagcaaagaaaagaacactcaagagtga

SEQ ID NO: 13230 - DNA, 1026 bp, Oryza sativa
  Clone ID: TFbOSC408704j.C1.o4.gm
atgaccaagcatccgagggacggcgaggtgatcagcctctcgctgtcgctcacgctcggcgctgccgcggatagcggcgagcggaagaagccgcggcgcgggtcgtcgccggcggcgtccgggagtggggacttcgtctgcaagacgtgcagccgcgcgttcccgtcgttccaggcgctgggcggccaccggaccagccacctgcgcggccgccacgggctcgcgctcggcctcgccgccgccacggccaaggagaccaccaagaaggtgcaggagaagccggcggcggcggcgacccacgagtgccacatctgcggccaaggcttcgagatgggccaggcgctcggcggccacatgcgccgccaccgcgaggaggccgccgccgccgccgcggcgatagagattttaccattatctggtggagggcaccgcgcggggccaaatctggaggtcttcgagctcggacatgttagatctggcattggagccaccacccttgccgtcactaaagaatccgacacaagagggctggggataaacggggcctctagctgccaagcactagagggggggagggcgaacgcgacgtcgggtgtggcggtgagcgaggagtgcaaggcgaggttccaggagctgagggcggggcgggcccacaggttcgtggtgttcaagatcgacgacgcgatgcggcaggtggtggtcgacagggtgggcccacgcgacgccggcttcgacgagctcaccgccagcctccccgccgacggctgccgctacgccgtgtacgaccacgacttcaccgtcagcgacgccacggccacggcggccgccggcgagggcggcgaggcgccgcgcagcaagatcttcttcgtgtcgtggtcgccggcggcggcggacgtgaggagcaagatggtgtacgcgagctccaacgaagggttcaagaaggagctcgacggcgtccagatcgacctgcaggccaccgaccccagcgagctcaccctcgacgtgctcaaggaccacacctcctaa

SEQ ID NO: 13231 - DNA, 522 bp, Oryza sativa
  Clone ID: TFbOSC408704j.C1.o4.gp
ggcgcgtgcaccgccgcggcggcggcggcggcctcctcgcggtggcggcgcatgtggccgccgagcgcctggcccatctcgaagccttggccgcagatgtggcactcgtgggtcgccgccgccgccggcttctcctgcaccttcttggtggtctccttggccgtggcggcggcgaggccgagcgcgagcccgtggcggccgcgcaggtggctggtccggtggccgcccagcgcctggaacgacgggaacgcgcggctgcacgtcttgcagacgaagtccccactcccggacgccgccggcgacgacccgcgccgcggcttcttccgctcgccgctatccgcggcagcgccgagcgtgagcgacagcgagaggctgatcacctcgccgtccctcggatgcttggtcatggtcaagaaagaaaccgaacgaactggagatcgatcgaacacaagatgatcgacgagacgagttttagctagctagcttctgactcgatcgagagaatggttaatattgctgtgc

SEQ ID NO: 13232 - DNA, 1272 bp, Oryza sativa
  Clone ID: TFbOSC400255j.C1.o23.fg
atggatgcggggggagtggagctctctggcgtgatgcatcggtgtagggtgtgcgggaaggggttctcgtgcggccgctcgctcggtggccacatgcggtcgcatatctcgtttggggaggcggcggcggagctcggcgccaatggcggcgtggttgggtacgggctgagggagaatcccaagaagacgaggcggctgtctgagtttgatggtgatggtgatggtgaggaggtggaggtggaggagggtggcgatggcggcgagctcagggcgtgccgggagtgcggcaagctgttctcgtcgtggcgctcgctgttcgggcacatgcggcgccatgcatccggcggcggagggaggaatcacgacgacgacgacgatgacgacgtggatgtggaggatgagttcggcggcggggaggaggaggagattgtggcgccggcgccggcggcggtgactgtgatcgcggcgccgccgaggcggaggcggcggtcgatgcgcgtggcggcgcccgcgcccgcgcccgcgccgccgcggccggtgctgctgggcgggttcgagaaggaacaggaggacgtcgcgctcggcctcctgatgctctcgcgcgacaccggcgtgtggcgctcgccggtcaaggcggagacgttcgagaagccggagcagaagaagaagaaggcgacggcgaagcagccgccgccgctacccctcccaagaaacggctacggctacggctacaactccgacgaggattcagctctgctccagtacggcggcgacgtcgcgaagagcaggaagcgaagggctagctaccactctcccaattccatctcctcgaagaagaagcagcagccgcgcgcggcggcgccggcgaagcggacacggtacgagtgcccggggtgcggcaaggtgttcgcctcctaccaggcgcttggcggccaccgcgcgagccacaagcggatcaacactagctgcagcgcccccaaggtctcccccgccaccgccgcggcggcggcgcccgcgccggagccgagctcggagacgtacgcctcgctgagcaccctctccccctcggcgtcgccgggctcggcggccgccggcattggcgaccgcaaggccaacaacaagtcgtcagcggaggaggagaagttcggcggcgcgtgctcctccgacgagctctacgccgagctggagctggagcagcgctcgccggcggcggccgcggggtttcttgatctcaacttcccgccggcctcatcggaggttggcgtgaactga

SEQ ID NO: 13233 - DNA, 2517 bp, Oryza sativa
  Clone ID: TFbOSC401731j.C1.o37.gm
atgaatagaagcgtttgccaccaccttctcacccagtgcaaaaccataagagagctccaaagaatccacgcccaggccctcacacacggcctccaccccaaccagcagtccatctcctgcaaaatcttccggtcctatgccgagtttggccgaccggctgacgcaggcaggttgtttgatgaaatcccccaccctgacattatctccttcaccagcctcatgtcccttcatctcaagttagatcaccactggaaagctatatccgtgttctctcacgccattgcttctggccaccgccctgatggctttgctgctgtcggtgccctctcggcctctggtggattaggggatcagcgtattggtagcgtggtgcatggcctgatttttcggtgtggattggactctgagttggtcgtttgtaatgctttggttgatatgtattgtcgatgtggcaagtttgagcctgcacggactgtatttgatagaatgcttgtaaaagatgaggtcacttggggtagcatgctgtatggttacatgaagtgtgttggtgtggattcagctttgtcattcttttatcagatgcctatgaagagcactgtttcttggacagcactgatcactggtcatgttcaagacaagcagcctatccaagctcttgagctatttggtaagatgcttttggagggccaccgtcctaaccatattacaattgtaggggtgctatcagcttgtgctgatattggtgctttggatcttggacgtgccattcatggatatggaagcaaatctaatgccaccaccaatataattgttacaaatgctctgatggatatgtatgcaaagagtggaagcattgctagtgcattttctgtatttgaagaagttcagatgaaggacgcattcacatggacaactatgatttcaagtttcactgtccagggtaatgggaggaaagctgttgagctcttttgggatatgctaaggtctgggatacttccaaacagtgtgacattcgtctcagttttgtcagcatgcagccatgctgggttaatacaagaaggcagagagttatttgataaaatgcgtgaagtctaccatattgatccccggcttgagcactatggatgcatggttgatctgttaggacggggtggacttctagaagaagcagaagctctgatagatcatatggatgtcgagcctgatattgttatttggaggtcacttcttagtgcatgcctagctcatggcaatgatagattagctgagattgctggaatggaaattataaagagagaacctggggatgatggggtttatgtgcttctttggaacatgaagttcagtataaaggcaaatatgcaaaggcatgtaaaggaaatccatgaggatgaaactgctactaaaagcaaccggcagtttgtttgcaaggaggagggctgtaacaaggttttcaagtatgcttcaaagatgaagaaacatgaagaatcacatgtgaaattggactacgtggaagtagtctgctgtgaaccaggctgcatgaagacattcacaaatgttgaatgtttgagggctcataatcaggcttgccatcaatatgttcagtgtgatatctgtggggaaaaacacctgaagaagaacattaaaaggcacctacgagcccatgaggaggtgccatctactgaaaggataaaatgcagttttgagggctgtgaatgctctttttccaatgcgtcccatgatcaagtaaaacctttcgcatgtcgattcacggggtgtgaaaaggtgtttccatacaagcatgtcagggacaaccatgagaaatccagcgctcatgtatacactcaggcaaacttcacggagatggacgagcagttactctcgtgtccgagaggtggacggaagaggaaagctgtgactgtcgaaactcttacgcgcaagagggtgaccatgcacggcgacgcttcgtcgttggacaatggaactgagtacctgcgctggttgctttctggtgaatccggaagccgcataggccgtcgcagggcccatccaaactccatcacgcccacccttgcctggatgcgtcggctagaggaaagctacactacaagcccagccgttgcccacgctggcttgtgggctgacgtcagcacgggggaaagcggcgccgacatgcggggcccaccggtcagcggctcgggagagggaggaaggggcgccggcacgcggggcccaccggtcagcgactcaagggggagggcggttcaccgtggaccaggaccacgcgggtggtccaccgccggtccacggaaccgacggcccagatcgccctcggggccgatcggacgggcggcgatggaggcggccgccgggctcggctcggcatcaaagccgaccggccggccagggctagcggtgacggcacgcggccgacgacggcggcgaccggcggcatgggaggcggtggcggcggccgaaggcgacggcgcgcgacttgaagcggcggcgcggcactag

SEQ ID NO: 13234 - DNA, 561 bp, Oryza sativa
  Clone ID: TFbOSC408704j.C1.o7.fg
atgaagaggctgacattcggcgcggaaccggagatggtggacagcgcaagcatagctcaggaggtcatgctgctcctcgcgcggagcggcggcggcggcgccggctatgtcgtcggccacggcggcgaggctccgcgcgtcttcgagtgcaagacgtgcaggcgccggttcccgtcgttccaggcgctcggcggccaccgcgcgagccacaagcggccgcggggtggtggcggtggtggcgcggccgccgccgtagccgccgcggcgggcgagggggaggcgggtgtcgcgctctcgctcgcggcggggacgccggccgtgaaggcctcacgcgcgcacgggtgcgcggtgtgcggcgtggagttcgcgctcgggcaggcgctcggcggccacatgcggcggcaccgcatcgccggcgccgaggccgacgaggcggtgagcgcccgcggcggcgagccggcgcccgagcggaatccacgcgaggcgaggggtgtggttggcttggacctgaacgctgctcccgccgacgacacaggcctcctgctggtagactgcctgtaa

SEQ ID NO: 13235 - DNA, 654 bp, Oryza sativa
  Clone ID: TFbOSC5483j.C1.o4.fg
atgagcaagaggagcaggagcatgtgggacatgcaggagttcgtcggcagcgtggacacggcccgcgtgctgatgctcctcgcgcagcagagccagcacggcctgctgggcggcggcggcttcgccgccggcgcgcagccggtggtggtgcgcggcggcgcgcacgaccgcgtgttcgagtgcaagacgtgcaaccggcagttcccgacgttccaggcgctcgggggccaccgcgccagccacaagcggccgaggcagcagcagcagcacgcgctcggcggcggcgccggcgccgacgacgcggggctatgcctcgggaggcagccgacgccgccgcggccgcagccggcgaagccgagggtgcacgagtgccccgtctgcgggctcgagttccccatcgggcaggcgctcggcgggcacatgcgtcggcaccgcgcggaggccgaggcggcggcgacaacgacgacgacgacgacgaagaacggcgacgtaggcaaggcggcggccgtgaaggcctgcgacggcggcggtgtctgcctggacttgaacctgacgccgtcggagaaccgcgcaaagtgccggaacgtggtgggtctcggcgccggcgggcagggcgtacacaaggcgctcgccatgttggattgtttcctttga

SEQ ID NO: 13236 - DNA, 1320 bp, Oryza sativa
  Clone ID: TFbOSC900369j.C1.o21.fg
atggcctctgcagagagaagaataaggatgtggtggcgcacagctgggaggcctaagcatctatggggtcgccggagcatgctctacatgggccacagccgcatctacatggaccgctactacgaccccatcgagctccatgggcagccgccgccactgctcatgattccaggcggtggcggcggcggcggcggcggcggaattagcccttacttggtgcagagccagcatgggcatggtggcggcgtcgacggcatggagatggaggagggcggcggcttcatgggcgagcagccacagtgccacccgctgctctacaacctgtccgtgctcaaggacagggtgcagcagctgcacccgctcgttggcctcgccgtcgcccacaacgcccacgcccacggccccctcgacgtctccgccgccgacgccatcatccaggaaatcgtcgccgccgcctcctccatgatgtacgccttccagctgctctgcgacctcggcacggcgccaaccaccgcgccatcacaggagaccgccgccgcctccgccgttgttgtcaagaacaacgaccatgccgccgatgccggtcagatggaggacgaccatctcatgcagcagcagtggcagcagaacggcagccgccagcacgattacagcagccatgcccatgcgccgccggtgttccacagcgaaacggcggcaccggcaggcgcgacgtcggcgacggacacgatcatcgagctggacgcggcggagctgcttgccaagtacacgcactactgccaggtgtgcggcaaggggttcaagcgcgacgccaacctgcggatgcacatgcgcgcgcacggcgacgagtacaagagcaaggcggcgctgtccaatccgaccaagctgctcgccaagggaggcgacgagacgatggcggcggcggcgaggaagtactcgtgcccgcaggagggttgccggtggaacaggaggcacgccaagttccagccgctcaagtcggtgatctgcgcaaagaaccactacaagcgcagccattgccccaagatgtacgtgtgcaaccgctgcggccgcaagcacttctccgtcctctccgacctccgcacccacgagaagcactgcggcgaccaccgctggctctgctcctgcggcacctccttctcccgcaaggacaagcttatcggccatgtctccctcttcgccggccaccagccggtcatgccgctcgacgccccccgcgccggcaagaggcagcgatcgtcctcggcgtccgtcgccgggaacattgacgacaccaccggcattggcatgggcgccgcctga

SEQ ID NO: 13237 - DNA, 1614 bp, Oryza sativa
  Clone ID: TFbOSC29140j.C1.o1.fg
atggcggccgcctcgtccgcacccttctttgggctcggcgacacgcagatgccgccgccgcagaatcccaccaatccagcccttcaccaccaccccaaccccttccccgctcccgtcgacgccgccgcgcccgcgccgaaaaagaagaggaaccagcctggaaacccaagcaagtatccagatgcgaaggtgatagcgctgtcgccgcggacgctgatggcgaccaacaggttcgtgtgcgaggtgtgcaacaaggggttccagcgggagcagaacctgcagctgcaccggggagggcacaacctgccgtggaagctgaagcagaagaaccccaaggaggctcgccggcgcgtgtacctgtgcccgaagccgtcgtgcgtccaccacgacccgtcgcgggccctcggcgacctcaccgggatcaagaagcactactgccgcaagcacggcgagaagaagtggcgctgcgacaagtgctccaagcgctacgccgtgcagtccgactggaaggcccactccaagacctgcggcacccgcgagtaccgctgcgactgcggcaccctcttctccaggagggacagcttcatcacccaccgcgccttctgcgacgcgctggcgcaggagaacgcgcgcatgccgcccatcggcgccggcgtatacggcggcgccggcaacatgacacttgggctcaccggcatggccgccccgcaacttcccgccggcttccctgatcaggccggccagccgtcggcgtcggccggcgatgtcctccgcctcggcggcggcagcaatggcgcctctcagtttgatcacctcatggcctcgtcgtcgggctcctccatgttccgctcgcagggatcgtcgtcctcctcgttctacctcgccaatggcgccgcccatcatgctcccgctcaggacttcggcccggaggacggccagtctcaggccggccagggctcgctgctccacggcaagccggcggcgttccatgacctgatgcagctccccgtgcagcaccagcaaagcggcaatggtaacctcctcaaccttggcttcttctccggcagcaatggcggcgtcgaccagttcaacggcggcgctggaaacggcgggcagggcagcatcgttacttctagcggcctcgccggcaaccacggcggcggcggcggcggcttcccttctctgtacaactcgtccgaaccggccggtacactgccgcagatgtcggcgacggcgctcttgcagaaggctgcccagatgggtgcaacgacgagcagctacaacgccggcggcgccggtggcgcgagctcgctgctccgtggagctagctcccacgggatcagcgtcggtgaagggccggccaacgagaggtcgtcgtaccagaatctcatcatgggctccatggcgagcggcggcggtggcgcgggtttcgccggtagcttctccggcgcgtctggattcggtggcgccgtcgacgacggcaagctgagcacgagggacttcctcggcgtcggcgtcgtccagggcatcagcggctcggcggcaatggggccgccgcgccatggcgcggccggcctccacgtcggctcactggacccggcaaacatgaactga

SEQ ID NO: 13238 - DNA, 933 bp, Oryza sativa
  Clone ID: TFbOSC402101j.C1.o5.fg
atgtccgtggaggacaagcacgccggggtcgtcaagcgcaagcgcaccaagaggccgcgccaccacgcggcgccggcctcctcctccgagagcaccaccaccgaggaggaggacatggcgcactgcctcatcctgcttgctcagggcgccgccgtccctccggtgctcgccgcgcccgcgcccgcgccgccgccgccgcagccgccggtggtggtggtgaagagcgagaggtacacgagccgcaagtacacggaggcggccaccacggcggacggcgtcagggccgggttctacgtctacgagtgcaagacgtgcaacaagtgcttccccaccttccaagccctcggcggccaccgcgccagccacaagaagcctcgcctccccggcgccgacgacgacaacgttaacaacgtcaccaacaccaacgccatcgtcgtcaagtccaagccgccgctgacgacgacgacgacgccgtcggcaccgtctccaccgccgcctcaggcggacgccgtcgtggtcccggacgtcaccaccgtgctgagcctgaacaacgtggccgccgccggcagcataatcaacaagctgagggtgcacgagtgctcgatatgcggcgccgagttcggctccgggcaggcgctgggcggccacatgcggcgccaccggccgctgcacgcgccgccggagcgcgcggcgaccacggccgccaccaccgccgccaccgccaccgccccggacaccaagaaagagggaagcacgagcatcaacctggagctcgacctcaacctgccggcgccgtccgacgaggagtccgtgtctcctccgccgccgccgccgccgccggtgctcctggctctcggcgggcagttcaacgacggcaagaagccaattctgcagctcaccgcctccgccgcgctggtcggctgccattattga

SEQ ID NO: 13239 - DNA, 4416 bp, Oryza sativa
  Clone ID: TFbOSC19412j.C1.o20.fg
atgccgccccagcctccgccggcggcgtcggcgtcggccagtgccccggatcccgccgtcccggcttggctcagggggctcccccgcgcgcccgagtaccgcccgacggagtccgagttcgccgaccccatcgccttcctctcccgcgtggagcgcgaggccgccgcctacggcatctgcaaggtcatcccgccccacccgcgcccttcccgccgcttcgtcttcgcccacctcaaccgctccctcgtctcctcctgcgacgcccccgcgccctctcccgccgccgcctccgactcgtccattcctccatcctcctcctcgccgccgccggtctccgccgcggtgttcacgacacggcaccaggagctcggcaacccgcggcgtggacgcccgacgccgcaggtgcttaagcaggtgtggcagagtggggagcggtacacgctcgaccagtttgagtccaagtcccgcgccttctcaaagacgcacctcgctggactccacgaaccgactgcgctcgcggtggaatcactcttctggaaggcgtcggcggaccgtcctatctatattgagtacgccaatgatgtccctggctctgggtttgctgcacccgtgcagttgcaacgcaagaagaagcagaaaagagagactgccccgatggacgaatgggagaagagttcaggctggaggctgtcaaatagcccatggaacctgcaagcaattgcgcgggctcctggttcgctcacacggtttatgcctgacgatgttcctggggtgacttctccaatggtttacattggcatgctgttcagctggtttgcgtggcatgtggaggatcatgatctgcatagtctcaacttcctccacactggcgcacctaagacgtggtatgcggttcctggtgatagggctgttgagcttgaggaagttatccgtgtacatggctatggaggcaacactgatcggatcgcgtcactagcagtgcttggtgagaaaacaacactaatgtccccagaggtccttatagacaatggtgtgccctgctgtagattggtgcaatatcctggtgagtttgtggtgacattcccaagggcttaccatgtcgggtttagccatggattcaattgtggagaagctgccaattttgcgactccccaatggttgaagtttgctaaagaggctgcagttcgaagggctgtgatgaattatcttccaatgctctcccatcaacaactattgtacttgctagcagtttcatttatatccaggaaccctagagaactactgtctggaatccgaacttctcgtctaagagatcgtaaaaaagaagaccgagaactgttggtcaaacaggaattcttgcaggatatgattagtgaaaatgaacttatatgttcatttcttggaaaaaaatcggttgataatgttgttctatgggagcctgacttgctgccatcgcttaccgctctacacccctgctcgtcttgctcaaaagctcctgaaaagaagggtgaagatggtcccagaattggatctacccaatccagctcaaaagatgacagctcatctgatggtactgcatgtatgactgggacacaatctaaaggcttgtctatggatagcaaacaagctcctgagggagaaaagcttgataccgatgacggagatgacctgccttttgatttgagcattgattctggttcattgacatgtgttgcatgtgggattcttggctatccatttatggcgattttgcaaccttccagaaaagcactggaagaaatttcccttgttgataaggaaagatataaactgagttgtgaaaaagagatttgttcaaatgtgcttccgtgctctcctaatgatggtagctccggatgcccactcatcgccaatagatcgtccagccctgtggaaaatgctaacctcagtcatcaggatgtgaagccaattagaagtgacatttctttgatgggaaaggagtttaatggaaccctagggaaacatattggcacttcctgttcttgtagcagtgaaaataccattcatccttacggtgacacagaaacccctgagaagaaaataccaagtgattgccctggctcagagttgagtaaacaatcaggcagaggtgatgttaatgtaccagatgtcgaaggtagtgaggaaactatcagctggaatacaggctgtgcatttgcacggcctcggatcttttgcttacaacatgcccttgagattgaggagttgcttgcgagcaaaggtggagttcatgccctcatcatatgccatgcagattatgtcaaactaaaagcacttgcaatatcaatagctgaggaaattgagtttcagtttgactataaagatgttgcactagcaaatgcgtccaagtctaatttgcatctaattaatatttcaattgatgatgagggatatgaggaagagggaacagattggacatcacggatgggtctaaacctcaaacatagttccaagattaggaaagaaacaccagagagtcaagaacagcctcctttatcattttggggattattttccaagccatcacctatttcagttgtttcaaacttgaaatggctttgcaggaaagcacggactccatataaggtcattggttatgcttccagccctgatgttgtggcaactccagacaaagttaagcccgcagttacaaaaactcagatagacacttctggaaatgctcatgaaaacattggaagtgaacaaactctgcaacaagattgtgtcctgcaagaatccaatgatgtagctgatatgtgcaagcgtcccaaggtgaatgatcaggatggacattctcttattaatattccaattgctgttgctgaatatcctatgatgcatcaagtttgtgagcgtccagattcacccacaactgttgcagtgtcagctggcaaacctaccagagaacaatgtggtgctgaatcaactgagttgagtactgtaaaacagttcctggacaatgggcttatcgctgagggaggcagcatgaacttcataagtaatcatgagcacttagaatctgacaatgcaacttcagtgtgcaaagatgaacaattgcaagttcaacaagatcagttggccatggtactttgtaataatcccaacacagaattggttgcaggagaattacatgggggggcagcatcatcaacccttgaaaatgaggatagctgtggtaatacgtcttactgttctgacactgtattaaagaacagcgaacctgatacagatgatcaacctgaaacatgtgatcgtagtgttgttcttgtaacaccaaagtcgagctgtgaccagatgatttctagcagtgacagaagttgcagtctgaccttggactgccctgtctccactgatgctgccttttcaagcgaaaagctgtctatggctcatgatttgatgggcagtgagttgcaggcagtccataattcaaaggctgaggttgtggccagtttgactgatgtcaagggtgctaagctcaatagcattcataccacacaattacctcatgaatctccaagcagtgatttcatcatttcagaaggtgcgcaatctgcttcaacaactgcaattcccagaaaaaatggaacatccatgcacacagagtcaaattcaattgatattttacttggagttctagccgatgaatctaaggtctcttctggaaaggatgaggttggcaaagcttccttgacattgatgacactggctggcaatgaccaatctgcagatgatgtaactcaggatgaagttgcagagatcactgatccgtcgcatggcttctgctcatcagacatagtgtctagaagcattggaagttcaaacagaacaaatatcatatgttatgccagacgcaaacacaaaagaaagagcggatctgagttcaatattaatagtccccaaagcttggggagctttgtccgctctccatgtgaaagcttgagaccaaggactagacctgcgattgttgaagacatgacaaacgaaacaaaaactgcagaagcttcaactgcaaataagaggaagaaggcaaaggtggaagcatttcagtgtgacatagaattttgtgacatgacatttgagactaaagctgaacttcgtgctcaccaacgcaatatctgcaccgacgagtcttgtggcaagcgcttcagctctcacaaatacctgaagcgtcatcagtgtgtacacagagatgagaggccattcaaatgcccctgggatggttgtccaatgactttcaagtggttgtgggcgcaaactgagcatatcagagtccatacaggcgagcgaccgtacaagtgctcggctcctgactgtggccagagtttcagatatgtctcagattatagtcgccatagaaagaagtttaatcattattga

SEQ ID NO: 13240 - DNA, 1617 bp, Oryza sativa
  Clone ID: TFbOSC400277j.C1.o23.fg
atggctaatgccagagttatgcgtgatggcgagatgatcgatggcgacggtgaccgatcgagcgttcgttcgcgtggtggtgcagatcctgatgcggaggtgatcgcgctgtcgcccaagacgctgctggcgacgaacaggttcgtttgcgagatctgcaacaaggggttccagcgcgaccagaacctgcagctgcaccggcgcgggcacaacctgccgtggaagctgcggcagcggagcgggaaggaggtgcggaagcgggtgtacgtgtgcccggagccgacgtgcgtgcaccacgacccgtcgcgggcgctcggcgacctcaccggcatcaagaagcacttctgccgcaagcacggcgagaagaagtggaagtgcgacaagtgctccaagaagtacgccgtccagtccgactggaaggcgcacaccaagacctgcggctcccgcgagtaccgctgcgactgcggcaccttattctcacggagggacagcttcatcacccaccgcgccttctgcgacgccctggccgaggagagcgccaaggcgcgcgcggcgccgccgccgccggccgacgaggacgggacctcggcttctgccggtgcgccgccgccgcaagcgcctctaccaccacccgcgccggtgccggcgccagcaccgccacctcctccggccgcagctccggctcccgcggcgcaaccggagcaacgagatcgggatgctgcactggatcagttcgccacgccggcgccggcgccggcgccgccgccagttactgctcctccgccgccgccggttgccgctcctaatgattgtgtcagcagcagcagtagcggcgtggcgccgacgtcgcaaagcctccttagcagcatgtttgcaccgccgtcggtggcccaggcgccgcagtacgcggaccccatcggagttggagcgggtggccatcaggagcgcgcggtgcctgccaagcctccggcgctgtgcctcgcgcccaacgcgtcgtcgtcgctgtttacggcgcctgtaccagctgaccggcagcagttcgctccgccgccaccgccgtccccgtcgccgcacatgtccgccacggcgttgcttcagaaggccgcgcagatgggcgccacctcgtctagctcgtcctttctccgctgcctgggcctcgacatgtcatcgtcatcgtcggcgccgccttcgtcgtcagggcagcagcaacagcaccaccaccatcaccaccaagaaaccatgcaagtgccactcccggcgagttcgctgcccgaatggccgccgcggttacagccggagccatccccaatgctgtcctccgggctcggcctcgggttaccatacgacgcgacaggcggtccggtgagcttgccggagctcatgatgggtcagtccacactgttcagtgccaagccggcaacactagatttcttggggcttggagtgagcccgacaggcgcgtcgacaagcaggggcttcccgacattcatccaacccatcggcggcgctgtcagcttggccgggagtgccaccgtcgccgcggagaccttcggcgccgcccatggcggccaggcaaatccgtgggagaggaacccgagtagctcaccaatcctgtaa

SEQ ID NO: 13241 - DNA, 3618 bp, Oryza sativa
  Clone ID: TFbOSC400964j.C1.o10.fg
atgaggccctcgccgcctcccgccgccccggcggcggaaccggtgcccccgtggctgagatcgctgcccgtcgcgcccgagttccgccccaccgccgccgagttcgccgatcccgtctcctacatcctcaagatcgagcccgccgcggcgccgtacggcatctgcaaggtcgtgccgccgttgcccccgccgccgaagaaggccaccttctccaacctctcccgctccttcgccgcgctccacccggacgaccgctcgccgtccttccccacccgccaccagcaggtcggcctctgcccgcgccgcacgcgcccggggctcaagcccgtgtggcggtcctcccaccgctacacgctcccgcagttcgagtccaaggccggcgccacccgcaagtcgctcctcgccggcctcaacttccctgcctccaggcaactcaccccgctcgaccacgaggtgctcttctggcgcgcatcggccgaccgccccatcgtggtcgagtatggcagcgacatgtcgggctcgggattctccccttgcgccgcgcagccgcagccgccgccgcagcagcaaccgacggcgcgggcggcggcgcaccttggggagacggcgtggaacatgcgcggcgtggctaggagccccggatcgctgctgcggttcatgccggaggatgtccccggggtcaccacgccgatgctctacgtcgggatgatgttcagttggttcgcgtggcacgtcgaggaccacgacctgcacagcctcaactacatgcacctcggggccgccaagacgtggtacggcgtgccgcgcgacgccgcgctcgcgttcgaggacgtggtgcgcgaacatggctacggcggggagattggtgcagaatgcaggggaatttgtggtcacttttccaggatcttatcactgcggtttcagtcatgggaaccatccaatggtgaaatggagacacggagctctcgaataaaggagaagaagaaatgcgaaggggaacaactggtcaagaagatgttcatccaaaatgttattgaagataatgaactgcttagtcatcttctaaatgacggatcatcttgtattattcttccagcaaatgcccatgatggtcctggtctttctactttgcgctcaacagatcaatcaaatatgaattccagaatatcacataacctatgcagtagggaagaagctccagaagcctcaggatgcttatcgccgaacaggaatggtgataccagaaattgtatttcatcagatacgcataacatggaaggtgataagggagatataatgagcgctactggattgttagatcagggtctattatcatgtgtcacttgtggaattttaagtttttcatgtgtggctgtactcaaaccaagagattctacagcacgatacttgatgtctgctgattctaattcaattaataaccagctttctatttctggagggagtattctggcagatgcgccaacaaatgaaaggaatggtgtcatttctcgtccatattctgaacactgttgcaacgaaataatggccgatgatgcagaaatcgataagaattctgctcttgatctcttggcatttgctcatgggggtcaaccagatcctgaagaagatccactggagaaaatactgaagattgcacatggcattaacaaatcacaacctaatagttcaaataatgttggttgtgttggaacaaagctgtcctcaagtagcacagagcgccaagaaagaccatcttcccagaacgctcattgtaatggtagctcagttatttcaaatggaccgaaaggtgttcgcacgagaaataagtatcaacttaagatggtactttctgaaggttttcaggcaaaggatatctattctgcgaaggaaaagaaggttcaatcagaaccatcaagctcaaaaggggatgttaaggagacaattgatgttagtggcacagagaacgatgtcggatgtaaaagcactacaatctctgtcagtgaacacaggggttctacaaagaatatgtattcagtgaaggaaaagaaggttcaatcgaaaccatcaagcttaaaggggactgttaaagagacagttgatgtcagtggcacagagaacgatgctagatgtaaaagcattacaatctctgtcagtgaacacaggggttctacacctatgaccaatagtttagctgcatcaatcgtgaaacctgacaaggattcatcaagaatgcatgtattttgtcttgagcatgctattgaggttgagaagcaactgcatgctataggtggttctaatattatgcttatatgtcgtccagaatatcccaaaatagaagcggaagcaagattgttgggtgaagaaatgggactggtatatgactggaagggcattcatttcaaggaggccaacatggaggacaggcagaagatacaggaagttctgcgggatgaggaagcaatacctacaagcagtgattgggctgtaaaattgggtattaacctttattatagtgcaaatctggccaaatctcctttatataacaaacaaatgccatacaacagagtcatttatagggcatttggctgtgattctcctaatgactcgccagtaatgttcaatacttgcgaaaggaaacaaagccaccagaagaaaatagtggttgctggccggtggtgtgggaaagtatggatgtcaaaacaggtccatccatacttggctcacagagttgaaagccaggaagcggaagaagcagatagaatctgttcttatcattttgatgagaagcacaaagctgagccagttgggaattctagtagagtggaagcctccaaaagaaagagtagcagtttgacagacgtaacagaatcaagcaatagaaggggggaaatacctggtgaggaaacaaacaccaagaggcccaaacattctcaagagaacaatctcagagctttggaaaccgctgctgaagttgtggtgccctcaccagctggaacaggtctccgcgttagctccaggattgccaacagggcaaacaagctaaaatcaaagatggaaaaggaggatgtcccttctagccgtccaaagtctaacataaaggagaaaagcagtcatgctagcggtcagaaatcaaatgttcaagaggcgaatgctaattctgctagccatttgagagcaatgccaccaaaacagaaggctgaagcagaagcaaagaagcaaataagaactccaaaacctccaaagcaagcagtggagtactcgtgcgatattgagggttgttctatgagttttcgtacaaagcgggacttgtctctgcacaagagtgatatctgcccagtgaaaggctgcgggaagaagttcttctcgcacaagtatctgctgcagcatcgcaaggttcacacagatgaccgtccgctaacatgcccatggaagggctgcaacatggcattcaagtggccatgggcaaggactgaacatctcagggttcatacaggcgacaggccctatgtttgccatgagccaggttgcgcacagacattcaggtttgtctcagatttcagccgtcacaagcgcaagacaggtcattctgtcaagaagaagaagaaagcaaagagttga

SEQ ID NO: 13242 - DNA, 1515 bp, Oryza sativa
  Clone ID: TFbOSC400258j.C1.o6.fg
atggcaagtaatgcaacaaggaatactgatcctgaccaacagggtgttcgattcagttccatggaccagcctccatgttttgcaagacctggtcaatcgttccctgcttttcctccactctttggggttcagtcttccagcttgtatttacctgatgacattgaagctaaaatcggtaaccagttcgaatcaaatccttccccgaataatcctacaatggattgggaccctcaggcaatgctgagcaacttatccttccttgagcagaagatcaagcaggtaaaagacatcgtgcagtctatgagtaatcgtgagagccaagttgctggtggttccagcgaggcacaagcaaagcagcagcttgtcactgctgatctcacttgtattataattcagcttatttcaacagctggttccttgcttccttcgatgaagaacccaatcagcagcaacccggcactcagacatctcagtaacacactttgtgctcctatgatcctgggcaccaattgtaacctgcgaccaagcgcaaacgacgaagccacaattcctgacattagcaagacccatgactatgaggagctgatgaatagccttaatactactcaggcagaaagcgatgagatgatgaactgccaaaatccttgtggtggggaagggtcagaaccgattccaatggaagaccatgatgtgaaggagagtgatgatggtggtgagagagagaatctcccccctgggtcttatgtagtattgcaattagagaaggaggagattttagcaccacatactcacttctgcttgatctgtggcaagggttttaaaagagatgctaatcttaggatgcacatgaggggccatggagacgagtacaaaactgctgcagctcttgcgaaaccttcgaaagattctagcttagagtctgcaccagttacaaggtactcgtgcccatatgttggctgcaagcggaacaaagagcacaagaagttccagcctctcaagacaatcctgtgtgtgaagaaccactacaagagaagccactgtgacaagagctacacctgcagccgttgcaacaccaagaagttctcagttatcgcggacttgaagactcatgaaaagcactgtggccgcgacaagtggctatgctcgtgtggaactaccttctcaagaaaagacaagttatttgggcatgttgctcttttccaagggcacacgcctgcactccctatggatgatatcaaagtaacaggagcatcagagcaacctcaaggcagcgaggcgatgaacaccatggtggggagcgctgggtataacttccccggtagctcatcggacgacatcccaaatcttgacatgaagatggctgatgatccacgctatttctcgccattgagctttgatccttgcttcggtgggcttgatgacttcactcgacctggatttgacatctctgagaatcccttctccttcttgccctcaggatcatgcagcttcgggcagcagaacggagacagctga

SEQ ID NO: 13243 - DNA, 555 bp, Oryza sativa
  Clone ID: TFbOSC400311j.C1.o6.fg
atggccggtcaggtgttcgtccatcacctcggcggcggctccggcggcgacgaccccacccacccatggctgtccctcaagtcgtcccatgagatggacgacgccgtggcgagctggcgcgagaagctggcggacatggccgccgccgacgaacgcgccggcaggtacccgtgcccgctgtgcgaccgccacttccccacggagaaggccgtgcacgggcacatgcgcagccacccggggcgcggctggcgcggcatggagccgccccgcgagccgtcccccggcgacctcgccctcgccgccgacgggaagcggtaccgctacgtgtgcgaccgatgcaaggcgccgttcgagacgcggcaggcgctgggtgggcaccgtgccagccacagcaccaagaagggctgctcctggcacgccaagcagctcgccatggccaagccgcccaagaacgacttcgacctcaaccatctctcacttgaggccatccaggcggcggcgcaagaggaacaagctgctcaagaggggaacaaggatgaggagcctaagaattaa

SEQ ID NO: 13244 - DNA, 663 bp, Oryza sativa
  Clone ID: TFbOSC12817j.C1.o4.fg
atggcgctcgacgggaagccaccggtgccgccgccgtccacgccgccgatggactcgtgggcctgcggtggtcgccgctccaagcgccgcggcggcggcggcgggagcagcgggagtagtggcagctccggcggcggcggcggcggcgagtccaagaaggagtacctcgcggcctgcctcttgatgctcgcgcatggcgtccgcgacgaggccgaggtcgtcggcgtcgcggcggcgacggcgaagccacagcatgggtacgagtgctcggtgtgcggcaaggtgtacgggtcctaccaggcgctgggcgggcacaagacgagccaccgcaagccgccgtcgccggcggccgaaccggcggccggcgaagagccgtcctccggcggggtggccggcgaggcgaaggtgcaccgttgctccatctgcctccgcacgttcccgtccgggcaggcgctgggcgggcacaagcggctgcactacgagggcggcgccgtcggagacgccgtcaaggagaagaactccctgaagaccaaggcggcggtggcgacagcggtgctgaaggacttcgacctgaacctgccggccgcggcgacgacggcgggggacgaggccgagagctcaccaccggaggccaagagagcacgtctgctgcttctcgtctaa

SEQ ID NO: 13245 - DNA, 1137 bp, Oryza sativa
  Clone ID: TFbOSC400553j.C1.o13.fg
atggcgctcgacgggaagccaccggtgccgccgccgtccacgccgccgatggactcgtgggcctgcggtggtcgccgctccaagcgccgcggcggcggcggcgggagcagcgggagtagtggcagctccggcggcggcggcggcggcgagtccgaggaggagtacctcgcggcctgcctcttgatgctcgcgcatggcgtccgcgacgaggccgaggtcgtcggcgtcgcggcggcgacggcgaagccacagcatgggtacgagtgctcggtgtgcggcaaggtgtacgggtcctaccaggcgctgggcgggcacaagacgagccaccgcaagccgccgtcgccggcggccgaaccggcggccggcgaagagccgtcctccggcggggtggccggcgaggcgaaggtgcaccgttgctccatctgcctccgcacgttcccgtccgggcaggcgctgggcgggcacaagcggctgcactacgagggcggcgccgtcggagacgccgtcaaggagaagaactccctgaagaccaaggcggcggtggcgacagcggtgctgaaggacttcgacctgaacctgccggccgcggcgacgacggcgggggacgaggccgagagctcaccaccggaggccaagagagcacttcacttctggttgggcgatggagacgggtggcatgataaacatgccgtgtttagatggttggccagcagttctggtggaaataatataatggggccccatgattccccagctcgctgtgtcgaatactcctacagtcctacatgcagatacggcacatttgcaactggtggatgtgacagttttatggcctttgggatggcgctagcaaaagtgccccagccctcaaatacccatgtaacatcacttcttgtctttcagcaaggatggccatctgcttcgctgtcgcatccaggtgcacgttcgataagccttacctttctattgagatatcaatcatatgaaacccactgggtatccaccgggtataccatacccaacgggtatgggcatgggtatgaatttctacccgccaattctatcgggtatcaatcgggcgggcaaaagcgggtcaggcataagcctgacgcaatctttatctgtaatgtcaactaa

SEQ ID NO: 13246 - DNA, 681 bp, Oryza sativa
  Clone ID: TFbOSC400553j.C1.o12.fg
atggggctaaacgagaagccattggtgcctccgttgtctccaacgccggtggacttccgagcccatcaggtgttcccatccaagcaccacgattttgacactagcaagagtcgtaacatctctggtagtgtcgccatcggcagtgattctgaggaggagtacttggcgacttctctcttgatgctcgcacatggcattcgggacgagaccaaggacatccgagggatgggagacgtaaaaggtgtgggtgttgacactttggagctggtgaaaccaagccaacgggcttatgagtgctcggtgtgtggcaaggtgtactggtgttaccaggcgttgggtgggcacatgacgtgccaccgcaacctatttgcacaagtggtggccggtgatgagttgtcctccgataggaccatggtggttaaggggcacaagtgctctatctgtcgccttgagttcccatctgggcaggcgctaggaggacacatgcgggtgcactatgtgggtggtgttgaaggaggctctgtcaaggagaagaacgttgtgaagaccaaggttacaggagcactgaagctagtgttgaaagactttgacctgaacgtgcctgttgtggcaacgatggtgggagacgaggctgagagctcacattcagaggccaaagcgcggatgatgacactcccctaa

SEQ ID NO: 13247 - DNA, 1464 bp, Oryza sativa
  Clone ID: TFbOSC400431j.C1.o50.fg
atgatgctcaaggatctggccgaaattcagcagcagcagctgctcgccgccgccgaggagaacatgtcgaacctgacgtcggcgtccggcgaccaggccagcgtctcgtcccaccccgctcctcctcccgccaagaagaagcgcagcctccccggcaacccagatcctgaggcggaggtgatcgcgctgtcgccgaggacgctgatggcgacgaacaggtacgtgtgcgagatctgcgggaaagggttccagcgagaccagaacctgcagctgcaccggcgagggcacaacctgccatggaagctgaagcagcggaaccccaaggaggtggtgaggaagaaggtgtacgtgtgcccggaggccggctgcgtccaccacgacccggcgcgcgccctcggcgacctcaccggcatcaagaagcacttcagccgcaagcatggcgagaagaagtggaagtgcgacaagtgctccaagcgctacgccgtccactccgactggaaggcccactccaaggtctgcggcacccgcgagtaccgctgcgattgcggcaccctcttctcccggcgggacagcttcatcacgcacagggcgttctgcgacgcgctggcggaggagagcgcgagggcggtcacggcggcggcggcggtggcggggcagcagcagcatggcggcgggatgctcttctcgcaggtggcggatgtgcttgatcaccaggcggcgatggcgatgggggggcatgggctgatgcaagagctgtgcctcaagagggagcagcagcagcagcagcagcagttcgcgccgtcgtggctcacggcgcagcagcagcagcagcagctggaggcgatggccggcgcggggaatccggcggcgatgtacgggtcggcgaggctggaccaggagttcatcgggagctccacgccggagagcggcggcgcgcagcaggccggcctcagcttcgggttctcgtcgacgtcatccgcgccgccgcaccccgccgcctcctcggcgcacatgtccgccaccgcgctgctgcagaaggcggcgcagatgggcgcgacgctgagccgcccgtcgagccacgcccacatggcggcggcggcggcggcgagcacgcacaacagcagcagcagcgccgccaccaccaatgctccccctcctcctcctaccagcaacgtgtcgagcacttgcgtcggcgccggcggctacgggctcgccttcgaagcgtcccacttcatcgcagcagacgagagcagcaggggcgccaggtccgatcgtgacaccggcaatggcgtcgccggagccggcaacgacggcctcaccagggacttcttgggtctccgagccttctcccacggcaacataatgagcatggccggcttcgatccctgcatgtcgacgacgtcggcgtcgtcggcggcgccgtacgaccaccaccaccacagcaacaagccatggcatagctag

SEQ ID NO: 13248 - DNA, 645 bp, Oryza sativa
  unsure (1)..(645): unsure at all n locations
  Clone ID: TFbOSC403427j.C1.o1.fg
atgtggaacctgacgtcggcgtccggcgaccaggccagcgtctcgtcccaccccgctcctcctcccgccaagaagaagcgcagcctccccggcaacccagatcctgaggcggaggtgatcgcgctgtcgccgaggacgctgatggcgacgaacaggtacgtgtgcgagatctgcgggaaagggttccagcgagaccagaacctgcagctgcaccggcgagggcacaacctgccatggaagctgaagcagcggaaccccaaggaggtggtgaggaagaaggtgtacgtgtgcccggaggccggctgcgtccaccacgacccggcgcgcgccctcggcgacctcaccggcatcaagaagcacttcagccgccagcatggcgagaagaagtggaagtgcgacaagtgctccaagcgctacgccgtccactccgactggaaggcccactccaaggtctgcggcacccgcgagtaccgctgcgattgcggcaccctcttctcccggcgggacagcttcatcacgcacagggcgttctgcgacgcgctggcggaggagagcgcgagggcggtcacggcggcggcggcggtggcgggnccaccagcagcagggaggcgggatgctcttctcgcaggtggcggatgtgcttga

SEQ ID NO: 13249 - DNA, 744 bp, Oryza sativa
  Clone ID: TFbOSC423167j.C1.o3.fg
atggcggtggaggcggttcttgaggcgtcgagaagtagtagtgaggaggaggcggaggtgatcgtcacgcacggcggcggcggcggcggcggaggaggaggaggacaggtggaggggtgggggaagcggaagcggtcgcggcggcggcgaccgcagctgccgccctccgaggaggagtacctcgcgctctgcctcctcatgctggcgcgcgggcgacgcgacggcgacgacgtggcggcgtcggcgtcggcggcggcggcggcggtggagcaccggtgctccgtctgcggcaaggcgttcgcgtcctaccaggctctcggcggccacaaggccagccaccggaagccgccgccgcccgccatggtcgacgacgacgaggtggtggtggagacgaaaccggcggctatcgcgacgccgtcctcgtcggcgtcgggcgtctccggcggcggcggcgggagggcgcacgagtgcaacgtgtgcggcaaggcgttcccgacggggcaggcgctgggcggccacaagcgatgccactacgacggcacgatcggcagcgccgccggcgccggcgcgtccaagccggcggcgaagacgaccgtggcggtggcggcgagccggggcttcgacctcaacctgccggcgctgccggacgtcgccgccgccgccgaccagcggtgcgcggcggaggacgacgaggtgctcagccctctcgccttcaagaagcccaggctcatgatcccggcatag

SEQ ID NO: 13250 - DNA, 513 bp, Oryza sativa
  Clone ID: TFbOSC408704j.C1.o5.fg
atgaagcacccgaggcaggaggaggaggtgtcgctggcgctggcgctgagcacggactgctcgtcgacggcgtcggactcgtcggcggcggcggcgggcggcgcggcgaggaggaagagggcgcggcggaggagcgtggtggcgacgtcgggggaaggggagttcgtgtgcaagacttgcagccgcgcgttcccgaccttccaggcgctcgggggccaccggaccagccacctccgcggccggagcaacgggctcgacctcggcgccatcggcgacaaggcgatcaggctgcacagggcggccgacaaggagcacagggacaagcacgagtgccacatctgcggcctcggcttcgagatgggccaggcgctcggcggacacatgcggcgccaccgcgaggagatggccgccgccggcggtggatcctccgccgacgactgggtctggcgctgcgacgcgcggccggaggggatcgccgccgagccaccggtgttgctggagttgttcgcctag

SEQ ID NO: 13251 - DNA, 1605 bp, Oryza sativa
  Clone ID: TFbOSC401275j.C1.o27.gm
atgcctacctcctcccccgtggtggccactgtcacatgcgcctcgtctccacgctcctcccttgcatcccttcgcctcccgctccatgaccacgcggtcacgctcgtctgccgtgtccatccctctgtgtccctcaaggctacgctgcggatccacggcgtgggtaggggcggggctgggctcggtcgtagctacattcctaggagagagaggggagaggtggagagatggggaaagaggagagaagggaggaggaagaaggtcgagctcgtcagctcccttgcctccctcctcttctcctcctccaccatagaccaccgaagcctcctcatcgtcgacctctcactgccactgcccctctccccgctggagttccaattcttccagggggtggagcaagagatgctcttgctatcccatggcggtggcggcgcggcggcggctgcctcggacgacgtgctcgcctaccatgtcggggtgctaagggacaaggtgcagcagctggagccgctggtcggcattgtcgtcgtttcccccgccgcgccgcacggccagctccggcgcgacgcggcggcgatggcggcgtcgagcgcctgctccgtcctgcaggagataactgccgccggctccgccgtggcgcaccggctggagcaggccaacgccgcctcctccgcctccttcaggcgaggagtggctttcgccgacgacgcacacgccgccggtggcgtgcagatgttcgcggcgggcgcgcacggcggcggccaaggcggtgatgacgaagccggcgcctcgctgttccaccaccacgggccgccggccgtcggcgcgcccaccgtgttccgcgccggcgccacgacgacggcggccgcgtcgagcagcggcggcggagacgacgacggcgacggcgacggcgaggtggacgtggtggagctggaggcgtcgtacctgctggcgaggtacacgcactactgccaggtgtgcgggaaggggttcaagcgcgacgccaacctgcggatgcacatgcgcgcgcacggcgacgagtacaagacggcggcggcgctgacgagcaccggcgccggcatgagggcggcggcgaggcggtgcagctactcgtgccccgcggaggggtgccggtggaacaggcggcacccgcggttccaggcgctgaagtcggtggtgtgcgcgaagaaccattaccggcggagccactgcccgaagatgtacgtgtgcgggcggtgcggcggcaagcagttcgccgtgctctccgacctccgcacccacgagaagcactgcggcgagctccgatggctctgctcctgcggcaccttcttctcccgcaaggacaagctcatgggccacgtcgccctcttcgccgccggccacgcccccgtgcccgtcgcgccggaggcgtcgccgtcgacgacgaccaccggcaccacgacggacagatcaccggtggcgggcttcgctggctcgacgacctcgtgcggcgctgcggccgacgagaaggcggagcgggcgggcacgaggcgcggcggctccctctcatcctccactgccttcctcccgagtagatctggccgccgctccaccccacacgcgtag

SEQ ID NO: 13252 - DNA, 1020 bp, Oryza sativa
  Clone ID: TFbOSC20545j.C1.o8.gm
atgggagagcgtcccctcgccatcgccgccggccgtgaccccatgttcgtcaccgcctacgccgtgcacccggacggccacgacagcgacttcctcgacttcctcctcgagctcatggccgtcggcaagatgaaggagcgggtcaacgtgctcattagtttaccgacgatggaagtggccaccaatacggcgacacgatcgccggtgaagctaatgctggtgctgacactgtcgccggcgagcaaggtgatcgccaagggcggcggcggcgtgaagcgggtgcacctcgacggcggcgcgttccagtgccggacatgcgggcggcggttctccacgttccaggctctcggcggccaccggaccagccacaagcggccgcgggtgcgcgccgacggccttgacctcctcctcggcgcgcgccccggcaagctcggcgccggcggcgcctcgacgccggtagtgcaccggtgcgacatgtgcggcaaggtgttcgccaccggccaggcgctcggcggccacatgcgccgccaccggccgctggtgagtcgtaatggcacaatgtccacgacgtggacggcggcggcggcggcggcggcgacaatgtccggctcctcgtcggaagagcgtgacgacgacgacgacgacgacgtgcacaattataatttcatccactttttcgacgtcttcgtcgtcgtcaccgccatggaccagcaggaggactacactagtgatctgcagcttgagctcgaggaagaagaagacgataaccaacttagccagctcgcggagctcgacgtgcagctctcgctgtcgctggcgtgcggctcgacgacggcgatgtcatcgtccggcgatgaggaggacgcggagccacggcgtcgccggcgggacgaggaggcggcggcggcggcgttcgagtgccggacgtgcgggcggcggttcccgtcgcaccaggcgctcggcggccaccggaccaatgggccaggccctaggtggccacatgaggaggcatcggcctag

SEQ ID NO: 13253 - DNA, 546 bp, Oryza sativa
  Clone ID: TFbOSC100641j.C1.o1.fg
atggcgctcgccgccgcggcgcgcggggagagcaccgcgctggcgctggcgctggcgccgccgccgccggagctccacttccggtgctcgctctgcggcaaggcgttcgcgtcgtaccaggcgctcggcggacacaaggcgagccaccgcaagccatcggcggcggcggcggcgccgcccgcgcacagagacgtcgtcgttgctgctgctccggcatcatcaggccgcgtcgccgccgacgccgacgccgcctcggaggcggacgggcggcggcggcggcacgtctgctcgctgtgccggcgaggattcgccaccgggcaggcgctgggcgggcacaagaggttccactacttgcatggcccatcggtgtcggcgacggtctccagtgcagcgacggcggcgagcgtgggcgccgctttcgacctaaacgtggcgcccatcaaggagatcgccggcgagcaacgacggtgcggcgaggaggccgacgacgacgatgaggcggagagcccttcaccggccaagaagccacgacgccggccaggatga

SEQ ID NO: 13254 - DNA, 984 bp, Oryza sativa
  Clone ID: TFbOSC400255j.C1.o6.fg
atggagggcaagtccagcagccgccatgccgatccactggaagaggtcgagatgaattcggcttctgcgaccgaggacgacgacggctgccggtatgtgttccaatcccgccgcgacagcgacaacgacaatgacgacgaggagggcgtgctgccggcgacggcctgcaagcggcgccgccgcctcgacgacatcctcgcgctgcttccttcgccgcccacgccgtctacctcttccggttcggaggggacgatcagcgaccgcgaccacggcggcgacgtgatcggcgccggcgacgacgacgctgcccccgtggcggcgcgacgagaggcgtcgttcccgtgccacttgtgcaacaaggagttcggcagcaggaaggcggtgcacgggcacatgagggtccatcacgccgagaacgagaaggagccgatgtcgctgccgccgcaggtggcggcgcccgttcatccccaggctcggctacccacacgcggagcatcacgatcaggtggaccgtacaagtgcaagtacgagggttgcatcatggagtacgagtcgcaccaggggctaggtggccatgtcgctggccacatcaacagggacaagatggccaccgccagcggcagtggcggcgccggcaagccaaagggcaagcacccgtgcaacgtatgcggcaaagagtacccgacaggagtggcgctcggtggccacaagaggaagcactacaggaaggaccttgatcttaccctctccctcgcaccgcccggacaactcgccgcgccgcctacacctacacctgctcctgctccagcggccatcgccgcggtggaggcagaagcggaggtggctgaagatggagatggaggagagctagtgccgacaactccgccaaccggagctaggagaaatgtggtcgtgcggatttggggcgttgatttggagaagccggtagatgatgtagaggagcaagatagtggcagcaactaa

SEQ ID NO: 13255 - DNA, 597 bp, Oryza sativa
  Clone ID: TFbOSC416144j.C1.o5.fg
atgaagaggtttgcattcgaggacagcgatatggcgcgcgtgctgatgctcatgtcgtcgcacgggcagcaggagcaggcgctggctctgccggtgccggtgcagctgccgctcgccgccgcgcgcggcgaccgcgccccggagcgcgcgttcgtctgcaagacgtgcaaccgcgtgttcccgtcgttccaggcgctcggcggccaccgtgccagccacaagaagccgaggctcgacggcgacggcgacctctccctgtccaagcccaagctccacggctgctccatctgcggcctcgagttcgccattggccaggctctcggcggccacatgaggcgccaccgcgccatgaccggcggcatgccgcgggcgatcgtcgtcgacaagaagcccgacgtcgtcgacgtccacgtccacggccacgacgacgacggcggcatcaagcgcggcggcctgtggctcgacctgaaccatccaccctgcgacgacgccggcgacgacgacgccgagtgcggccacaatgccgccggcgccggcatcacgttccaccagttcttggataccggagccatggccgttgactgcgtcggctactag

SEQ ID NO: 13256 - DNA, 546 bp, Oryza sativa
  Clone ID: TFbOSC420432j.C1.o4.fg
atggcgagtgggcaacgagcggtcggcgaggggagcggtggcctccgcccgacgacgcacgtcgcgggcggcggcgggagcgcgcgcggggagtatttcaggtgcaagacgtgcagcaagacgttcacgtcgttccaggcgctcggcgggcaccggacggggcacacgcggatggcggcgcggcagcggcaggagcacggcgccgcgggggccgccgtcgtgggggctaccaacaaccagcggcgggtggtttccgcccaccagtggcacctgtgcgccgtgtgcggggtcgagttccgcatggggcaggcgctcggcgggcacatgcggcggcacagaggcgaggcggcagcggcgacgccgccgccggcggctgcggctgcgagcgccggcgccgtgtccagcatggagccgccggagatgatcgacttgaacagcccgccggcggtcgaggaggccggtgaaggtgatcagaggttgagcgtgcggaacaggagccccatctgcttaatctgctcgtgtagggtggtgttctctgtttggtga

SEQ ID NO: 13257 - DNA, 936 bp, Oryza sativa
  Clone ID: TFbOSC101382j.C1.o3.fg
atggccaagaacacatgcaagctctgctaccgccgcttcggcaacccccgcgccctcgccggccacatgcgctcccactcagtcgccgcctcgaggtcgcagatctcctcgacgtcctccgcgtccacatccgtcgcggtcggcgacgacgacggcggcggtgatgccaagaggcccatccagggatacgtgctgcgggagaagcccaagcggagggtccgcctcgccgagtccgacttctcggatcgcgagagcgagacggagtactactcctcgccgcctcacggcaagcgcgcgaacaccggatcgggcgatgtcgagcaggtgagctcggtgtccgacgccacgtcggaggaggacgtagcgctgtccctcatgatgctctcccgcgacacctggccagccacgccgccgccgccgccgccctaccgtctccgcggcgcaggctacgacgacgggagcgacggtggcgacgcacctccggctccggccgcagcggccgcgcagaagcggacgcggttccagtgccccgcatgcaagaaggtgttccgatcgtaccaggccctcggcggccatcgcgctagccacatgcgcggcggcaggggcggctgctgcgcgcctccgcctaaccctcctccttctcccgctacgcctctccagccattgccggagtgcgacggcggcgaggaggagggcgcgaagccgcatccgcacgagtgcccctactgcttccgcgtgttcgcgtccggccaagctctgggcggccacaagcggtcccagctgtgctcagccgcggcggcggccgcatcgggcgacgatattccagccatgattaaaagcaacggcttcattgatctgaacctcccggcgccgttcgacgacgtggagctctccgccgtttcagatcctttcctctcctcgaagccaggttcttga

SEQ ID NO: 13258 - DNA, 1414 bp, Oryza sativa
  Clone ID: TFbOSC14402j.C1.o1.gm
ccgcgcggcgcagccggagagcacgtgcagagagatggccgtcaactccggcgatcgcgcgcgcgcgcgcgggcaccacggagacgacgacgaggagggtgtggccgtcgtcggcgaggactacccctactgctctgactcggattccgacgacgacgacgacgtcgaccgctacgtgttccttgcacgccagcccgcgccgccggtggaccgcgacgatgccgaagccgacgccggggcggaaggaacgggttgttgcaaacggaagaggcgcgtcgtcgacgacgacgaccatgatgacggtttctcgccgcgccagccggcgttgctggatggcagcggcggccaagcggcggaggaggaggaggacgccgaggggagctctgatgatgatgacgcaatggcgccgcgtggggaggcaggaggcggcggccgcggccgcggggtcgggaaggtatcacgcaagaaggctcgactcgtcgacctgatcagatcgccattgttgccggccgagctggatggttcggataaggcggcgccgccacctccgcgcggcgtgtgtcccaagaagatcgcggtggtggtgcaggcgaagaacaggaagcgccgcaggttcgtcgacggtggcgaggagcaggagccgcagccgcagccgccggtgcgcggcaagagaagcagaggccctgacctcgaggcgagcgagggtttgcaaacggcttcggcggcggcggcggcggcggcggcagaggcggcggagagagcttccaagcgcttcgtctgcagcatatgcgggaggtgcttcggcagccaccaggcgcttggcgggcatgtcctcggccacaagaagaaagccaagaacgccgccattgccgccgcagcgcgcgacgccacgacgacggcggtcacggaggccgtggctccagcaagccaaaggcaaagcttcttcgccgccgacatcaacggacaagacgagcgtggatgcgatggcgccgagggcagccgctacgacgacgacgaggagaagagccccgtcgtcgttgacgacgttgcagcatgccatgacgcggacgtcgacgaaagccgcggtcacggtaaggccgagtcggcctctgccattgatgccggcggggacgcgggcaacaacaaggtcgcccatggtgacggcgaggagaacgacaagatcgccggcgtcgtcgttgcatcaagccacgacggcgatagcgacgtgggcaagatgaagatcgtgcagcacaagtgcgacgagtgcggcaaggtgtgcctcacggggcaggcgcttggcgggcacatgatcaagcaccggcggacgcgaccggcggccaacggcggcgaggggcctgcaactgcaacggtggcggacgggggagcccaaactgttcggctgatcggcgacgat

SEQ ID NO: 13259 - DNA, 741 bp, Oryza sativa
  Clone ID: TFbOSC407916j.C1.o1.fg
gccttctcattggattttaacctgcgttcgcatctaaaaacgcatgcgttggaaaactatcatgtatgcccatttccagcatgtggcaaaagatttacgagtgactccaaattaaaatcccatgtcaagggccatgaaaagactggaactccgatcacagcacaatatgtgccatcatcagataaaccacaaagcagcagtaagcctgcgacaccagcaacaactaagcctacaacaccagcagcaacgaagacgacaacacctgcatcaactaagcctacaacaccagcacccacaagctttgctgagcgaccatatgtctgcccatatgatggttgtgggaaagcctacattcacagttacaaattgaaccttcatctaaaaactcagcatcctgaacatggtcaagaagagaatggtaggattgctgcacatgcaagtgagcatgctgtaaatgatcgtgccaatcagtataactatgctgagattgtcgaccttgcaccgaatccaaaaaggagcaagacaaattcagggcataagaccccctcatctaataaagcctacaatgtcaagatttctagcgtgttgcctgctgatatcagtggagtgaagaatcagtggccaggtaagtatgaagatgacagtgaagagacagaagaagaccagggcaacaacattgaagatggctggagatatggtaaccagaatgccgatgatgaggaaacagaatatgaagattaa

SEQ ID NO: 13260 - DNA, 2235 bp, Oryza sativa
  Clone ID: TFbOSC410041j.C1.o2.fg
atggcacaagcagaaaagcagcgctggtgcaagctctgcaacaagagcttcccttcatattgttcacttggaggccacatgaacctccacagcaccaggcgcaggaagaagaagccgccgccgagcccgagaaaggctccaccgatcactggtgcctccggcagcaggtacgatttccgggagcggtgccgccagaggccggtggcgccgcagagccagccggatcacgcctccagcgacgacgagccatggacgctggcccccaaggccgaatgccagctgtgcttcaaggctttccactcctgcgacgcgctgtcgatgcacatgaaggcgcatggccaccatgggaggaagatggtgatggtggagcagagggcatcgagaaagacttcttctgctaatttctgcggtgttgatgatggtgaccatggttttgctgctgtatcttatgctcactgtaagagagcgaggtcgaagaggatccgcatggacgttttccctgccccggtagtggtggtgacacatgggacacaggtggaggatgctgcctgcattcttgtgatgctttcaaaagatgcttacaagggctcagattctctggatgaagatcctcagatggatggaagcttggaatgcggtccgcagaagactgagatggagccgagttcttatcgtcttggtgtaactggtgatactgagctgataaagccagaaaattcaagttcttatgaggagatcaagtttggcagtctttcaaatgtgttgaaggcaacagctatccatgagtgcaggctctgcggcaaggtcttggcatctggatctgcattgggaggccacatgaagtcccacagtgttcctgctcataaaaaggttgcaacatttcccaaaacttctgtgactccatcaagaaaacagctgcttgaagtgcaaaatgagttgcatgaactcaaccttccagctctcagtaacagggactgcagcagtacaaggacagagtctgaactgaacccatggtgggttgcaagcagcattcagattttacttcttcaatacttaaatgtcatgagaagtattaaaatgaaacatgacaagttatgggatcttacaaattttccggttaagctaccaaaagatcacagggaaacacctccatccagcatgcctcatggcagcgacggtgcccgctggcggcccgtcccgcacgaagcgcctcccctcccactgcctcgtctccgacgagaagacggacaagaaaaacggcgacggtggccattccgatccatcgctcgtggggtaaaactcatcgtccctgcgcctgcgcctgcgctcgcgctcgcgaggggcaacgtgctcgcggacggcggcgaacctggcggaggccgtgctcgcgacgtggcgcgggtggcggcgtggcaactggcagtctggcagccgctcccaccgccgtgtcgccgggtaggtcacgcagttgttgaccagcacgaggccgttgcagtggtcggtgatgttgatcgagggcatgtggcagtcgggcaaggtggacctgcgcctcgtgtagtcgacgttgccggagacggcgccgccgccgccgccgggtggcgtggtggtggggcaggagaagaactgcgtggggtagaagaggtcgtggaggttgaggaagatgccggcgagggagagcgggaggaggtcctcgcggaggcggtcgtcgatggccgcgcgccacgacgtgcagatgcggcggcatgcggcgaggctgcccagtgggaccgtgggagtcgccggaggacctccgcgatcatgtcgtcggttggcatgcaagaaacaagggatatccattcgagagatgaaatcactttcgcagaggatccaatctcgtggaagcccaaactcgtcatcgccgccgtcgcgaggaggagacaggtggagacacgagaaggaggcttacgggtgggaaccgcaggcagaggcggcgccggagagggcctcaagctccctggtagcggctgcagcgccatgaagatgctctttgcggagtggagcagaaggcaccatcgctggagagggctccgagatcgccggcagtggcagagccacacgaggggtaggctttgtggatgctgtgccgtgagcaggcttcgtgcgaggttgagcggaatgcgtcgtggccggagagagctccaagctagccggcagtggcagcaccgccgtggggaggctggacatgagacggggtga

SEQ ID NO: 13261 - DNA, 1902 bp, Oryza sativa
  Clone ID: TFbOSC400615j.C1.o24.fg
atgccacccaatccgacggggacggagggggagcccgggccggcggtggagccggctccggcgggggcgggggcggcgccggtggtcaagaagaagaggaatctccccggaacgccagatccggacgcggaggtgatcgcgctgtcgccggggacgctgctggcgacgaacaggttcgtgtgcgaggtgtgcgggaaggggttccagcgagaccagaacctgcagctgcaccgccgcggccacaacctgccgtggcggctgcggcagcgcggccccggtgcggcgccgccgcgccgccgggtgtacgtctgcccggagcccggctgcgtgcaccacaaccccacccgcgccctcggcgacctcaccggcatcaagaagcacttctgccgcaagcacggcgagaagcgctggacatgccagcgctgcggcaagcgctacgccgtccaggccgacctcaaggcgcacaccaagacctgcggcacccgcgagtaccgctgcgactgcggcaccctcttcaccaggagggacagcttcgtgacgcatcgcgccttctgcggcgcgctcgtggaggagacgggcagggtgctcgccgtgcctgcgccgccgtcgcctcgcccgcctgatttggaggccgaggagaatgtggataaggataaggataaggaggaggaggtgaaggagaaggagaaggagaaggagctggaggagaatgaggattcacctgtggccgaggtcgatgagccgcagcccagccaggcggtggcggaggtgccgcagcagtgcgctccatcaccgccgccgccgcctccgatactgcaggagcatcctcagccggtggtggcagtggtaccaaatgtggatgagcaagaggtggttgctaagccagcagtgattgccaagatagaggtggaagatgagcgagatgaggaggtttgctttcaggaagtggatcgatacaaagatgctgaactggaggactcaaacctgctggataatgacactccgatgctgccttgtttccttccctcgccctcggaggccattggcacagatggcagcagcaccagctgcggcacgggaagcagcgttaccaatgctatcgctccagctacgacgacgagcacgttcgctggtctgtttgcgtcggtcacaacgagcagcactccccaaagcagatccctccgcgatctcatcggcgtcgatcccacattcctctgccttgcaattggtgcgccgtcttctctcttcccacagacaaatgcaagtgacccctgctcctttgctccacctccagcaccgcacatgtccgcaaccgctctcctgcagaaggctgctgaggttggtgcttcgcaatcaagctcatctttcctgaaggagtttgggctcgccgcctccacctcatcgtctcccccatccaagctatcccaagggaggttcactactggtaacacaccaacaacatctcatccacatccacatccacatccgcatcctcatccgcctcaaggaaggttcatggataacgtcccacagccgccaccgccagccaagctgccacatcgaatgttcaccgataacagtgtacaacagtggcaccataggagcaaccagcaaatggaaatggagcctgggccgatgctacctggcggtcttggccttggtctcacctatgacactgggaattcagggttgccggacttgatgatgggaccatcggcactgtacggtcccaagcctgccactctggacttccttgggcttggcattggagggaccatgggtggctccactgcaaatggtggcctcccggcattgatggttggaggagagctggacatggggtctgcacaggcgccatgggaggaggccaagagaaagaccaacggccgcacaatcctgtga

SEQ ID NO: 13262 - DNA, 2142 bp, Oryza sativa
  Clone ID: TFbOSC401140j.C1.o27.fg
atggctgctagtggccaggtccagtgcctccttcctctccgcgtcgccttgtcaccgccgctgccgccgtggccgccggcgacgatggttatgccacctcttctcgccgccgccgccgccatggctgctagtggccaggtccggcgcctcctttctctccgtgccgccttgccgtcaccatggccgctggcgacgatggctccttcctcttctcgccaccgccaccatggctgccggtgcccaggcttccagtacgcttttgtcagagaaaaggctgcaggagatcacctgtcacttgggtacatgcagcatggagataataacaataaaaagaagaaaggggatttgtccaataacctcgatctcagctcatcacctcttctcatggactctcgaggtcaagcctactaccacagggcggcggcagcggcggcggcggtggccgccggtgatgctactgacggtgaggagccagctgctgctgagctcgctccgaaggctgtgagatcgaagaagaagctggcggtggaggcgcaaggcggcgccgccgtgcgcgatgatctgacgtgcccagagtgtggcaaggtgttcatgtcggacaaggcgatgtacggacacctgcgatctcacccactgaggaagcacaagggggcggcgcgcctggcggcggtggcggcggcggcggccgacgatgcttccgtggccgctggggtcaagccgaggccgtggaaggtgccacggacgaaggaggaggctgagctcggcgacgaccgccacccggggaggtcgccggtgacggggaagcgcgggcggccggcgtcctcggccagtagcagtggcagcgcgcccgcgcccgcgccgcccgcgtcgtccaggctgcagctggtgatcacggaggaggaggaggcggccatgactctcctggacattgcctcggggtgctcgcttgatcaccagcctacgcaaccggcgcatgtcgccgacgccgccctcctggcgccggcttcggaccagatgccaagcgtcgacgtcgagcaaggcgtcctcgccgtcgcggagcacaggacgtgggaagctgagaagcctgcgctggtcgaacatgtctttgggatcgtcaaggagcatgtcgccgcggtcgccgccgacgccgagccgcagtcgccggaggcgaagacgccagtgaagctggggcctgtgaccgatcaggctgtccctgttctcggcgacaagaacgacgacggccacgccgacatgcccgtgtcccccggaggcggcaccaccaagaagcctttgaagcgaagactccaggacgtcgagacgaagcatcccacagcaccgccaccgccgccggtgaagcgcatcccgtcgccggcgtcgaaaaggaagtacgagtgttcggagtgccacaagacgttctccactcaccaagccctaggcggtcacgtagcggcccacaagaggcagaagaagagctgcgccgagcagcagcaagaggcggtggcggcggcggcgcaagtcgcgcggcacaacttcctggctcaccagcgcccggccggcgtcgtcgtcgccgtcgacgccaccgtcgtcgctgctgccggcggcggtatcgccatcgggcctctcggcgaggagggcttggtcggcccaccgccgccgccgccgccgccaccgccgccgcccgcacccgcgcctgcgctcgcgcccgcgccgcagcaacaccagtgcttacggtgccccatggtcttccccaccgggcaggctctcggcggccacatgcggaagcattttctcgaggccaaggagcaggagcagctgctcgccatcgacatcgccaacgccaacgccaacgccaacgccaacgccgcgccggggccgccgccgatgatggccaacgccgcgccagtgccgccgccgtcgatggccaacggcgccgggcccgtgccgccgccgatcgccgtcgcccctcctcccgcgccgccgatcgccggagccgctcctcctccgcccatggccaacggcgccgcggcggctgcgccaccggggggcaacccggcgccacctgctgggccgcagccgggcgtgaacatgtttgacctcaacgagttgcccaacgaggatgcaggggagaaccagcaaccctag

SEQ ID NO: 13263 - DNA, 969 bp, Oryza sativa
  Clone ID: TFbOSC101916j.C1.o4.fg
atggaggactacgcccaaaccaacctgatctcgagaggccatggccatcatcatcaacccgagctcatgaaggaattccctttcctcagcctcatttcatctacctcttcttgcatcagcagcagtggtcagcagcagcagcagcagcaagatgatgatggccatggcggccatgatcgtcatcagctgctccggtacggttgctgcagctgcaacaaacagcaggaggaagaggaggaggaggtcacggttgccttgcgcataggcctaccggccgtctcgtcggcgtcggcgtcgccgtcgccggcgatggcgaaccatggggctagtgcttctagtacaggagttgctggagatgatggcggcggcggcgccatggccggcgtgggtgtggaggtggagagcgtgcggaggagcggcggcggtggcggcggcgggcagtactggatcccgacggcggcgcagatcctcgccggcgccacccagttctcctgccccgtctgccgcaagaccttcaacagatacaacaacctccagatgcacatgtgggggcacgggtcgcagtaccggcgaggcgggacggcggcgctgcgcggggcgcagccgacggcgatgctccggctgccgtgctactgctgcgcggcggggtgccgcaaccacatcgaccacccgcgggcgcggccgctcaaggacttccgcaccctgcagacgcactaccgccgccgccacggcgcccgcgacttcgcctgccgccgctgcgccaagcgcttcgccgtccgcggcgactggcgcacccacgagaagaactgcggccgcctctggcgctgcgcctgcggcgcccacttccgacacaagcgctccctcaacgaccacgcacgggccttcggcgccgcccacgcccacgccggcgccggcgccggcgccgaagacgacggccgcgccgccgccgccgccgccgtttgggtgtga

SEQ ID NO: 13264 - DNA, 351 bp, Oryza sativa
  Clone ID: TFbOSC101916j.C1.o6.gm
atggccgctcgccccgccattaaaatcccccgcgcgcctcgcctcgcctcgcagctcaacgccaccaccgcgcgcctgcagcccgagaagccgtcgatcgacaacatcacccgtctcctcccccaccccgcagagcccagcacttcgccgccgccgcccgggatggagatgaagaagatcgcctgcgccgtgctgctcgccgtggcggcgtccgcctccgcggtcgaggcctccgagtccccggcgtccgcgccgggccccgggtccgccagcggcgccaccgccgtcgcggccgcgcccgccgccgccgccgccgtcgtgctctccttcctcgcctactgcctgcattga

SEQ ID NO: 13265 - DNA, 1029 bp, Oryza sativa
  Clone ID: TFbOSC401275j.C1.o2.fg
atgggcgtccaggaggaggccgcgctcgccgccgccgtcgtcaagggcaagcggagcaagcgccagcgggcgcacgcggcggtggtcccgatcgccgcgtcggcgacggcggaggaggaggagtccatggagtcgtcgctgtcgctgtcgggcggcgccgcggcggaggggtcgtcgacgacgtcgccgttgttgacgacgacggccgcacggggcgacgaggccgtgtccgggtgcgtcaccgaggaggaggaggacatggcgctctgcctcatgctgctcgccagcggcggccacggcgagcgcgcgccggacgccgaggcggtggcggcgaaggaggccaagttccggagccggcggccggcggacggcgccggcgccggggagttcgtgtacgagtgcaagacgtgcagcaagtgcttcccgtcgttccaggcgctcggcggccaccgcaccagccacaagaagcctcgcctggtcgcgccgccggcggccatggaaccggcagccgatgacaagatcaagccgaccatcccggagacagccgccgccgccgccgaggagaagccgcccaagccatcgccgccacgaccaccggcctcgaggccgatcgccaccgatccaacagtgctcgcgatcccggtgatcccgaagcaagaagtgctcgacgccaccaactccgccgccattgccagcgtctccaagcagccacgtgtccacgagtgctccatctgcggcgccgagttcgcctccggccaggcgctcggcggccacatgcggcggcaccgcccgctcataccggcgtcggcgtcgtccgcggtggtgtccgtgctcgacgccgtcgacgcgccgaggcagaaggagaagagcctcctcgagctggatctcaacatgccggcgccctgcgacgacgcgaccgccgagacgacgacgacgtcgtccgccgccacctcgccggcgttcgccttcgccgtcagcgacaggtcgccgctgctggtgccggcggcgctggtcggctgccattactag

SEQ ID NO: 13266 - DNA, 921 bp, Oryza sativa
  Clone ID: TFbOSC401513j.C1.o15.fg
atggctaatccaagcaaagatcacatcttccccaaccaaagaagcctaatctctcaatcctcctctccccacaattcccttcctaaaaaggaggaaatccctcttctcagcctcctcccttcaatccatgatcacaacaagatccatggctgttataagcaagagaaggaagaggaggtcatggaggatgtggacatatcactccaaattggcctgccttctcctgatcctaacagctcggtcatcgatttcgcgaagagcaatcctctcggcgcgaccgcgacgacatcacaagagcttgatggtgatgatgatgatgatcacaaggtggaggtggagagggaggaggaagaagaagcagctagtgatgacctctgcttggactacttctctatgggaaagctcaccaagggcaagtattggatccctaccccaacccagatcctcattggtcctacacactttgcctgccctgtttgctgcaagaccttcagcagatacaacaacctgcagatgcatatgtgggggcatgggtcgcagtacaggaggggtccggagtcgctgcgggggacgcagccggcggcgatgctgcggctgccgtgcttctgctgcgcggcggggtgccggaacaacgtggaccacccgcgggcgcgccccctcaaggacttccgcacgctgcagacccactacaagcggaagcactgcgccaagcccttcgcctgccgcaagtgcggcaagcccctcgccgtccgcggcgactggcgcacccacgagaagaactgcggccgccgctggcactgcgcctgcggctccgacttcaagcacaagcgctccctcaaggaccacatccgcgccttcggccgcgaccaccgagagcgccccccgcccccgcccccgcaccctctcctgccgttgccgtag

SEQ ID NO: 13267 - DNA, 810 bp, Oryza sativa
  Clone ID: TFbOSC400284j.C1.o4.fg
atgtcgagcgcgtcgtccatggaagcgctccacgccgcggtgctcaaggaggagcagcagcagcacgaggtggaggaggcgacggtcgtgacgagcagcagcgccacgagcggggaggagggcggacacctgccgcaggggtgggcgaagcggaagcggtcgcgccgccagcgatcggaggaggagaacctcgcgctctgcctcctcatgctcgcccgcggcggccaccaccgcgtccaggcgccgcctccgctctcggcttcggcgcccccgccggcaggtgcggagttcaagtgctccgtctgcggcaagtccttcagctcctaccaggcgctcggcggccacaagacgagccaccgggtcaagctgccgactccgcccgcagctcccgtcttggctcccgcccccgtcgccgccttgctgccttccgccgaggaccgcgagccagccacgtcatccaccgccgcgtcctccgacggcatgaccaacagagtccacaggtgttccatctgccagaaggagttccccaccgggcaggcgctcggcgggcacaagaggaagcactacgacggtggcgtaggcgccggcgccggcgcatcttcaaccgagctcctggccacggtggccgccgagtccgaggtgggaagctccggcaacggccagtccgccacccgggcgttcgacctcaacctcccggccgtgccggagttcgtgtggcggccgtgctccaagggcaagaagatgtgggacgaggaggaggaggtccagagccccctcgccttcaagaagccccggcttctcaccgcgtaa

SEQ ID NO: 13268 - DNA, 1246 bp, Oryza sativa
  Clone ID: TFbOSC400284j.C1.o5.gp
ttcaatttcaaccaaaattcaaactttacgctgaactaaacacaatccaagtatggtcgaatatggtctacaatatatgactgtcaaagaacaaagtgtaaaagatacaggtacagttccagtgttacaaagaaccaaggaagagctagacctatatctgtatgactgtatgtatggctatgtatcactcgcttgctctgtacaaaagcaggaacaaattaaacaatagcggcacaaaacgaatcaacgaatagtgtgtttcgactgaatttcactccctagacaaaaactctctgacggatcggatccatgcagctgctgaattacgcggtgagaagccggggcttcttgaaggcgagggggctctggacctcctcctcctcgtcccacatcttcttgcccttggagcacggccgccacacgaactccggcacggccgggaggttgaggtcgaacgcccgggtggcggactggccgttgccggagcttcccacctcggactcggcggccaccgtggccaggagctcggttgaagatgcgccggcgccggcgcctacgccaccgtcgtagtgcttcctcttgtgcccgccgagcgcctgcccggtggggaactccttctggcagatggaacacctgtggactctgttggtcatgccgtcggaggacgcggcggtggatgacgtggctggctcgcggtcctcggcggaaggcagcaaggcggcgacgggggcgggagccaagacgggagctgcgggcggagtcggcagcttgacccggtggctcgtcttgtggccgccgagcgcctggtaggagctgaaggacttgccgcagacggagcacttgaactccgcacctgccggcgggggcgccgaagccgagagcggaggcggcgcctggacgcggtggtggccgccgcgggcgagcatgaggaggcagagcgcgaggttctcctcctccgatcgctggcggcgcgaccgcttccgcttcgcccacccctgcggcaggtgtccgccctcctccccgctcgtggcgctgctgctcgtcacgaccgtcgcctcctccacctcgtgctgctgctgctcctccttgagcaccgcggcgtggagcgcttccatggacgacgcgctcgacatgcttccaccgcaattcacaaaagcagcaagcagatcgacgacttgttatatccgctagctaagcttcgctcgctcgcctcaagctagtgtggcagctggctggttgctgtgtg

SEQ ID NO: 13269 - DNA, 1485 bp, Oryza sativa
  Clone ID: TFbOSC400090j.C1.o31.fg
atgcccatgcccatcgggccaggtatccgcggatacccggacccgtgggtaaaattgccatccccgggcacacgtgaaggaactgtggtaggggagaatgagggcacacatgcgggtttaaggtggtacccgaacccggcacccgcattctcaaacccgaacccgctaagacttgcctactccactaccgcttctactgcttggttcgagtcgagggtttctccttctcccaagatggggagcgtggagctcggagcggaggaaagggaggtcgccggcggggagggggggagcaagggggcggcgcctcctgctagggatattaggcggtacaagtgcgatttctgcagtgtcgtccgttccaagaaggggttgatccgtgcccacgtcctcgaacaccataaggatgaagtggatgatttggatgattacttgggacgtggtggcggcgagacgtgcaaagagatggaccatgattgcaagcattggatcccagagaactccaaaatgcgagaaggccttgagtggactagtaccaggatggggagacccttctgggaagctccttcaagaatgcctctttcacgctcttcttcaggatggggagactctcctgagaagctccatcaagaatgcctcgttcacacactttttcagaggcccttttcctgccatgtagatggttgccccttcagctatagcaggaaggaccatttgaaccggcatctacttacacatcaaggaaagctatttgcatgccccatggaaggatgcaaccgtaagttcactataaagggtaatatccaaaggcatgttcaggaaatgcataaagatggctctccttgtgaaagcaagaaagagttcatctgtcctgaggaaaactgtgggaagacttttaaatatgcttctaagttacagaagcatgaggaatcacatgtcaagttggattatagtgaagttatctgctgtgaaccaggctgcatgaaggcatttaccaacttggaatgcctcaaggcccataacaaatcttgtcatcgacatgttgtctgtgatgtctgtggaaccaaacagctgaagaagaacttcaaacgtcatcagagaatgcatgaaggttcctgtgttactgagagggttcgatgccacctcaaggactgcaagttgtcattttcaaagaaatccaatctggacaagcatgtgaaagcagtccatgagcagaagcgaccctttgtatgtggattctctgggtgtggcaagagtttttcgtacaagcatgtaagggacaaccatgagaaatctagtgctcatgtgtacgttcaggctaatttcgaagaaattgacggggaacgaccacgtcaagcaggtgggaggaagaggaaagccatacctgtggagagtttgatgcggaagagggtagctgctcctgatgatgatgccccagcttgtgatgatggaactgagtatttgagatggcttctctcaggctga

SEQ ID NO: 13270 - DNA, 1263 bp, Oryza sativa
  Clone ID: TFbOSC900033j.C1.o12.fg
atggtgttcgatcatggagcccgtgtgtacgtagacccagatgcggaggtggtggcgctgtcgccgaggacgctgctggagtcggacaggtacgtgtgcgagatctgcgggcaggggttccagcgggagcagaacctgcagatgcaccggcgccggcacaaggtgccgtggcggctggtcaagcgccccgcggcggcgacggcggcggaggacggcggcgccgcgggtggcggcggcggcgccggcggcggcgcgggcggcggaggggcgcggaagcgcgtgttcgtgtgcccggagccgagctgcctccaccacgacccggcacacgcgctgggcgacctcgtcggcatcaagaagcacttccggcgcaagcacggcggccggcggcagtgggtgtgtgcccgctgcgccaagggctacgccgtccagtccgactacaaggcccacctcaagacctgcggcacccgcggccactcctgcgactgcggccgcgtcttctcccgaaaaattaccagaagtttaaacctgtatagtgacatagccaattatttaagaatgaagtatataatatctctatcaaatatagcaatcaaagtggagagcttcatagagcaccaggatgcgtgtaactctggacgtgtgcgcggtgaggtcgtgcccgtggccacgacgctgccggtcatccgtcccgcggcgctgcggcatcatcaccatcatccgccgccgccgccgcctgagctgcagctcctcccggcgtccaccacggcgccgttggccgccgcgttctcgtccaactccacgaccaccggctcctcctcccacgagcaacacgcgacgacgatgacaacgacgaagctgcagctctcaatcggccccgccgccgtcgtcgccgcggcgtccggcggcggcggcgcctgcgccgcggcggcaggaggggaggaggagcagcagcgggaagaggtgaggcgcgcgctggaggagaagaccgcggcggacgcggcgcgggagcgggcgcgcgaggaggccgcggcggcggagcgcgcgctggaggacgcccgccgcgcgcgccaccgggcgcgcggggagctcgagaaggcgctcgcgctgcgggaccacgcggcgcgcctgatcgcgcaggtgacctgccacgcgtgccggcagcgctcgctcgccgtgatgtccatggccgccatcgacggccacggcgcgtcggcggtggcgcgcgagcacctgaggggcggcggcgtcggcgccggcatctag

SEQ ID NO: 13271 - DNA, 1068 bp, Oryza sativa
  Clone ID: TFbOSC900135j.C1.o12.fg
atggaagtaggggatccctctggcgccctcgtcggcggggccggcggcgccggagccggaggaggagacggggatgcccgcgacgcgctcctccggttggttgctctcggcgaccgcatggccgccgtccgccgccgcatcgccgcatctatatccggagaatccgggcccctctcttcctccgacatccactccgtctcctccgagatctcctccgctgcccacctcgtcgtcctcaacgccgcctccctcctctcttccaccgtcgcctccctcccggctccacctccgcctccggctactaccgtccaggagctcccccccgtggtggtctccgtgcctcaggaacccccgcaagaagcagccaagggcgacggcgactacgacgtcgtcgagctcgacgcctccgagcttctcgcggagcacgtccacttctgcgacatctgcggcaaggggttccgccgcgacgccaacctccggatgcacatgcgcgcccacggcgaccgcttcaagaccctggacgcgctctccaggcccggccagccgaagccgcctgccggccgggaggtgcggttctcgtgcccctacgccggctgcaaccggaaccgcgcgcaccgccgcttccggccgctcaagtcggccgtgtgcgcgcgcaaccacttccggcggagccactgccccaagctctacgcctgcgagcgctgcggcggcaagaagcgcttcgccgtcctcgccgacctccggagccacctccgccactgcggcgaggaggcgcagtggcgctgctcctgcggcaccaccttctcccgcaaggacaagctgttcggccatctcgctctcttcgaaggccacacgccggcgatcgccgagccgaacaagggtgtggcgacagcggctgcagaggcatcgatttctatgatggaggaaggaggagttgaagcgaattgtgatcgagaggaggatgaggagggtggttttgatccgaagttcttccaggagtggatggaggagctcagaggtggcgctgttgcccccaattggtctgcgccgtcagaagctggacattag

SEQ ID NO: 13272 - DNA, 2244 bp, Oryza sativa
  Clone ID: TFbOSC401824j.C1.o22.np
atggtagctccaagaaaggccctccaggtcgtcgcactagaaaggccaaacctggaacagtcaaagccaattgatgaagaattgatgaagagactgaaggtcaacttgatcacctggaaaaatacccaatgtctttttgacagacacatgactttgtttgtctattttctatggaggaagaagaagccattccacatcacaagagcggttcctcttgatgctattccaggatttttatacgacgatgaggatgatgatgacgacgacgacgatgagggcgataacaatgttgaattagaggagattcgaccaagttcaactgaatgtgaatcttccatccatccagcagaagagctgaatttactcttgccaaaatctcttccgttgccaagaatatccgctgcagttgaaaggaatggaaaagccagggacaaggaggtgaaagaaggatccaacttgaaagaattgccacaaggatatttgggcaaaatggtggtgtacaagagcggcaagatcaagatgaagttgggggatgtcatgtttgatgtgaacccaggagaagagtgtaggatggcacaacatgtggctgctatcaacaccaaagagaagcattgttgtttacttggcgagatcgagagccggcatgtcgttgtgactccagatgtggactcgctgctgttgaatgacaatagagcatataatgctctacaccaggggatcagattcctagggatgaaaatggtaggaattgatagcatatttgaaacgattaccgtagatttaaaaatggtcaaaatcgatagcatctatcgttggaatgattatcgggcggcacgcattattgcccatgccgcaattcctgcgagagagaatgcatatggacgcgcggagcgaatccgcatcggagatcgagcacagatcgagcaaaaccctagttcgatcccacttgcttctcctgctcgatcgatcatggtggaggatcaggagaagtccagcagcagccctcccgttcctccgccaccggaggaggaggagatggaggagggggagattcatccgggtggtggtggtggtggtgggtactacgattcgggctccgagaccgaggacgacgacgatcggtacgtgttccagtctcgccgcgacgacgaggaggaggaggagggcgtgaacccggcgagcaagcgccgccgcctcgaggacatcctcgcggagacacggggagcgctcccgctgccttcgccgacgccgtcgtcgtccggttcggaggggacgatcagcgacgaccacggcgacgggatcgccggcgccgccgccgccgccgatgcacccgtggcgcgcgtggcgttcccgtgccacgtctgcagcaaggagttcggcagcaggaaggcggtgcacgggcacatgagggtccatcaggcggacaaggacaaggagaaggagccgtcgctgcacctcgccctcggctggacctcgacggggaagcgcggcgccaacggcaacgcccgtgctgtcaccgtcgccttcgcccccatggaacaagcggtgggcgacgacgacggcgacgcccgcgccatcgtgctcgcaccggcggcgcagccgcagccgcagcccatggtggtggcagaagctgccaatcctcctaaccaggtcgccgacgacaaccaccgcctgccagtgccagctgccgtgccgtacgtcggcgccgccgccgcccccgcccgccgccgcgctcggccgaagcgtaacgccggacagggtggaccgtacaggtgcagttacccgggttgcaagggggagtacaggacgcaccaggggctaggcggccacgtggctggccacatcaacagggagaagcaggcggccgccgccgcccagggcggcagcggcgccaggccggagggcaatcacccatgcaaaacgtgcgggaaagagttctcgacgggagtggcgctcggcggccacatgaggaagcactacgaccccaagaagaagaagaagcatgctggccttgtccttaccctctccgtcgcgccgcctacgcctgcacctgctccgtccatcgccggagcggcattgccaccggcggaggtaaaagcggacgtggatgaacatgaagcagagcaagtgccaatggcgccggtgtctccgccagctgaagcgaggggaaatatcgtgcggatttttggcgtggatatagagaagccggcagacgaagaggagcaagaaggtggcagcgatgtc

SEQ ID NO: 13273 - DNA, 513 bp, Oryza sativa
  Clone ID: TFbOSC900016j.C1.o19.fg
atggaagtggccaccaatacggcgacacgatcgccggtgaagctaatgctggtgctgacactgtcgccggcgagcaaggtgatcgccaagggcggcggcggcgtgaagcgggtgcacctcgacggcggcgcgttccagtgccggacatgcgggcggcggttctccacgttccaggctctcggcggccaccggaccagccacaagcggccgcgggtgcgcgccgacggccttgacctcctcctcggcgcgcgccccggcaagctcggcgccggcggcgcctcgacgccggtagtgcaccggtgcgacatgtgcggcaaggtgttcgccaccggccaggcgctcggcggccacatgcgccgccaccggccgctggtgagtcgtaatggcacaatgtccacgacgtggacggcggcggcggcggcggcggcgacaatgtccggctcctcgtcggaagagcgtgacgacgacgacgacgacgacgtgcacaattataatttcatccactttttgtga

SEQ ID NO: 13274 - DNA, 1329 bp, Oryza sativa
  Clone ID: TFbOSC400923j.C1.o5.fg
atggagaacccctactacgcgagcttcctcaagaatcaccaccgccgctactgcttctccaccccgccgtcgccgtcgccgtcgccggctggcgcttactcctcctcctccttcccgttctttccgacggcgggggtgacgtcgacgacggccgcgacgccgccgacgacgactgccccgccgtcgcctccgctccgggaggccttgccgctactgtccctcacccccgcctcgcgcggcggcacgacggcggcgcaagagcgtgcgcggcagcggggggaggaggactgcaccgacgacgacgacggcgcggaggaggagggggcggacgaggaggacgtgccgggctcgacgcccggcggcggcggcggtggaggcggcgatagacaccaccagctccgtcgtcgccgcgcggggcggctcttcgccgacctgaacaccaaggctgcggcgggagacccgatggacgtggagggctccggctccggctgctgcgccgccgaagccgccgcggcgggggacgacgacgcggacgtcacggtcgcgctgcacatcggcctgccgagcccgaccgccgccgccgacctcatctcggggctctcgtcagcagccgggagaagatcctccaccgcgcgtcgtgacgaggaagaggacgaggcggaggaagccggcggcgcgagcagggacgacggcgacggcggcgacgccgccgacgccgcggcgccgctagggttcgcgtcgacgccgatcgggcgtctgaacaagggccagtactggatcccgacgccgtcgcagatcctcatcggccccacgcagttctcctgccccgtctgcttcaaaaccttcaaccgatacaacaacatgcagatgcatatgtgggggcatgggtcgcagtacaggaaggggccggagtcgctgcgggggatacagccgacggcgatgctgcggctgccgtgctactgctgcgcggcgggctgccggaacaacatcgaccacccgcgggcgaagccgctcaaggacttcaggacgctgcagacgcactacaagcggaagcacgggctgaagccgttcctgtgccgcaagtgcggcaaggcgttcgccgtcaagggcgactggcgcacccacgagaagaactgcggcaagctctggtactgcctctgcggctccgagttcaagcacaagcggtccctcaaggaccacgcccgcgccttcggccacggccacggcgcgctcggcggcgccgccgccctcgacgacgacgacgacggcgccgtctccgacctcgaccacgactcctcctccaccgcccccgccgcccgatccctctaa

SEQ ID NO: 13275 - DNA, 1317 bp, Oryza sativa
  Clone ID: TFbOSC401886j.C1.o3.fg
atggaagacccctacactagcttcttcaagaacccttactactactactgcacctcggctagctccttccccaccgcgcccgccgccgccgccgccgccgctcacctccctccgccgctgccgccgccttacgctgccctgtatcctaccgccggtggcgtcggcgtcggcgtcggcgcgcatcatcatcatcagtacccgccggccgcattcttccacccgccgccggtgcaccagcagcatcaggcgccgccgtcgccgccgctgcgggaagcgctgccgctgctgtccctgtcgcccacgccggcgcgccgcggcggcgtcgtcgacgcagcggctgactcggactccgacgacgacgacgacggcgactgctgctaccaccacctgcaggatcaggagggggcggcggccgggtcgacggccacccccgccgccgccgccgcgcgcgcgccgctcttcgccgacctcaactgcatccccacctgctgcggcgacgacaacgacggcggcgacccgatggacgtggaggtcgccgggacaacggcggacatcgacgccgcggtcgccctgcgcatcggcctgcctgccggcggcacggaggccgatctcctctccgggctcaccggcgccggcgtcgaacacgaggaggaggaggaggactgcaaggtggacggcggcggcagcggcggcgacgacgaggtggtgccgctagggttctcgtcgacgccgatcgggaagctgaacaaagggcagtactggattccgacgccatcgcagatcctcatcggcccaacccagttctcctgccctgtctgcttcaaaaccttcaacagatacaataacatgcagatgcatatgtgggggcatgggtcgcagtacaggaaggggccggagtcgctgcgcggggtgcagccgacggcgatgctgcggctgccgtgctactgctgcgcggcggggtgccggaacaacatcgaccacccgcgggcgcggccgctcaaggacttccgcacgctgcagacgcactacaagcgcaagcacggcctcaagcccttcctctgccgcaagtgcggcaaggccttcgccgtcaagggcgactggcgcacccacgagaagaactgcggcaagctctggtactgcctctgcggctccgagttcaagcacaagcgctccctcaaggaccacgcccgcgccttcggccacgcccacaccgccctcgacgccgacgacgacgacggcgccgtctccgacgccgacgccgtcgtcagaccttcgtcctccatggctgcctcctccctgcagccgccgccgcgctag

SEQ ID NO: 13276 - DNA, 1101 bp, Oryza sativa
  Clone ID: TFbOSC400259j.C1.o45.fg
atggaaggtgaggtcgtcgccgcctcgcctttcttcgagtggctcaagccaccgccgcggccggcgtcatcctcgtcgtggtcgtcgtctttctcctcgtcgtcctcgatggcttccagggatcaagaaacagtagtacctggtgaagatggcggaggtgaaattcaagaagatcataagagcggtatgacttgtttgccgctgctcagcatgctcgaggaggggaattcgaagaggcatgagcaccctgtgaaagaagagatcatgagcagtgcacacgcagccggggtagtggagcctggcgtggagttgaatatcggcttgccggttacaggatctagcgctcaggaggtcaccatggaggaggacgatgaggaggaggatgacgacgacgtaggggaggaggagatggacgagtggaagcctatgcatggcggttgcaaggtggagggggatgaagagcagtacggcgaggcggtggcgtcggtggaagggtcgagcagcatcaccgccgtgggggatatgttcggcggggtcggggcggagagcggcgtggcgatgagcagccggtattggatcccgacgccggcgcagatcctcgtcggcccggtgcagttcatctgccatgtctgtaacaaaaccttcaacagatacaacaacatgcagatgcacatgtgggggcacgggcgggagtaccgcaagggcccggagtcgctcaaggggacgcagacactggcgatgctgaagctgccgtgctactgctgcgcggcggggtgcaagaacaacgtcgcccacccgagggcgcggccgctcaaggacttccgcaccctgcagacgcactacaagcgcaagcacggcgccaagcccttccgctgccgccgctgcgccaagcccttcgccgtcaagggcgactggcgcacgcacgagaagaactgcggcaagcgctggttctgcgcctgcggctccgacttcaagcacaagcgctccctcaacgaccacgtccgctccttcggtgcccaccacctccccgtcgccgaatccgccgccgccgccgccaccacccccgccgacaaagaccgcatcataagcttccaacggtga

SEQ ID NO: 13277 - DNA, 1431 bp, Oryza sativa
  Clone ID: TFbOSC401482j.C1.o12.fg
atggccgtcaactccggcgatcgcgcgcgcgcgcgcgggcaccacggagacgacgacgaggagggtgtggccgtcgtcggcgaggactacccctactgctctgactcggattccgacgacgacgacgacgtcgaccgctacgtgttccttgcacgccagcccgcgccgccggtggaccgcgacgatgccgaagccgacgccggggcggaaggaacgggttgttgcaaacggaagaggcgcgtcgtcgacgacgacgacgatgatgacggtttctcgccgcgccagccggcgttgctggatggcagcggcggccaagcggcggaggaggaggaggacgacgaggggagctctgatgatgatgacgcaatggcgccgcgtggggaggcaggaggcggcggccgcggccgcggggtcgggaaggtatcacgcaagaaggctcgactcgtcgacctgatcagatcgccattgttgccggccgagctggatggttcggataaggcggcgccgccacctccgcgcggcgtgtgtcccaagaagatcgcggtggtggtgcaggcgaagaacaggaagcgccgcaggttcgtcgacggtggcgaggagcaggagccgcagccgcagccgccggtgcgcggcaagagaagcagaggccctgacctcgaggcgagcgagggtttgcaaacggcttcggcggcggcggcggcggcggcggcagaggcggcggagagagcttccaagcgcttcgtctgcagcatatgcgggaggtgcttcggcagccaccaggcgcttggcgggcatgtcctcggccacaagaagaaagccaagaacgccgccattgccgccgcagcgcgcgacgccacgacgacggcggtcacggaggccgtggctccagcaagccaaaggcaaagcttcttcgccgccgacatcaacggacaagacgagcgtggatgcgatggcgccgagggcagccgctacgacgacgacgaggagaagagccccgtcgtcgttgacgacgttgcagcatgccatgacgcggacgtcgacgaaagccgcggtcacggtaaggccgagtcggcctctgccattgatgccggcggggacgcgggcaacaacaaggtcgcccatggtgacggcgaggagaacgacaagatcgccggcgtcgtcgttgcatcaagccacgacggcgatagcgacgtgggcaagatgaagatcgtgcagcacaagtgcgacgagtgcggcaaggtgtgcctcacggggcaggcgcttggcgggcacatgagcaagcaccggcggacgcgaccggcggccaacggcggcgaggggcctgcaactgcaacggtggcggacgggggagcccaaactgttcggctgatcggcgacgatgtttgcttgcagagagcggtggcaatcgctgggtttcactcggctcagtaa

SEQ ID NO: 13278 - DNA, 975 bp, Oryza sativa
  Clone ID: TFbOSC101063j.C1.o11.fg
atgggatcccttgcagttgccggctgcttgaattccatgggagaggataggttgtcagctctcaaatccagggacaaggaacaagaagcagaactggcaaaacctgaaccaaccaccgaggttctcttcctgtgcagctatgagggctgcgggaaaacttttgttgatgcaggggctcttaggaaacatgctcatgttcacggggagaggcagtatgtgtgtcactatgccggttgcgacaagaaatttttagacagctctaagctgaagaggcattttcttattcatacaggagagaagaactttgtctgccctcatgaaggctgtggaaaggttttggctttctcattggattttaatttaaaggcacacatgaaaacacattctgtggataactatcatgtgtgcaagtacccagaatgtgctcgaaggtttacacaggaatcaaaattaagggctcatatcaagcaacagcatgaaaagggtggtctccagaatccaggtgggtctgcaacaaaccgcagtggtctagcagaccactcccataatagtcacacaccgaaaccgtcagcagctccacccactccctcagctgatcgcccatacgtctgtccttatgatggttgtgccaaggcatacattcatgagtacaaacttaacctccatctgaagaaagagcaccctaatcactaccaggatgccggtgctcaagccgcctcttcgaagatgtcgaagcgaagaagcaagccctccttgacggccaagatgccactgcccaaggtccctaagcgcaggggttacacagagccataccaacctcctgttagtgttgtcgaagagcaccagtggccgaggaatgtgctgtacgaggacgatagcgaggagactgaggaagagggagataatgttggggacggggcgaggtacagagctgctagcagcgacgacgatgaggagactgaggacgaagaatga

SEQ ID NO: 13279 - DNA, 492 bp, Oryza sativa
  Clone ID: TFbOSC900016j.C1.o20.fg
atggaccagcaggaggactacactagtgatctgcagcttgagctcgaggaagaagaagacgataaccaacttagccagctcgcggagctcgacgtgcagctctcgctgtcgctggcgtgcggctcgacgacggcgatgtcatcgtccggcgatgaggaggacgcggagccacggcgtcgccggcgggacgaggaggcggcggcggcggcgttcgagtgccggacgtgcgggcggcggttcccgtcgcaccaggcgctcggcggccaccggaccagtcacctccggcccactaccaacaagcggcggcccggcccgtccaagcctctaatccacgcgtgcgaggtgtgtgggttgggctttcagatgggccaggccctaggtggccacatgaggaggcatcggcctagaaatattgatctgggccataagcagatcgtcatgccagaaattcggcccagttcctccctgcagctgcttgatctcttcgtttag

SEQ ID NO: 13280 - DNA, 715 bp, Oryza sativa
  Clone ID: TFbOSC407916j.C1.o1.gp
taacacaacttatgattgaatacatagatcgagcataaaaaactgaacgagaataagtcgcatacaaaggactatttatgaccaaaccacacaatcacggccatctgattctactactctcaagaacagcacttctctaatctacttccagggttcagaatgcacgcagattagtaaaggtatcagccaccacgtctactgtctagttagtgcatatattgcagcaggatgttagtaaaggacaaaagagaatcgtttggttaatcttcatattctgtttcctcatcatcggcattctggttaccatatctccagccatcttcaatgttgttgccctggtcttcttctgtctcttcactgtcatcttcatacttacctggccactgattcttcactccactgatatcagcaggcaacacgctagaaatcttgacattgtaggctttattagatgagggggtcttatgccctgaatttgtcttgctcctttttggattcggtgcaaggtcgacaatctcagcatagttatactgattggcacgatcatttacagcatgctcacttgcatgtgcagcaatcctaccattctcttcttgaccatgttcaggatgctgagtttttagatgaaggttcaatttgtaactgtgaatgtaggctttcccacaaccatcatatgggcagacatatggtcgctcagcaaagcttgtgggtgctg

SEQ ID NO: 13281 - DNA, 98 bp, Oryza sativa
  Clone ID: TFbOSC100626j.C1.o10.gm
atggaggggtttgaggtagatggaagtgaaagtgaggaaggtgatgtttcaaaggcgtcaactggtggcccaacattagcaaggcagacggagtgcac

SEQ ID NO: 13282 - DNA, 402 bp, Oryza sativa
  Clone ID: TFbOSC100626j.C1.o20.gp
ggagaagagggtgccgcagtcgcagcggtactcgcgggtgccgcagatcttggagtgggccttccagtcggactggacggcgtagcgcttggagcacttgtcgcacttccacttcttctcgccgtgcttgcggcagaagtgcttcttgatgccggtgaggtcgccgagggcgcgggaggggtcgtggtggacgcacgtcggctccgggcacaggtacacccggcggcgctgcgcctgcagcgggttcttctgcttcagcttccacggcaggttgtgcccgcgccggtgcagctgcaggttctgctcccgctggaaccccttgttgcacacctcgcacacgaaccggttcgtcgccagcagcgtcttcggcgacagcgctatcacctccgcgtccgggtctgc

SEQ ID NO: 13283 - DNA, 1956 bp, Oryza sativa
  Clone ID: TFbOSC400555j.C1.o30.fg
atgcgcatccgccgctacgccgcgcgcctcctcgcctcctccaccgccaccgccccctcctccctcccgccgccccccgccgcctccgcggcctggtgccacgccgccgcggacgattgcgccatctgcgacctcacccgctccgcctccccgcaggtggtggcgccggacgcaatcaagcagaaggggcacattgccggccgggcgctggaacccgagctcaggagcgatccgcgcgtcggactagccgaacgaactcctgttccggaagatcaagggcgcgatatagatgacggtcctcccgcgaaaagatctctcacgtttactgatgctgcggcgaggctagaaggttcgggaaatgttggtgctggagttgctactgaaccagcagctagactaggagcccccgttgctaatggagctgttagtgggcaggaggatagagcagcaacttgtcttgcggatgaatctgctgcggagctgattgctaccggggtaacttctctcgttaccggagcaaccgctgaaccagaggttttaaaaggggcttcatttgctaatacaaatgttaccgagccaagagtttcggagagagttcctcttgtgcgtgaagctgcaactgagccagaagctgaagtctctatgcgagaagttacagaaggagctctccctgatggtgaaggtgctgcaaagttggaaattacaggggggctttctcgagaatctgctgacaaaatggaagttacaaagggaatttctcttgttactgaagcttctgctgattcagaacttgcacagagagttcctactgaaccaggagttgaactctctctgccggaagttacagagagagttcctgttgtgactgaagatttcactgagctaggagatacattcagtggcctacatattacagggttcgcttccctggataatgaaggttccgtggaacaagaagtcacaggaagtggttctcttgtaaatgaagctacagagatggaagttaaggaaggaacctgtatcttcaccagagttgccacagagctgggagatactggtagagtttctgcttgtagtggagatggtgacattgctttagatgagccacgacctcctgattgtgtttcggaggttgccaatgtgaatgttggaaatgcaggagaggctgttgcgagcaaagtgcagccttttagagacaatgcagaaagtgttggtggttctattaattcaacaggcaatggccatgttagctccaaaagtccaactgcagatgaagcagcaccacctggtggatgtactgatacacccagtgtttcatgtttatcagacattgtggctagaagcatcggtaagtcagggagaacagatatcatatgttatgttaggcgcaggggtaaaaggaagctggaaatggtggaggtaaaggaagaaaatgttgaaatggatgacagtgctatctgtgatcaatatgatgataaagtggcatcagaaagaactggtccttgcgagagtgtgacgtcaactgctgtatctgtagagattaaaattgctgacataaagagagagcttgaagataattcaactgctagcaagggtaaaaagaagagggccaaaaggtttcaatgtgaaatagattattgccgcatgacattcaagaaccgagctgagctttctgttcataaaaagaacacatgcacggtcaagtcatgcggcagacatttcagatcccacaagtatctgaggcgccaccagagcattcacaatgatgatatgccatacaagtgtccatgggagggttgcagtatggctttcaagtggtcatgggatcggggtgagcatttccaagtccatgctggcaaaagaccttataaatgcacaacacctgggtgcagcaagatatacaagtttgtttcggacttcacccggcataagaggaggtgcaaacctcagaggtaa

SEQ ID NO: 13284 - DNA, 1956 bp, Oryza sativa
  Clone ID: TFbOSC100181j.C1.o2.fg
atggtgggcggcgacctcaccggtgccttccctcttcgaccgtgcctccaaggccaccacggttcttgtggtcgtggtgctcttccgcattatgacccccaagtgcgtagactagaagtggattccgccggttttcttcttcatttgttgtctctctgttacttccaaagaccaaacaaaacatgggtaggaaagagaagaggagagaggggaaaatttgggagccctagatttcgacaggttggctatagtgagggggagtggatgtattggcgcgcggatctggtgggtgcaagaggttgggtggggcgaatcaaattgccacataagcgccacgtcaatgttacgtgggataaagaccttgtcaaaggagccacgttcaggagaactcgcggcattgctgcgatcatgcagccgtcgccgtcatcacctcgggcaccgccgccgacggcggcgcaggcgtcggggtacaagcacttctgcagagtctgcaacaaggggttcacgtgcggaagcgccctaggcgggcacatgagggcccacggcgtcggcgacggcgatgggttgggtgccgatgatgacgacgacgacgacgacgattcgctcggcgatgaggccgtgcggcgtgcgcgcggcggggcagatgatccttggaacgcgggcggcccgtcgtcgtcaggggcagcgacacacgtctacgagctccgcaccaatcctaaccgggtcacgaggagccgccaggtgtgcaagaactgcgggaaggagttcacgtcgtgggagcatttcctcgagcacggcaagtgcagctccggcgaggacgacgacgacgaggacgacgtggatcactcgctgcaaccgtggtcgccttcgcccgaggccgacggcgaagaggattctgcaccggccgccggttggttgaaagggaagcgctcgcgtcgctgcaagggcacaggagtcgatttgtcaccgacaccctcagcgtgcgctgccggcgaggaggaggacctggccaattgcctggtcatgctctcgtcgtccaaggtagatcaggcaggcgtcactgaagcagaacaacggtcatcttcttccgcgagtaaggaacataagagactgatcacgttcatggagccgacgacgtatgtactggatacagtgatggcgcttcccccgccggcgccggcgccacagtatgtctcgaccgtgcctcgaggcatgttcgagtgcaaggcgtgcaagaagccacaagaaggtgaagggctgcttcgctgccaagctggagagcaaccgccagaggtggctgagccatcacaccatgcagaggtcgctgatcggagcgaggacaatcccgccaaggccacttctgatgccaggaggaacgtgcacgcaagcatcgacggtgatggaaacgccggcacgagcgatgccgcggcagaactgtcgatggccatcgtgcccatagaaccgccggtcgccgcgctcgccgctgcaccgttgaagaagaagggcaagatgcacgaatgctcggtctgccatcgactgttcacctccgggcaggcgcttggaggccacaaacggtgccactggctgacgtcaagttcggcggatcacaccgcctcagtcccacccctagccgacgaccttgtcccgctctcgttccggccaatgttggacgcaccggagcccgctctcgacctcagcatcgcggcgaacccgccactgctggcctcggccgcaacagtccgtccgaaggtcggcggcagctcgtttcatctcgacgcgccaccaccggtatacatcccatcgtcgccggcgatacccagccaacggaacaaggctaccgcgacaaccggcagccagaacgccaacgacgcggtcgggttaagcaccgccgcagcagaggacgaggcggacagcaccaccgtcaagagagcgaggctagcgatctcaaggacgtga

SEQ ID NO: 13285 - DNA, 1515 bp, Oryza sativa
  Clone ID: TFbOSC419155j.C1.o1.fg
atgttgggttcttgcgccccgacgacggccgggccgccgccggacgaggcgaccacgccggagccgttccggtcgctgcagatcgccaccgcctccgccggctcggcgaagaagaagcgacggccagccggcacgccagacccggacgcggaggtggtgtcgctgtcgccgaggacgctgctggagtcggaccggtacgtgtgcgagatctgcaaccaggggttccagcgagaccagaacctgcagatgcaccggcggcggcacaaggtgccgtggaaactgctgaagcgggaggccggcgaggcggcgaggaagcgggtgttcgtgtgcccggagccgacgtgcctccaccacgacccgtcccacgcgctcggcgacctcgtcggcatcaagaagcacttccgccgcaagcacagcggccaccgccagtgggcgtgcgcccgctgctccaaggcctacgccgtccactccgactacaaggcccacctcaagacctgcggcacccgcggccactcctgcgactgcggccgcgtcttctcccgggtggagagcttcatcgagcaccaggacacgtgcaatgccagccgcgggcaggcggcggcggtggcggagggagggaacgtgtcgacggcggcgtgcggcggcgtagcggtgttagagcaggagaagcagctggacctgcaggcgccggcggcggcgtcgctgtcgcggaccgcgtcgagcaccagcccgtccagcgacgtggttgccagccccgtcgcctggcccggggccggggcgccctcgatgccgagccccaaggccgccgccttccgcggccggttcgacatggcgccgtcgccgccgccgccgtcgtacgatcattaccgcgggggcgctggcgcgcacaacctcgagctccagctcatgccgccgttcaacgcgggtggcgccgccgccgctccgggcgggatgggggcgtgcttctacgcggcggcgcatcagcatcacccgacgggtgtctcccagtgtaacgacgcctccacgcagctgcagctctccatcggccgtgacgaggtcatgggcgcggctgggacaagcgacgaggcgtcggccgcggccaccgcgaaggagcaggcgcgggagcagctgcggcaggcgatggcggagaaggaggcggccggcgaggcccgcgcgcaggcgaggcggcaggtggagctcgccgagcaggagctggcgaccgccaggcgaatgcggcaccaggcgcaggtggagctgagccgcgcccacgcgctccgcgaccacgccgtgcggcaggtcaacgccacgctgctccagatcacctgcttcagctgccgccacaagttccgcgccgcggcggcgggggcgccactaccggccgccatgagctccgacgtcgcctgcagctacgtctcctccgtcgtcaccgagggcggcgacgccgacgatcccctcgacgtcgtcgacgccacgcggcgtcgcctacagcacgctaacagcatgggcatcatgtag

SEQ ID NO: 13286 - DNA, 1158 bp, Oryza sativa
  Clone ID: TFbOSC404176j.C1.o2.fg
atgatgatgagtagtagtgccgatcatttcagcaacaataataataatcaggcgatgtacttggagcaagatgaagatttctcccagatgatcatggagctgtgtgattttgatgcgagtagcacgacgcaagctcgccatggcggcgaagcagcagcagcagcagctgggaacgcgagggcggtgctgacgtacctgacatttctggagcagaagatcggccacctccgcggcataatctcgtcgacgccgaacccgccgccgcagatcgtcgccgccgagctcagctgcatcgtcgtgcagctcgtctccatctccaagaacctcgccgcggcgcgccgcggcggcgacgacgcggacgcggacgccaagcacgacggcagcagcgacgccgacgagggcgccgatggcgacggcgagcgcgccccgccgcggggctcctacgaggtggtccagatcgagaaggaggagatcctggcgccgcacgtccacttctgcggcgtgtgcggcaagggcttcaagcgcgacgccaacctgcggatgcacatgcgcggacacggcgaggagtacaagtcggcggccgcgctggccaagcccggcggttcgccgtcgcgttcgccggcggcggcggacgcggcggcgaggaggcgcttctactcctgcccgtacgtggggtgcaagaggaacagggagcacaagagcttccagccgctcaagacgcccacctgcgtcaagaaccattaccggcggagccactgcgacaagagcttcacctgccgccgctgcaacgtcaagaggttctccgtcgtcgccgacctccgcacccacgagaagcactgcggccgcgaccgctgggtctgctcctgcggcacctccttctcccgcaaggacaagctcttcgcccacgtcgccatcttcgacggccactcgccggcgctgccgcccgaggactacgacgacgacgccgcctccggtcagctgccgcacgccgccggcgaggcagtgggcagaacggtggacacgaaccgcttcttctccgatggattgatgatcaaaggcagcatggaggatgagcgaggaagcctctcgccgatggggctcgattactgtgaattcgatggaattgatctctttgcagcagcagcattcgatttttga

SEQ ID NO: 13287 - DNA, 1026 bp, Oryza sativa
  Clone ID: TFbOSC400149j.C1.o5.fg
atggcgaagaacgcatgcaagctctgctaccgccgcttcgctagcccacgcgccctcgcggggcacatgcggtctcactctgtggcggccgccaacgcagccgcggctgcggcggcggccgcagccgcgaagctgcagatctcatcggcgtcgtccgcgtcgacgtcgttcaccgcggccgatgaggaggaggaggaggaggaggaagaggaggacgtgggattcaagaagcccctttccatctacgcgctccgggagaatcccaagcgcagcctccgcgtctccgagtacgcgttctccgaccgcgagagcgaggccgagtccaccccgacgcccgcagccaagggcttacgcgccggcggcggcggcggcggcggcgatggcgagcccatgagctcgttgtcgtacgcgggaacgccggaggaggaggtggcgctggccctcatgatgctctcccgcgacacctggccgtccgtcgagcgcggtggcggcgggggcgagtactcggacgacgggagcgacgacggctacgcgctccctccgccgtctcccgctccggcgccggcgccggtgccggagaagcggacgcggttccagtgccccgcgtgcaagaaggtgttccggtcctaccaggcgctcggcggccaccgcgccagccacgtccgcggcggcaggggcggctgctgcgcgcctcccgtcgctcctccccctcagccgcatccgcagccgccattgccggagcacgacgcgggcgaggaagacatggacgggaaggcgccgccgcacgagtgcccctactgctaccgcgtgttcgcctccgggcaagctctgggcggccacaagaagtctcacgtctgctccgccgccgccgccgcggcccatgcacagacacccggcggcggcgctcctccgccccagcccaaaattctcggcatgatcgatctcaacttcgcgccgcccgtggatgaggtggagctctccgccgtgtcagatccccacttcccctccaatccaccaggtccttga

SEQ ID NO: 13288 - DNA, 1350 bp, Oryza sativa
  Clone ID: TFbOSC400591j.C1.o18.fg
atggcgacgaacaggttcgtgtgcgagatctgcgggaaggggttccagagggaccagaacctgcagctgcaccggcgggggcacaacctgccgtggaagctgaagcagcgggggagcaaggaggcggtgaggaagaaggtgtacatctgcccggaggccagctgcgtccaccacgacccctcccgcgccctcggcgacctcaccggcatcaagaagcacttcttccgcaagcacggcgagaagaagtggaagtgcgacaagtgctccaagaagtacgccgtccactccgactggaaggcccactccaagatctgcggcacccgcgagtacaagtgcgattgcggcaccatcttctccaggcgtgacagcttcatcacgcaccgggcgttctgcgacgcgctcaccgaggagagcgccaaggccatcggcggcatccccgccgccatggccgcgccggggcaccaccaccaccaccaccaccaccaccaccagctgctcttctcgccgccgccggtcatggcgcaccaccaggagctcgccgcgctgcaggagcagcagcagcagcagcatcaccaggatgtcatgcagtcgccgcaccagcatcagcagcagcagcagcagcggcagcagctggtgcagcagaactgcgggtacgccgtgaagccggagatggcgccgtggccgacgacgatgccctacgaccaccaccacccgctgctgcagccgctctgcaacgccaacgccgccgccacggcgcagagctcggccacgtccgcgccaccgacgacgccgcagctgcccgccgccgccgccgccgcgcacctgtccgccacggcgctgctgcagaaggcggcgcagatgggcgcgaccatcggcggcgcgggcaccggcgccgcgggcgcgcactacgcccacatggcgtccccggcgggcgcgggcgcgccggccggcggcagcgccaccttcggcctcggcctgtcgtgcctcaacacccaccaggacggcggcggcggcggaggcaacggcctcatcccggccgggatgatgggccacctcgcaagaaccgcctcccacggccggagcggcgaggacgtcgccggcgccggcggcggtggcggcgacggcatgacgagggacttcctcggcctccgcgccttctcccaccgcgacatcctcctcgccggcttcgactcgtcgtgcatgggccacgtgaacgccgccgccggcatggccggctacgagccaccaccaccgcaccatggacagccacagcaccagcaccagcagcagcagcagcaacagcaaggcggcagcaacgagccatggcatggcatgggcagccatagctaa

SEQ ID NO: 13289 - DNA, 1188 bp, Oryza sativa
  Clone ID: TFbOSC33902j.C1.o3.fg
atgggagatccctacaccaacttcttgagaggctaccaccaccaccaccgctcccaccaccccctccacttccctccgccgccgccgccgccgcctccgccctacgccgcctccttctccggcctctactcctcctacctccacccaccacctcccccttcctcccctccgatcagggaagccctccccctcctcagcctcactccctccaccacccacgacgacgatcaccaccaccgccgccatgatcaagatcatcaccaccatcacaagcaaggccaagaaaagaacagccatggcggcggcggcgccgcttcttgcagcaacaacgacgacaaacgagaatcaccatcagcagcagcagcagccgatgatcaggcggcggaggtgaccgtggccctgcacatcggcctcccgagcccgagcccctccgacgccgccgccgccgccggcaaccaagctgcagcagcagcagcagcagaagcatcggcagcaggtggaggaagcagcaggatgcaagtggaggaggaaggaggagaggaggaggatgaagacgaggcggcggcggcggcggcgacggcgacgctgccgctgggttgcgcgtccatagggatagggaagctgaccaaggggcagtactggatccccacaccgtcccagatcctcattggccctacccagttctcctgccccgtctgctacaagaccttcaaccgatacaacaacatgcagatgcatatgtgggggcacgggtcgcagtacaggaaggggccggagtcgctgcgggggacgcagccgacggcgatgctgcggctgccgtgctactgctgcgcggcggggtgccggaacaacatcgaccacccgcgggcgcggccgctcaaggacttccggacgctgcagacgcactacaagcggaagcacgggatcaagcccttcatgtgccgcaagtgcggcaaggcgttcgccgtccgcggcgactggcgcacccacgagaagaactgcggcaagctctggtactgcgcctgcggctccgacttcaagcacaagcgctccctcaaggaccacatccgcgccttcggccgcggccacgccgcctgcggcatcgactccttcgacgacctcgacgccgatgacgacccctcctccgacctcgaccacgcctccgcctccgcttcgcgagtagggtga

SEQ ID NO: 13290 - DNA, 2538 bp, Oryza sativa
  Clone ID: TFbOSC31520j.C1.o2.fg
atggtgtgctctaccaatatactttaccaaaggaacaacccaagaaaatggaatggaggacagatggaaccagaaaataagcacggttgtgaactgatagatacctccttcgcaatatcagaaggcctcatccactcagagacaagggtaccgagctcgaatcgccctatagtgagtcgtattacaattcactggccgtcgttttacaacgtcgtgactgggaaaaccctggcgttacccaacttaatcgccttgcagcacatccccctttcgccagctggcgtaatagcgaagaggcgcagaggagaagctcatttttcacaagaggatgatgctaacctcaacacattaagtgaagacccaaacaaaagtaacctccccagtatctccatcattcatgaagctgtaggaccattagagtcaagagatcagaataaaactgctgccttccccagtacttctggtgtccaggacactggagaaccaaatagtgctttacacaatgtcagacatgaattggattcattcaagagttctcggcagtgttctgcatatatagaagcaaaaggaaggcaatgtggtaggtgggcaaacgatggtgatatttactgttgtgtgcatcaaagtatgcattttgctgaccattcgtctagggaagataagtcacttactgttgaaactccactgtgtggggggatgactaatcttggtagaaagtgcaagcatcgagcccagcatggttttatcttttgtaaaaagcaccgcttccaaacaaatccagatgcaatgagctcagatagtttgttaagttcgtctgagggccgtaagtgggaagagtcacagaaaagcgtggagaagatgtcttcctcaaatgcaacttgtagtgtaggctcagagcaggcaaataatttccaggttgctgtgcacatgaaagtgacaccaaccatggctgttgagacaactagtgataaagttaacgtgtcagagaacgctgatctctgctaccccatgtcaacttccatggaaaactctaacttagatgcttctatttgcattggaattcgctctcatgacaatattgctgaatgccaggattatgccgtacgacacacactttactgtgagaggcacataccgaagttccttaaacgtgccagaaatggaaaaagtcgactcatctctaaagatgtctttatcaatcttttgaagtgttgcacgtcaaggaaagaaaaactgtgcttacatcaggcatgtgagtttctttattggttcttgagaaacaatctttctcaccaacgcccgggtcttggtagtgaccatatgccccagatattagctgaagtgtcaaaaaatcctgatgttggagaatttttgttaaaactgatctctagtgagagagaaaagctttcacatgtttggggctttggtacagatagctctaatcaaatgcattctgagaaccaagatggatcagtgatggtgttacgtgaagatgggacacatccttcacctggtctgaagtgcaaaatatgttctcaggagttctctgatgatcaaggacttggattacactggacagaggttcacaaaaaagaagtgcggtggcttttcagaggctattcttgtgctgtatgcatggactcatttaccaacagaagagttctcgaaaggcacgtgcaggaaaaacatggcgctcagtatctccaatattcgacactcttacgttgtatatcgtgcaacagcaactttttgaacacagatcttttatggcagcacattgtttcagatcattctcgagatttcagccttctggatcatgtccctcgacgacctaggggtcaatctatcaaaagaacagaaagggcaagtgatgagctcctttatgataaccataaccttggtaaggatgatggtttacagaagttcacctgcagattatgtgggatgatgtttgatcttttgccagatcttggccaccaccatcaagttgctcatacaaactcaggtacagtcagtgatatcccttcaggacgtgaaaagtatcagtttaaccgtggtcggcactattattcagccttcaagaaaagtttaagaccatccggctcattgaagaagaggactagttctggagttgagaaacattttaaggctcaaagcttggatctatctatggatacatcacacattgtggaatctgagaccaccacccttggtaggttactggatttccaatgctcagacgtggcattgactttattttcaaagattcaaaagacaagaccccacccaagcaaccttgatattctgtctattgcccgttctgtttgctgtaagacaagccttcgtgctgcattgaaagctaaatatggaatcttgcctgataacatatttgtgaaagctgcaaagctttgtagtgatgttggcatccaaattgattggcatcaagaagaattcttttgccctaaaggttgcaagtccaggtctagttctaattccttgctccctttacagccattgataattatattcgatttttaa

SEQ ID NO: 13291 - DNA, 1068 bp, Oryza sativa
  Clone ID: TFbOSC900182j.C1.o1.fg
atgggtggctcgtcctccaccagccggcgccgccgcgacgagtactacgcggcccggcccccgccgccgccgcaccactactacacctacccaccgccccctcctccgccgccgcaccaccaccaccacccgccgccaccgcctcccccgccgcaccaccaccaccagcacccctaccggcctccgccgccgccgcaccacgccacctcgtcctcctcgtactactaccaccacccgccgcccccgcacgcctaccacggcccgtggcaccccgcgccgcgcccgccgcacccggagcagcccgcgctgacggggccgccgcccgagttcgtggatcaccagcaggcgcggaaggtgaagaacgacgtcaacctgcacaaggacaccatccggctcgtgcccgacgtcacggaccccgaccgacgcctcgtcgccttcaccttcgacgccgtgaccgacggcagcataactatttattactttggcaaggaaggaaaaaactgtactttctcttcagtatatccagaattacaaacacctacaaagatacctttccagaaaggattggctcaaaagtttgtccagacctctggatctggtgttgatttgggattcttttctctggatgagctttcaaatccttctggagaagtattcccactggtagtttatgcagaagcttgtccacctccagaggaaagtcaccagcctaactccactagggcacaaattactcttgctgttatagagaagcatcacaatgaccttcgagttaaagttgtcaagcaaatgttgtggagtgatggcgagaagtatgagctacaagaaatttatgggattgtcaactcgactgaagctgatgttcccgacgcagatgatagtgatatggggaaagaatgtgtcatctgcttgacagagccaagggacacagctgtttttccatgtaggcatttgtgcatgtgcagtgaatgtgcaaaaactctaaggtttcaaacagataaatgccccatatgcagacaacctgttgagaaattaatggagatcaaagttagaagtcccgagccataa

SEQ ID NO: 13292 - DNA, 497 bp, Oryza sativa
  Clone ID: TFbOSC415309j.C1.o6.gp
tttagccaacaattaatcttatgtatactgtatagttctcatagatatatatgtacacaagttccctatagtaatgtatcgtactaccgttcatagcttcacgtaatgcacataacacagaatgtataattttttcagtacaattggaacatcaaaatcacagctgacagcatgacatactttacagatggagcttttctttttccatcagaacttgtaacgaagaacaaacacccattgttcattcccatgtctactatttgattgttggaattgctcaaactgcatagaggcggataatctggttaatcttggctcgacaaatggggcatccccatttctttgattctatatccttcaagcaggacatgcaaccagccatgtgaccacacggaatgcaggcaccttccacaggagcatccaaacaaataacacaggttcccggtggagtgttaccgctgttgcttgcattagcatcactttctgcaggttttgca

SEQ ID NO: 13293 - DNA, 1674 bp, Oryza sativa
  Clone ID: TFbOSC400302j.C1.o7.fg
atggcgtcgcgcccccgtggaaggcgccttcctcctcctcatccgccgctcatccaggagatcctcgacgacgacctcttcgatgtagaggttaactacagcgacgaggaagaagaggaggaggaggaggaaagcgatgaagaggagtcggagtcggaggacaacgaaccggaggaggtggtgccggggcaggagagtatcggggagggatgcgggccggccatacaagctagggtttccggcgccgccgcggagaagaacgcctgccccgtttgtatggaggcctgggcctcccaaggcgctcatcgaatctgttgtattccttgtgggcatatctatggaagatcttgcctggagaggtggttgaggcacaagggcaacactagcgcaacctgccctcagtgtgggaaaaggttcagacctaaggacattaccaatctctatgcaccagaggttgcagttccaaataatgatctggaaaaggaagtattgtatctaagggggaaagctgaatcccttggggaaacggtgatgaaacatgagaaattgatagaggagatgaatgagagattggttgagttgacaagtgctcagaagaggcagattctgtcagagcagagattaatgaacgttggtagctcaaagagacagaaagaattcttcatggatggacttcgagtcatggccatagatgcatttaaccaaacaattcttgcttctggaaaagcaccaggcataggacaagaacatgttctttataagtttagcatggtttcccatcacgaagctcggaatatacaacttcctctggatactaaaactgtcagggacatatgtatcttacctagtggctctgctatttttacatcactgggcaggaaactatcgtcatttagcatgacggctgaccgtgtcgttcttcagtgtgatttgccgtgtcctggctggtcatgttctgcggatgaatcttcgcgtcagatttgtgctggattgcagaatggcaatcttatcatctttgatatccgtcaaacctcaagaccgttgcattctatggtgggtttatctacacacccggttcatactctccatacggtcattgataacaacggttctagaaagtttctctctgcctcttctataggcccctgcatgtgggatactgatggtattcaaggcaggccaaagttgctattggggacagataatcaacgggtgtgcatttctcttgcatgtgccccttcatcaagtgatctattggtagcttcctttcggccaaaggttgaaacgtccgaggatgctacagcatctcaagtgtatctatcacaaacaccaacaccctctggtggagggaaattagggtatcattccttcatcaggagggcggggaactcgtcatccttcaccgaagataggacatgcagcacacttgtgagcgaaattcgcatgtcgaaatccgcaattataccttatggaaacaaccaacatctgtttgcttatggagatgagtcgctgcgtggggtccggacctggcgactaccatcgtttgagatgcattctgatctcagctccctccagcaaccggtcctggatctaaggtatgcagaaagttcatccggagggaggtatctcgggtacctgagcacggaaaagttgcaggttttcagaattaggtag

SEQ ID NO: 13294 - DNA, 696 bp, Oryza sativa
  Clone ID: TFbOSC8663j.C1.o1.fg
atggcgggtgaagaaccatggtcaagcgaggcctccgacgatgtccccgacacatcgcacatgtcggacgaacaatttcaacagttcatcgaccagtactgggcagagcaaggattcaacatttggagttggattcgtgcttccaggacgtcgtcaagctccacgccggggccaaccaggcggacggcggcgtcatggcaggccgtcactttcgacggggacggcgtcgcgcgcttctccggcaactccgaccgtagcggcggactcgacgaccaagccaccagcggcttcagcatcgtggacctactggacggtatcctacaagcggatgacgacggcaatggcggtggagctacgccggcgtcgagcatggcgatcgtaaacctgccggagattaccgtcggcgacgagaaaggcgaggcgaaggactgcccggtgtgccttcagggcttcgaggagggcgacaagcttaggaagatgccgtgcgctgattcgcactgcttccatgagcagtgcatattcagctggcttctgattaaccgccattgcccgctctgccgcttcccgttgcctgctgagacggaggaggatgaagaggtggtccaggcagagaacgacgacgacgacgatgatgaagagaccatcctatgtctgcatcgactgttcgctgatgcggctgatgagtatacgagttga

SEQ ID NO: 13295 - DNA, 2625 bp, Oryza sativa
  Clone ID: TFbOSC20843j.C1.o1.fg
atgactagagaacatacctgttttactttggtaaaagctacatcactatgctcatgttctacatattttagagaagcacaactagacagagtttattacgctaggttgagtattatccagaaggcaaggataattacggagtgtttgcaccggttctgtagggactgcatagaaaaatccatgcggcttggaaatgatgaatgcccagcatgccgcacccctgcaagtagtcattccttgaaggttgatcctaattttgatgctttaattttgacgctgtatccagatcttcacaaggacgaggaagaggaacttgctttcactgaagagaagacttgtcacaaaaagatccaagcatccaccgatgaggcacctcatagacgaaaagaagcacttgggaagaagagctccgctgcaaaagctataggttcttcaaggtctcaagggaatatgctggcaaggaagagaggacacattgattttcctgatattgtcccaactaaagttcgtgatttccacaactttgaagaaggacgctcatgtaagaagtttgagtgtggacaaatttgggctttatatagtgaagttgataaattccccaagttatatggttggataagaaaagtcaagctacagccattcacagtgcttttgacctggcttgagccttgtcctcaacaggagcaggagaagcggtggttagagcaggatatacctatcagctgtggtgaaatttggtccatctacatgaactggacatttgactggactccttccagcaaagctacatgcgagttcaccatcgaggaaagaggtggtgagctttgtggcttcttagagcttgatcctggttctgttcctgacattttcctcaatagggaagaaaataacaatgatggttgcaaagggttgtcatcagttggtgatcattcagaaggtccaaagacaaaaaaagctcgcaagtttcatgtgtcacaatcatcccccgctggacataaagtcaccagcaaagtggacagccatgaggaaagaatggcaaatcgtgtagctattcggctaaagaacatcatgaagatctttctttgcaaaaaaagagctgacagacaatataatccacctcctatgacaagaaaagtagacattcaaggtaaaggaaaaacttcagacacagatgataaggacaatgccaatgctgaagctactaatactgttcgtcagaatgagcattcctgttctttagaacttccgtccccatatccagatttctatgattttgagaagctcagggatattaatatgttctcacttggtcagatatgggccctttacgacgaccttgatggcatgccaagattttatgctcgaattgaacattttgatgcatccagcttcaaagctcatctcacttggttggagtacaatgcagcaagtgaagaagagaagaaatgggctgatgaagaacaacctgttgcttgtggtttctcagttaatgatggtatcactgttatcccattagtcaggattaaaggctttgtgagtttatttgcggcagctaaagacaaatctgcagttgtgatagcatcgagtgagttgcttcgattttctcataatatcccctgttacaggacaactggaaatgaaaaagttattttcagggcaactcattggctctggttttgggcacaactacaaagtgatgttgataaattccccaagttctatggttggataagcaaagtcgagcgacaaccattcatagtgcatttgatctggcttgaggcttctcctgaatatgagcaggagaaacggtggttggagcaggacttaccagtctcttgtggtaaatttaaaatccgggactggaaagccagagcagtgttcatgcctgacaagcgaaatacagttgtggagatacctacaagagatcgtttgaggttttctcaccgaatcccctccttccttttgacagaagaaagaggtggcaggctccgtggcttctatgagctcgatccagcttctgttcctgatgttttcctgtataggaacactgttatgggctggagtggcatgagaggaactgatgcactaaattttattttttttacatattggaatgcaacagagaagaggctagctattgggcattcccaatgtttaccgctcaatgagccctcttttcattcttggttgtatgacagccataagaagatggtcaaggaacatcgccggggattcgacaccatcgcaacactggtagcgtggacgatttggaaggaaagaaacaattgggtcttcaaccagaagagcagaacatgggcggagattgcaagggttatgacgggtgaagcggagctttggcggctggctaaagccgcaatccctgttgtgtcaggactgaacaatcctgtgattgcctaccactatccagacctctgtgattttggcaagtttagagatgtcaactggattgaagttgatcagatctgggcactgtatgacgaccacgatttcatgccaagagtctatgctcgaatagatcacattgatacatccagcctcaaagttcagttcacttggctggctggagcacaaagctatgaatgcgcaagaggcgaaatggactga

SEQ ID NO: 13296 - DNA, 1005 bp, Oryza sativa
  Clone ID: TFbOSC408838j.C1.o17.gm
atgcctccatacacgacgtccgtgcccctgcacgcacagcagtcgcagccctcatgttcaccgtccacgaccccgtcgtcatcggccctgcacgtccgccgcgccgcgccacgctcgccagctttgcccttccgtcaatggcctccctgccgccgcggatccgcgttcgccgcgtgcgtcggacgcgccgtccatggtgctacccctctaatctctctgaacgccttcggccacgcccggcctcgtcttccggtcacgctccaccatcgtcgcagcagcagcaatggcgactcccgcctccttccaacggtcattgccgcaattgtgcacgcctcaacggcggtcttccgtcgcggctataacatgggtatctgcgtatctgtgtgtgcgttctcctgtgcattcgagatgagcgatatccgcggcttccaccgtgcggtcccgagcgacgcggctgacggaactgccggaggagctccgatcagcgccggcgccatcgccggcaccgtctgcgccgttgtcgtggttgtcgggctgctggccccgctcgtgtactggctgtatcggaggaagctgaaggcggcggcgagtcctcctctgcgtccgccggccgccgcggcgacgcccctcgtccgcgctcaggaagcaggcgcggcggtcggaggccaaggcgactacacgcggcgtcgtgcgcaagtcgccgtccccgccagggatggcggcgacctctgctgcggcatgtgcggctccgcctacgacatcgtgcgaggaggtggggagctgccggagacgctggagtgcggccaccacttccaccggcggtgcgtccggcggtggctgcgcgtcaacctcgcctgcccgacgtgcaacgccacgcacatccaactgtgcggagacgacgacgacggtcaagcgaccacgcccaggcatcggctgacggcgagcgattacagcggctgggatgaactctccaccggcgttggcagttccagctgccgtttctga

SEQ ID NO: 13297 - DNA, 2481 bp, Oryza sativa
  unsure (1)..(2481): unsure at all n locations
  Clone ID: TFbOSC401368j.C1.o14.fg
atggcaacatcttcggtggccgccatgccgcacgactccacgccatggagggacccctccagggcatcctccaggcagcccgccagggggttcttcaacatcctcgtcccgccgccgcagtcgccgcgcccgcgctgccccgaccaccaacaccaccaccaccaccaccaccaccacgatgctgctggtggcgcggcggcggcggcggcggcggcggcggcggagcccacgccgaggcggcggaagcagatactggatcggtgggcggcggcggcggcggccgcgtccgccacggcgtccgccgaggcccccgcgccgcaggagcaaaggcggagggcgagggacgccgagctgtccgcgctcgcgtcggccacccgccccgtgaccgcccgcgccgccgtgttccgggagccgtccccagcgccgtcggacgcgtcgtcnggggcgggggcggggtgcggaggcggggccaggtgcggcgcggagctcccgcccgcggcgccgcgcgcgtcgtcgctgatccagcggtggcgggagatcgaggcggtggggcccgccacgccgcggccctgcgacctggcctccgactccgacggcggctcgccgcggggccgcgtggggtgcatcgtcaagaagctcagcggcacgtcgtcgatccccgacgacgagctggacgccgccaacaaggaggtcgcgatgtcgcagtccgcgcccccgtcgcccgcgccgatgcgcgccggggtggagccgcccaccaacatcgccggtatcaacgggtccaggccgacgcagctggtagtccgcacggtgcgtggccgccgcgcaatggaggagctcgtcgccatgatggcccattgccggaggtgcgagctcgccgcggtcgccgaccgccacgtcgtgtcgcggttctcgcacaaaggcaggatccagtcccccaaggatggggccatatggctgtttggtagatcatgttcccaactggcactgctgatcattgtcatgtgcaaatcacattatcatgtttcgttttgcagattgtatctatgcgaacacaagtactttttaagcttgtttgttccttatgtggcttccgctaatattgtcatgctctttgacaccttgcagtccatgcttcgtcttaggctgttgcgtcagggatttaaagttaaggatgaagtttggactctaccaaaaccagtcaggccacgccttccaaaacatgagcatgaggcctataccacaagccaatgcctaacacaagcttttctcagcaagtgcattgctggtaaccaacataagggtggccaggttttggctgagaagtctactggttctgttgagagactagtttcttcggatggtttaggaaatgaacaaaatgatgggcagaacagcaacagtgaaaatcaatgtcaggaaggttgcaaaaacatggtaaaattatgtacccagaatcaggaatattctgagccatcgagtttcgtgaggtatgacgagcatagtaccgttgatgatgtctcgccaagtaccataagcacattgcatgaactttgcactccatcctcaaggggtgataatctaagagaagaagacaaccaaagcctgaatggttcatgggaagagagggcactatggataagtagtcttggttggcctgcaccagtggaagccatgagtccagacagctggaatcaggatgaaattggggatattgagaatcacactcagaatgaatttaatgatcgcccctggatagattcccctaactcatggagatcattgtgtgttgccacacaagcagacagcggtgctttgtctggcaatgctgacatctgcaatcttcttgagagcaaaaatgtctcaaagtctcttgagagtgattttagcaataaaatgaacaacatgttgctaacaatcttgcgcaaacaaaggcaacaacacatgattgatgattttgaaggatattatgatgagcgcttatactggagacagaatgatgaacaacagaatgctgatcagagggtatctgcacagtgttcattagcacctgtctcccatctccaccaacaagaaggctggcagcattcttcgtttgaacatcaacatcatgaaaaccaaaacttccttgaaatggaggtcagggttagaagtgaaatggcacaggtccatcatgaaatatatgaactacggaagttggtggaaagttgtattgcatcccaagtaaagatccagcactccattaaagaggagatgtgcagtgcacttcgcgaagcagggttgatgccaagccaacccgacacaccagcaaaaaggggaagctgctgcatctgccatcagacgcaagttgactctctactttacaggtgtggacatatgtgcacctgtttcaattgcgccgatcagctgaaatcgagcaacaggagttgcccaatctgccaatctcctattgaggatgttgttcgagcgcatatgaatttttga

SEQ ID NO: 13298 - DNA, 3582 bp, Oryza sativa
  Clone ID: TFbOSC401616j.C1.o63.fg
atgtccagccctggaaggagtgggttctcccctgggttggcgcagttgttatcatctagagatgaagcgaaggttagttcccagaagtcgcacttggtatcgtaccatgacgagattgggcaccaggatattgagaggacgctagagcatatatttgatctccctcacaagtcggtggtccggcctccgggtccgattgatgtgggatttgtgcgctcggtattgcggaatcaggcaaggaagtttgatcttggcgggaaagatagccgtaaatacgatgatggtgttctgattgtggataaaggtgctgggcaaactaaggttgttcttgatgattcgagcatttgtggcaagttcaagagcatttggggacctttgcttgttgagagctcggcatcattcagcagcgctagggctaacacctgcgtgtggaatggcaagtggatgtatgaggttaccctggagacgtccggagtgcagcagcttggatgggctactctctcgtgccccttcactgatcagaaaggagttggtgattctgatgattcatatgcatttgatggccggcgggtgaccaaatggaacaatgatccagaacaatatgggcagatgtgggcagtaggagatgtgattggttgctgcatcaacttggatgctggggagatcagtttctacaggaatgggaattttcttggtgttgcctttgatgggattcgcaaagtgggacctaggaaaggctactatcctgcaatttctctctcagaaggtgagcgttgccatctgaacttcggctcacatccattcaggtatcctgtagatgggttcaatccaattgaggcaccgccacatttttgtatgtttgcggcatatcttcttagatgtttgttccgtctactagaagttcaaaatctggaaaaatctgaatctgcatacttcgagaaactaaggagggtcaagaaatttgcacctttacgtgaactatttcgaccaatttcggaagggatatgtgcagaatttttcggtgccgctgaaggaagccaagggtgttctgaatatatcacctggggatctttcatcacccttcttacagatgttttcagggtacgggagccgcatgatttcttatgccttgaccaggttcttgaactttttctacagttcccggggtgcagttcattactgcaggagctcattgtggctctttcttgtatgtgcaaagctgctccacttgtgttgacagaatgcccattttctggaccatatccatttttagcgctggcttgccacattcttaggcataaagatgtaatgcatctatggtggaagtcagaagattttgcattctcatttgaaggatttcttacgatgaagattccaaacaagcaggacttgcagtaccttgtaccttctgtttggtggcctgggtcttctgaagatgaggttagcatgacattatcgatgacaacactctccgatgcaattaagaagattgaggataagcaccgtgagctttgcagcttggtgatatgctttgttccaccaacgtctccccctctgcttcctggatctgtgtttcggtcatttgtacaaagttcaatactaaaggttagaggtggagatcataggatggcttccagtgggactttcaatgacacggtgcttgtctcactgtacactgtaatcctccatttgttgtctgaaggattttctatggattcttctggacctgcatcatcctctagaataaattatggaactggtgttggatttctccacaaaggtggaaagcggaggtttcctacacagttattattgaggaatgatgcctattacaatgtaattcctagactcggtggatcactaaatcacctgttgatgtttcaccaaattgatgccaatgaagatgaggtgcagtgggatgaaggttgcatgaatgatgaagaaacacggataacacacactacagcacaaaaaccttgctgctgttcaatcacagatgtcactgttggcctgagatttaaagaaaatgccaagtacataccatcaacttcgaaaggcccatgcaagtccatgcatgaaaaatctgcacatattgcctctgaatgcagtgcattctattttgtgtcccagcaatcacaatccatttctttactagaagaaactgataggcagataagagaaaaatcatgcatggagcaagtaagacgcttgaaggaagcccgcaatagttatcatgaggagttggtggattgtgtcaggcattgtgtttggtatcgtgccactgttttttcttcatggaagcaaaggggaatgtatgcaacttgcatgtgggttgtggagcttcttttggtgctcagtgattcttcttccattttccactatattcctgaattctatgtggaatcattggtagactgtttccatgccctgcggcggagtgatcctccttttgtctctcctgcagtatttcttaagcatgggctagcttcatttgtcactcttgttgtcaaacactttgatgatccaaggatatataaagaattcatgtttgtatttgagaacaatcgggaggctataaacagaatgccaagatcacttctgtcagcttttgataatagatcatggatacctgttaccaacatacttttccaactctgcaaaggttttggctttgcttcatctaagaatgttgaaccttcatcatctgcaattttccaggtcctactcagggagacatgtattcatgaagaagaactgtttttatcctttctcaatcgacttttcaacacattaagttggactatgaccgagtcctctatgtccatccgtgagatgcaagagaagcgccaggttgcagatttgcagcaaagaaagtgcagtgttatttttgacatatcatgtagtcttgcaaggattttggaattcttcaccagagagattcctcatgcattcctgatggggccagatatgaatctgcggaggttggctgaattagttgtctttattctgaaccacatcatattagcagccgatgcagagttctttgacatgactctaagacggccagggcaacatcaagaaaaaacaaattgcactatgatcttggctcctcttgttggcattatcctcaatcttatggaaagcagcagtacttcaggccatagggagttaaatgatgtgattacagtgttcacaagcatggattgccctgccacaatccattttgggttgcagtacctactgagctacaattggagcaatgttctccgaggtgacgcttcccttgcaaagctagctcagcttgaagaattctcccattactttatgcacatcactatgtcagcggatggcaatgaagagcaaggtttcagcactgccagtaatgaagaggacaactgctgcatatgctacaattccgattcggataccacattcgagccatgccatcacaggtcctgctacggctgcataaccaggcacctcctcaacagccaaaggtgcttcttctgcaatgcagtggtgacttcagttaccaggatagctgattcgcgcatcgaatctcggtcacctttggcaccgtaa

SEQ ID NO: 13299 - DNA, 1485 bp, Oryza sativa
  Clone ID: TFbOSC405796j.C1.o6.fg
atggagccaccggcgggaggctcctccgatcatcgccggggtgccgggaccggcgcgggcgccggtggggccgcctcgccgtcgggcctccgccgctacggcttcagattctccgcctccagcctcctgcaggccccgctcgctgcgctgctcgagtactccggcgtcgtcccctccggccccggcgccccgcaggcggggccgccctcggcgctgtcgtcctcgccgtcttcttcgtcgtcgtcgtcggaggccgatgggctgctctccgcggccgcggctggggacggggaggtctcgatccggatccagggcggccccggggaggccgacgcggcgggcgtcgcgggggcggcctcgtcgggggaggactcgatcgaggcgaccgccgccggggacgttgacccggcctcggctgccgcggggaggggtggcggcgccgacgcggaggcgagtggtgggggcgcggacggcgcgtccgggaacgggggtggggaccgcgcctaccagcggtatgacgtgcaccatgtcgcgaggtggatcgagcagatactgccattctcgctgctgctgctcgtcgtcttcatacggcagcatctccaaggtctaatactcattctcttgtgctcgtgccattgtgtgattataagcggtttctttgtcacaatttggattgctgctgtaatgttcaagtcaaatgatatattgcggaagcaaactgctttgaagggcgagagaaaaattgctgtgcttgtcgggattacagtaatcttcatgattcatgtgtttggtgtctattggtggtacaggaatgatgatcttctcagacctctgttcatgcttccgccaaaagaaataccgccattttggcatgcgatttttatcatcatgttggcatttctaaccaaatgccacttgcagatacaatggttcgccaggcagcaatggccattaagtgcatgctacttatgtactataagaatagcagaggtcgtaactaccggtcaaatgctaacccttgtggaataccttctgctcctatatcgtgccttgttgccaactcctgtttggtaccgtttctttctgaacaaggaatatgggagtcttttctcatctttaaccactggactgtacctgaccttcaagttaacttcagtagttgaaaaggttcagtcattcttggctgcagtgaaagcattgtcacgtaaagatgtgcattatgggtcttatgcgacagcagaacaggatacccccttgaactctcactctatcttgtttaaagaacttgttttttgctggaacctggtgcaggaaaagatgcatgttcctgtcctcctccgctgtaaacatattttctgtgaggactgtgtctctgaatggtttgagcgagaacggacttgccccctgtgtagagcattggtaaagcctgctgatattcggtcatttggtgatggttctacaagtcttttcttccagttgttttag

SEQ ID NO: 13300 - DNA, 390 bp, Oryza sativa
  Clone ID: TFbOSC402932j.C1.o2.gm
atggatcccacaaccaccacgacagattccgagtgcgacttcatcaagaagatccctagttggatgataaggaattcgccaatgcattgtatggaggccggccactttggcaaggatgccgccgccgccgccgccgccgccaccgcggacgccatggaacatgcactcccctgcagcgatcttcaccacctgagagtgggcaagacggcagagcagagctgctcggtgtgcctcaagaatttcgaggagggcgactacatctggtcgatgccctgctcccacactttccatcagctctgcatcttgggcgaccgctcctgcagggtctgtcacccggctgctcccccatccacggaggagaaaccggaggcccctcggactgttaattga

SEQ ID NO: 13301 - DNA, 377 bp, Oryza sativa
  Clone ID: TFbOSC400545j.C1.o59.gp
ggaggcgaattcttacatattcacttctgcaagcagctagctttacaaataatctcaagcacatctgagaatgagataatctaaacaatggctacgttacaagtagaatccaaaaatcttaataagtgtcaagcttgactatctgttgaaatctgcaaagcttctatactactccatctagctgttgagagagagagccttcaggctcgggcaatcttcgacgcacggcgtggatggcatgatgcacccagggcacgacatcacgccgctctcccatggcgcggcggcgaggccggtgaggtcgtcgcggcagatcgggcaggtggtccccttgaacagccacctggtgatgcacggcgggtggaacgcgtgcccgc

SEQ ID NO: 13302 - DNA, 361 bp, Oryza sativa
  Clone ID: TFbOSC900230j.C1.o3.gp
atactgacagtggaggcagtagtcattcagaaaagaactttgttggatcgtaagaggaccctttacatcttgatgtctacctctataatttacaggttgatgtgtggaaggcctcatcaaaggcgtgatccacgctgccaacgaagtgggaagagagttatagttgtgattcaatgtcgtttcctaccctgttgtcgctgtggcgacgcccaaagccaatggctggagcacttgtggagacaccatctatctcagccttgcaaagggggcacagcgcgtttatcttgagccatttgtccacacaatccttgtggaagaagtgcgcacaagggagctctcggagatcatcgttatcgacata

SEQ ID NO: 13303 - DNA, 1098 bp, Oryza sativa
  Clone ID: TFbOSC401380j.C1.o24.fg
atgagctctctatgcccgtttgccaaactcgcctctgctggcgccacatgccccgtaaaatcagacaacaaaaccacctcatgtcctgtcacagccaacaatcacaccgacgacgacgataatgaaaaaactggcaatgctaacaccgatcctcgtgtggtgccagcaaagtgcccctttggctatgactccaacaacaccttcaagcttggcccactcagctgcgtggtctgccacgctctgctacatcaaagcagcaaatgcaccccgtgctcgcacaagttctgcaaggcatgcatattgcgctttaaggactgtccattgtgtggtgctgacatccaagggatcgagcctgatgatgagcttcaaggccttgtcgaccgcttcattgatggccatgcccgaatcaagagatcacatgctgcaggcgatggtgaagccgcaagtgacaagaccaaggtcatttacgagcatgtctccatggagagaggagcttttctggtccagcaagcgatgagggcttttcgcgcacagaacattgaaagtgcaaagtcaaggctcagtatgtgtgcagaagacatcagggaagagttgaaatctaaagaagacaaccaagaactgtgttctcaacttggagctgtgttaggaatgcttggggactgctgtcggaccttgggagatgctccttcagcaatcacttactatgaagaaagtgctgaattcctctcgaaattgcccaaaaaggatctggagttggtccatactctctcagtttcactaaataaaattggagatctttgctattatgatggggacctccactcagcaagaagctattatgcgcgttcgttggacgttcgcagaagtgcagtaaaagaacactcagctgtggcttcccaggtcattgatgtagcaacttctcttgccaaagttgcggatgtcgatagaaatcttgggaacgaaagcatggcagttgagggttttgaggaagcaattaaatgccttgagaatttgaagctggaatctggagaggccagtcttgagcagcggcgtctctcggttctcgactttctacaaaaacaactggatgacaagtga

SEQ ID NO: 13304 - DNA, 2052 bp, Oryza sativa
  Clone ID: TFbOSC401045j.C1.o15.hg
atggggagcgatgttatccaggccaagctggtacttctgggtgacttgggagccgggaagacgagcatcgtggagtcgacgatcggggcagcgttcttctcgcaggtgctgatcatggacgaggccaccgtgaagcttgacatctgggacaccgccggccaagaacgctaccacagccttgcgcccatgtactaccgcggcgcggccgccgctgtcgtcgtctacgacatctccagcacggattcttacattcgagcaaggaagtgggtcgacgaactccagagacaagggaatccacatttggtgatggcattagtgggcaacaaggtcgacctggaagaaaagaggcaggttggaacgcaggaggcgatggaatacgcagagcgaaacggcctcttcttcatagagacctcggccaagacgtcgcagaacgtcaccgagctcttctacgaactaggcaagcactaccgaaacaactctgctggtcaaagtgcgacctcaccgcccttccgggatggttctccacgacggccggcgccgccgcgacgacggcggcggctggccatggcggctctgttgctccggctgatgcgcctctaccgactcccgaaatacgccatccttaatcgaaaacgtcttttactgaacccgccttggactttaaatgtccctgcaagtcggtgcggcccaccaggccgccactccgagtccgacacgacccatcatatcgcgttcgcgagcccaagttcgagtcggacccggacaccgacagaccgacctagtccgagccctacaaatctcgcgccgccgccgctgctctgctttcttcttccaacctatttccctttcccgccgctgctctcaccgcgaaccctacgcgccgccgccgccgccgccgcggctgcgcacgtcgagcagcccgcgatggagaacgcctgcgaggccggcctgccgctgtcggtggccgtgtcggtgccgccggtgatggttgacggggagacggttccgaaggaggtggaggagtgcgaggacgaggaggaggaggaggagtacgccggggatgcgccgccgccgtggaaggtgatgggttcggatgatgagggcgagacggaggccggcgaggaggaggagattgccgaggccgacggcgaggaagaggcggcggacgtggaggaggtcgagtacgagttctacgacagcgacggcagcgaggacgagggcgacggcgaggaggttgacccggcggtggcgagcgccgcgcagttcgtgccggaagggcagtttcttgggtcggcgcagttcgccgcctacggctgcgccgccggcttcatgcgggtcgccgccgtcgaggcggacccggccgacggccaagagatcctcgtgctctaccgctacaccctcctcaagagggcatggagcgatccggcgggcgtggagctgtccatgtgggcgaaggtgtcgaagatacaccgcctccggttcatcgtcccggcctccggcgacccggcgagctcgctgccattcgccgggctatctctgtccccgctgatctaccacaacgactacgtcgaggagctcgagacgctgtggtccaagctggcggcgcaggtgcgcgtcccgccggtagccacgcgcgtccaggtgatcgtcgacgtgggcatcctcagggcgggggacaacacgccggagcgcagggagtacatgcgcgccgagctggaggccaagaaggagatgccatggccggggaagctcctcggcatggagctgcacgtgccggagccggtggtggcggcggcggcgtcgtgcaagagggacagcagcgaggaggtgttcgacgacgcgccagcgccgccggcgaagcggaggaaggtgttcgacgccggggaggagtgccccgtctgcctggacgagctcgaggacggcgtcgtggcgtggcctgggtgctctgtcgcccatgtcttccatggccaatgcttggagacaactctcaaggggagccagatgtgccctatctgcaggcgtgatcttggcctgaaaaccttgcaggagtag

SEQ ID NO: 13305 - DNA, 375 bp, Oryza sativa
  Clone ID: TFbOSC402929j.C1.o3.gm
atggatccgacggccgggacaggttcctccaccaagaagatccctagttggatggtaacggagctgccaatgctatcgacggaggccaaccgcttgccacagatccctagttggatgataaggaagccgctaatgctatgtatggaggccggccgctctggcaaggccgccgccgccgccaccgcggacgccatggagcagagctgctcggtgtgcctcaagaatttcgagaaggacgactgcatctggtcgatgccctgctcccacactttccatcagctctgcatcttgggcgaccgctcctgcagggtctgtcacccagctgctccgccgtccaccgacgagaaaccggaagcccctcggactatgcattga

SEQ ID NO: 13306 - DNA, 1020 bp, Oryza sativa
  Clone ID: TFbOSC900356j.C1.o18.fg
atggcggattcaaggggagcggcggcgccgccggcgacaagcccggcgccgacgcgagccccgccacgaatccggccccgccagctgccgccgtggccgtcgccgctgcggccgcggacgccggaggggacgacgacgtggccgcggccccgggaggcgcggcggcccgttcacggcgctcagccaggtcgacgccgacctcgccctggcccgcgtgctccaggagcaggtatatgtgggggagatctcgcggagcgggcgtacatgatgcttcgcatgggcggaggcgtcggcgagggcagcgattacgggagctcggatgccgggagctacgagtacgacgacgaggccgaggaggactacgaggaggagctggagcaccacctccgcgtccaccaccacgagcacgccgttggggagggtcgtggcgagggagagcgagatggggagggggctgagggaagcgagttcgaggaggaggggttcgacgaggagtatgatgaggaggaagtcgagccagagctagaccccgcggagtacgaggacgatgaggcttatgcacgagctctgcaggatgccgaggagcgcgaagtagccgcgcgacttatggctctcgcggggatcagcgattggagacctgtggagcctgtagaggagcatgcgaatgatccacaggaattagttgcattgggagaagcggttggtacaggacacagaggcctctctgctgctacacttgcttctctaccttcagtaacttacaaggcagaaggtgtccaagatggcaacacagagcaatgtgttatttgtcgtgtggaatttgaggatggtgaatctttgattgcactcccctgcaagcattcataccatcctgagtgcataaaccaatggcttcaaataaataagagggctttatttgactgccaggctgcatatgttgctaagttttgtgtcaaagtgtggcaacccaagattgtctccaaatttattcgccacattagtgggaagtcttttttatag

SEQ ID NO: 13307 - DNA, 1107 bp, Oryza sativa
  Clone ID: TFbOSC100622j.C1.o1.fg
atggcggcggcggcggaggcggaggaggaggtgcggcaggaggtggaggcggtggcgtcggtgtacggcgacgactgccgcgtggtgcgcggcttccctccccacctcgtcgtccacgtccgcccccgcaccgccgacgactcctcgcagcagttcgtggagctatttcttggaattaaagcatcttctcagtatccaaaagcacctcctcatgtttatgccgtggaaagtaagggccttgatgagaatcgacaggtgtatcttattagcagcatccagaacaaggcaagagaactttcctgctacccgatgcttgtgacgctgtgtgaggaagctgtggagatgctctcaaatatgaatcatccagctggggattgcccactttgtctatatcctttagtcaaagagaatgatggttctgctttgccatttatgaagttgatgtcgtgctaccactgcttccacagtgactgcattatgagatggtgggaatggctacagaatgatgatactgactcgaagaagagtagtacagcagcaactactgaaggattggatttgtccagctcagctaagcatcacaatgtaagtcagcacaaaggactatgtccagtttgccgcaaagtgtttgatgagaaggatattgagcatgttcgtgatctgctaggtgcaaatacttctcaactggcatctttatcgattgatctggacgaagatgaaaaagaagtacttcattctgagtcagagaagatccgtcaagaaaagttcgcatcgctgttcaatctacaacaagaacgaaatggcctgattgaaccaaagaaagacctttccatacagcctggaatgtacatccctcgtcctcccagcgcgcctactgcttccgaaggagacaccgttgatgattcttgtgaagacaccacaacttcaacctcaggaacggagccactcaaccagacaaacagcactggtggtaccaccaagcacaacagcagttcaggtcatcgaaggagacatcgatctcatgcttcaagaagacaaccacatgggcaagggcaacctgctaggcaacaatggcagaggaaaggcggagacacttcacaccaatag

SEQ ID NO: 13308 - DNA, 360 bp, Oryza sativa
  Clone ID: TFbOSC401783j.C1.o18.gm
atggcccccacatgcgtcgggtgcggcctctgttgcgccaccgccactgctcgccagcatgacaatgggacgaagtggtggcggcggaggcgcgccgtcgccgggcgcaagcttcaacaccaacttgcggcgcaagaggagcggagggcggtgtggggtgtggtgtgcggcggtggcatcaagaagcgcgcgctgaggagcatcccggtggaggtgcgcgtgctgccgcgctgcaatcatgggttccacgtccggtgcgtcgacgcctggctggtctcgcacggctcctgcccgacgtgccgcagcgcaacaggagtcgtcggcggcaacggggccgaggtcgcgcctgaagagagatga

SEQ ID NO: 13309 - DNA, 846 bp, Oryza sativa
  unsure (1)..(846): unsure at all n locations
  Clone ID: TFbOSC411039j.C1.o2.fg
gtatccanaaagcacctccctcatgtttatagccgtgcgaaagtaagggccttgatgagaatcgaccaggaagctgtggagatgctctcaaatatgaatcatccagctggggattgcccactttgtctatatcctttagtcaaagagaatgatggttctgctttgccatttatgaagttgatgtcgtgctaccactgcttccacagtgactgcattatgagatggtgggaatggctacagaatgatgatactgactcgaagaagagtagtacagcagcaactactgaaggattggatttgtccagctcagctaagcatcacaatgtaagtcagcacaaaggactatgtccagtttgccgcaaagtgtttgatgagaaggatattgagcatgttcgtgatctgctaggtgcaaatacttctcaactggcatctttatcgattgatctggacgaagatgaaaaagaagtacttcattctgagtcagagaagatccgtcaagaaaagttcgcatcgctgttcaatctacaacaagaacgaaatggcctgattgaaccaaagaaagacctttccatacagcctggaatgtacatccctcgtcctcccagcgcgcctactgcttccgaaggagacaccgttgatgattcttgtgaagacaccacaacttcaacctcaggaacggagccactcaaccagacaaacagcactggtggtaccaccaagcacaacagcagttcaggtcatcgaaggagacatcgatctcatgcttcaagaagacaaccacatgggcaagggcaacctgctaggcaacaatggcagaggaaaggcggagacacttcacaccaatag

SEQ ID NO: 13310 - DNA, 1929 bp, Oryza sativa
  Clone ID: TFbOSC419789j.C1.o16.fg
atggcgtcctacgttccttgttccagttcctcaacccatcgatccaggaacttttgtgacttagttttggtctatgctataattggttccatgcattcttcaatgacactattttcagtctgcaagatactgtctttatatgtagacatgtgttttgttgactattcgaaggaagttcattcttatctaaagtactgcaaagatgtggtttttactggaatgacattttcactagaagaggagcatttaatagatatcttttgggatatgtacaaagggaaagaggatgagaatgcaaaattgtgtcaggaaaagttgagaactacaaatggagtgaataaacgctgccgagatggaagttcaaattattctctgcagaacaaaggcatcctgattttccatatcattccggactatcatcccgaaaatccatggaacgtgcttcacccttcgaacaaacgttttgaagagagaaaaagctgcactgatgcaggtatgctacccggtccccttctcccacttccgccgccgccaccaccggagctcgtagtgtatccctctgtgccgagcctgccaccttcagccacgccgccgtcatcgtcgtcgtccataggctccagcattgccattgtcgtcctcgtcgtcattaccacggccatcgtgactgtcgccattgttgtcattcgacgcagctaccgccgtgggcgccgcctgtcctgctcatcgttctccccacgccgcagcttatccccaagggctttgtcatcttcgccatcagcaatgtctcagatgtggcgcgcggcagttgcagctgtcggttcttcaccgagggccagtgctgccagtgccaggtcctggccggaaatggccgcgccctcttcagctccaggcgatcccggcagaggccctccagtggcattgtcgagctctgcacaaggggcagtgcaggggacggctggattgatggcgtcctcggctacctcagctgctgcgatggcgccgccgccgtctgcgccgtctctgccggaggtggagcgggtgatattggagctgctctcgctgccaccttcgccgttgcagccggcgatgagcggcagcacggcgacctgcttcatctgcaacaaactgcttctcccaactgatctgcacctcgtccttccggtgtgctcccacatgttccaccagcgctgcctcgtcgcctggctccgcagccgcgtcacgccgctgctatgctgccccgagtgccatgctcccatcaccacccgctgccgcaccgacaagagaagcctcgttccaaccttctgctcaggggagtacgacatcgagtcgcagattctggcggtgcccgcgccgccagccgagaaggtggcggaggcagtggggggatctcgtgggtggctgcgctcctcgctggacaggctctccggcagctggagggcgtgctccggcagccgcgccgtcgcagcggtggcggcgccggggtgctcctcgtcgcgccgcaccaccggaagctggagccctggcactggcagcacgagcggccgccacctccacctcggcgctgactcgcgtggcgttcagacggaggtgcagctgcagctgcagctgccggtgctgcctctcgctgatgaagaggtggctgcagccgacgatgatgctgggggatctcgcggctggctccgctcttctctggccacactctctgggagctgggccgtgttccccaccaccagccgctccaccgcaatggagctaccagtgtcctcctcgcggcgcacggcagctgggagcaccgactcgtggtcggggagctgggatcctgaggcgttgagggtgtcggagccgcaaccacgagagagaccatcggtgctcgactacgccagatgggtgttcagaaactcaggcaagtatacaaaacatcggcactga

SEQ ID NO: 13311 - DNA, 381 bp, Oryza sativa
  Clone ID: TFbOSC35114j.C1.o1.np
atgaacgagctggtcgaaccgtcatcgaccatctgcggtcacattttttgcaagcagtgtatcaaggcctcaatccaggctcagaagaagtgccctacctgccggaggaagctgaccatgaacaacttccaccgcgtgtatctcccttctgcggacccgaagcaaggggcgtctaccacacgcgcagcagcagcaacaacgcagtgcatcatccacccaacggcgccgttcaacacacacgtctccattccgttgacgccgaccacgataactagagggcaggcaggcgagcaggaagccaggaagaagaagaagacgtggtggtgccgtggtgggcacacggacgttgacgcagtgccatcggttgcactgagtactaac

SEQ ID NO: 13312 - DNA, 1593 bp, Oryza sativa
  Clone ID: TFbOSC400964j.C1.o128.np
atgaacgagctggtcgaaccgtcatcgaccatctgcggtcacattttttgcaagcagtgtatcaaggcctcaatccaggctcagaagaagtgccctacctgccggaggaagctgaccatgaacaacttccaccgcgtgtatctcccttctgcggacccgaagcaaggggcgtctaccacacgcgcagcagcagcaacaacgcagtgcatcatccacccaacggcgccgttcaacacacacgtctccattccgttgacgccgaccacgataactagagggcaggcaggcgagcaggaagccaggaagaagaagaagacgtggtggtgccgtggtgggcacacggacgttgacgcacagggtccagctgcaccgaatgactcgccgcgcaagcggttctccggcgtcgcgccgccggcggcgctcatcttcttcgtgctggtgttcgccggcggtgcaatcgtcacgcttgatcacaaggagttacggccgagagaaatggtcgtaagcgagacggagacgagggctccgacgagcgaggtgcaagagacggagacgagggctccgaccagcgaggtgcaagaggcaggcaccggcgccgccgccggcggcgtccagcgagcggaactcgccggcagcagcatctgcgagaatcagtgcaggccttcaggcagcgagccattgccgaagggcatcgtgcaggacaagtccaacttcgagatggagccgctcggcggcaaccccgaacggcgcgccgccgtcgcccggccggcgaagagcctcctcgccatccccgtcggcataaagcagaaggccgtcgtcgacaagctcgtctccaagttccccggtgacaggttcacggtgatgttgttccactacgacggcgagatggacgggtggagggaactcgggtggtcggaccgggcgattcacgtggcggcgaaggaccagacgaaatggtggttcgggaagaggttcttacacccggacatggtggccgagtatgagtacatcttcctctgggacgaggacatcgaggtggacggcttcgaccccatccgctacctccgcgtcgtccgccgcgaacgcctcgagatctcccagcccgcgctcgaccaccgctcccagatccaccaccgcctcacactccgcgcccgcaaaggccaagttcacaggagattctacaagacgaggggaggggggagatgcgacgacaacagcacggggccgccatgcacggggtgggtggagatgatggtgccggtgttctcgcgggcggcatggcggtgcgcgtggcacatgatccagaacgacctcatctacgcgtggggcctcgacttcaagctcgggtactgcgccggcggcgaccggaggctcgccgtcggcatcgtcgacagcgagtacgtcctccaccgcggcatccccacgctcggcgacggcggcggcaagccggcggcgaagcggtcgtcgacggcgacgaaggcggcgaccgaccggctcgccgtgaggcagcggtcgtacaccgagctgcagatattcaaccggcggtggaaggccgcggcggagggggacgtgtgctggaccgacccctacccg

SEQ ID NO: 13313 - DNA, 1293 bp, Oryza sativa
  Clone ID: TFbOSC401327j.C1.o18.fg
atgggagctaattgctgtatagctgcaaaagagaggcctcagccatgtgttactccaattgaagtgtcagcattcaggaacgtaagacactctccatcatggagcttccggtgggataaccgcacacacatagaagacataatggaaatgcccgcattgttttccaaccatagtagtggaagcattcggcctgaaacaaagagtggctcaattgcgccaactgatggcttttctaacggaggcagcccttctgatatgttcaacaagctcaagtgccataaatctgacaggaagagggagtcatctaagattgcgagatctgaccttcgaggtagatccaccacaagcaattcttcccctgaggcaaagctttccagaaaatcgctagacacagtaagtgtggcttcagattcgaagatgtcaatctctgttccttcaacgccgcctgctatatccagagcagatccttcatcatcctccagggggcattctctaccaacagatgcagattcaatgaggaaagcacgtcgatcaccagggtatcaactgtatagacaggtctccgacagcaagattccatctctcaggtctctcaacgagggcgcctctcctgaaggaaggccatcctcctccatgctctcagtctgcagcaacgatttatctgcagtaggatcacatggcgagtcatctgatggttggtcaatgcgaacattttctgaaatggtcgcatcatctcagagagagagatggtcagttgatagtgagctcttaggttctgtttcgagtaaaatgacaagatcaaatgcttctaataatcctactacacattcacctgaccaagaggtgtgcaagctatgtttaaagctattaaaggaacggtccacatggaatgctcaggaactggctgttgttgctgttttattgtgcggccatgtttaccatgctgactgtttggatagcttaactgcagaagctgacaaatatgatcccccttgtcctgtatgcacccatggtgagaaatgtacagtgaagctatttgggaagttggaatcaaagacaaagaacaagatacctaaaaatgtgatagttgatgttaatctagatgggagctctaagcatcagaaggaaagtaggagagagcccagattaggcacaagttctagcttgaagggctcgtttagtcgcccgtttttgagaaggcatttctctattggctctcggccatcccagtcaatttcagagagcgagtctgccagaaagaagggcttctgggcaaggcactggagggaatag

SEQ ID NO: 13314 - DNA, 2988 bp, Oryza sativa
  Clone ID: TFbOSC900236j.C1.o5.fg
atggcggacacggggagcctggagaagatggggcgagagctcaaaaatcttgttcttggcagcctgagccttctcagttcggcggtatccatctcctgcaaccacgtcttctgcaatgattgcctcacggaatcgatgaaatccacgtcgagctgccccgtgtgcaaggtcccgttccgacgacgagaaatgcgaccagcacctcacatggacaatctggtcagcattttcaaaagcatggaggctgcagcaggtaccaatgttgtctcaacacaggaggctcctgtggtaaaacttgcagatggatcagattgtgtcaacagcgggaaaaattccaaaaggtcacaaaaatcattgacacgaaaaaggaaggtaacatccgagatggaaaaaaatacagcaaaggatgctacagcttctgcatcccaacctactacaaagccttccttctctactaacaaaagaatacaagtgaaaccattccctgaatctgagacaccaataagagctgagaagattatgaagcctgaagagccaaaaaataatctgaataatgatgttgaaggaaagaataaagcagtggcatcgggtcaacctggaagtccttcattgtcaccctttttttggctaagggaacaagaagaacaagaaggctgtaccgctgagacgttaagtgaaacgcaatctttagacacacccttgcgtcataatgcaccctcttttagcgatattaaagattctgatgacgaaatccctttaaatacaactccaaatagcaaagctgcggctacagaactctttgacagtgaaatatttgaatggacccagagaccatgctctcctgaattgtattccactccattgaaaaagcagagtaaagctaagagtaaactagatcaaattgaagagaagggtgatgaagaagatgtgcatattggtggttcatttgataagctgggtaatgcaagtaatgcagctcagcttgtcaatacaaaagcaacaaagcagaagagaaagaaaacaagtcccagtaacaaaaacagtgcaaaattgtccaatcgtgctgagccctgcataaaaaagtctgatgccaatcaacaaggttcaaatagacgtaaaagtgctgccctaaaatcttgtcagaaaagcagcagtgctgtagggaggaatacttcaggtagaagaaacaaggcctctagcaacagcaagccaattcatggctctagtgataactccccagagtcatatcttcctaaggagggtttggatgttgaagcacctgacaaacccctttctgaaaggatccaaaacttggagaaaactagtcgacgaaagggaagtgcaaggaagctggaaatggcagggaaaactatttcagatactacagagaagaatagtgagccaagaagtaagagagtcagaagaatgtctgaccacgctatagctaaaccggttgaagttccttcaggatctggaaatgaaacagaaataccacagcttcacaccctcacaaaaggcagcattcaacgcaaatcctccaacgctagaagacatagcaaagtttgtggagaacaggaaggtaagaataaacttgagaacacgacaatgacacctattattttacatgggaaatgccaaaataaagaggcagtatgtacagctccttcagtaaggactgcatctgttaagtacaagcaagcaaaatttagcgaacaaccagattgttttggaacggagaactttggaaaccttcaagcatgccctgcacgtaatgttttactgaagaagtgtgaggtatctactttgaaggtttcctgtgctttctgccagaccgatgtcatcacagaggagtctggagagatggttcattatcaaaatgggaaacaagtccctgcagagttcaatggaggagccaatgtggtgcactctcacaagaactgccttgagtgggctcctgatgtctacttcgaagatgattctgcctttaatcttacaactgaattggcgagaagcagacggatcaaatgtgcttgctgtggaattaaaggagctgcacttggatgctttgagatgagttgtcggagaagtttccacttcacctgtgctaaactaatcccagaatgcagatgggataatgaaaattttgtgatgttatgccctctacatcggtctacaaagttacccaatgaaaattctgaacagcaaaagcaacctaaaaggaaaacaacactcaaaggaataaccggcttttccaggtcatctcaaataggatccaatcaagattgtggtaataactggaaatggccatctggatcaccacagaagtgggttctctgctgctcatcactttctagttctgagaaggaacttgtatcagaatttgcaaagttagctggcgtgcctatttcggcaacttggagtccaaatgttacccatgttattgcatcaactgatctctctggtgcttgcaaacggacgctgaagtttctcatggcaatcttgaatggcagatggattgtctccatagattgggttaaaacttgcatggagtgcatggaaccaattgatgagcacaaatttgaagtcgctactgatgttcatgggatcactgatggtcctaggttaggaagatgcagggttattgacaggcaacctaagctgttcgacagcatgaggttctacctccatggggactacacaaaatcctacagaggctacctgcaagatctcgtggttgcagcaggtggaatagttcttcagaggaagcccgtatcaagagaccagcaaaagcttcttgatgacagctctgacctcctcatcgtttacagcttcgagaatcaagatagggcaaaatccaaggccgaaaccaaggctgctgatcgcaggcaggctgatgctcaggctcttgcttgcgcttctggaggcagagttgtgagcagtgcatgggtgattgactcaattgcagcctgcaatctgcaacctctttga

SEQ ID NO: 13315 - DNA, 476 bp, Oryza sativa
  Clone ID: TFbOSC401518j.C1.o5.gp
aacccgcgctctctctctctctctctctctctccccctccctgccgctgctgccgccaccgccgcggcggcgccccgattcggtgatcccccgctcgcccatctccgccgtgacgtatcggcgacgcggagggagccccccaccccccacctccggatctagggtttcgaggcccaggtggcgttgcgctgcgcccccgctcctccgcctctcctccgccgccgagggttcgcgtgaggtttctgcgtattaccagctctgtacttaatttactagtgagaagcaaaatgaagtgcaatgcttgctggcgggagttggaagggcaagctgtatcaacaacctgcggtcatcttttatgtacagaggatgctaagaaaatactgagcaatgatgctgcatgcccgatttgtgatcaagtgctttcaaaaagccatatgagacctgttgatacaaatccaaatgatgattggacaaat

SEQ ID NO: 13316 - DNA, 783 bp, Oryza sativa
  Clone ID: TFbOSC416339j.C1.o6.gm
atggccgcgagcgtgttctccgtggggagaaaaagcccagcccgagagcgccacggcccaggcaatgtcgccgagacctcagggtgggctgaatggaaaattgtcacaggaatcaagcaaaagatgtcaaacagagccacgcactggtgctacgtgtgccggcggccggttcgcatccgcggcggcagccaagacgtcacctgcccaagctgcgacgacggcttcgtccaggagatgagcgagatgggacggaggacggcgagcagcacgctcggtttcgtcgggccagacgccggcgacgagttcctgctccggcgatccccggtgatggaggcgatgtccaccctcatgcggcacgcggcaacggtgggcggcgacgagcgcgaggtcgacgtccacgacgagcatggcggcggcgatggcgtgcctgcgcacgcgagactcggcgtcctcttcaggggagggccccgtgtcggcgtcgagcgccgcggcggatactaccgtgccggtctggaggcgctcttcgagcagctgcagaaccagctggggagcagcaggcagggccctccaccggcgccgccgtcggcgatcgacgcgatgcccgtggtgacgatcagccgccggcacctccgcgccgagccgcggtgcccggtttgccaggacgagttccagctcggcgccgaggcgcgggagatgccgtgcgcccacctgtaccacgccgactgcatcgtgccgtggctggcgaggctcgcgctcgttcctctggccgtttgggccgactag

SEQ ID NO: 13317 - DNA, 2115 bp, Oryza sativa
  Clone ID: TFbOSC401282j.C1.o8.fg
atggcatcggcgggaggccgctgcgacggctgccacggcgacttcggcctctgggagcctcccttgacggcggagtgctcgcacaggttccacctccactgcgtcgtctccggcgccgacgtctgcccggcgtgcaacgcgcgatggaccaacgcgccatcgaacccgccgccgcaacccgccggaggcagcacgacgccgtttggacagacgacgggctttcccatgcgcgtccggccatggtcgtcgtgcgacaaatgccgcggcgtcatagaccacagccagcccaccgtcacgtccgagtgcagccacacgttccacctccgctgcttctccgggagcgtcatctgcccggcgtgcaacgcgcggtggcgcgacacggtggccgtgccaaacccttcgccggcgccgccgtccaccttctttcccgccggcgttcccgcgccgccgccgaccttttcgcccttctgggtgagccaagagtatgacgacgacgagccggtggagccgccggtagcggcacacggtggcggcgtggcaccggcgagcaatggggcgctcgtcgtcaggacgcactgcgagcacacggccgtggcgaggagcgtgatcagggacaatttcgtcgtccttgtccatgccaaagctcctagcatcgccgtggcggaggcgacggcggcggcgcgcgcgccggtcgacctcgtcacggtgctcgacgtgagcggcagcatggaaggctacaagctcacgctcctgaagcgcgccatggggttcgtcattgataagctcggccccggcgaccgcctcgccgtcgtgtccttctcctacaatgcgcagcgagtgatccggctgacgcggatgtcggacgacggcaaggcgtcggccaagagcgccatggaatccctcgctgcgggcggcggcacgaacatcctcaagggccttgtcgaagccgccaaggtgttcgacggtcgccgctaccggaacgccgtcgccagcgtcatccttctctccgacggtcaagacacgtacaatgtcaacggcgggtggggcgcctcgaactcaaagaactacagtgttctcgtgccgccttccttcaagcgctccggcgaccggcgcctgtcggtccacacgttcggcttcggcaccgaccacgacgcggtggcgatgaacgccatcgcggaggagaccgggggcacgttctccttcatcgagaaccaggccgtcgtccaggacgcgttcgcgcagtgcatcggcgggctcctctcggtcaccgtgcaggaggcgcgcatcgccatcacctgcccgcaccccggcgtccgcgtccggtcggtcaagtccggtcgctacgaaagcctcgtcaatggggacggccgggccgcgtcggtggacgtcggcgagctctacgccgacgaggagaggcgtttcttggtgttcgtggacgtgccagcagccggcgccggggaagacgtcacagaactgatcaaggtgagctgcacataccgcgacaccgcgagtcggcagcagatggtcgtcgccggcgagcacgccgtagtgcaaagaccagtggaggtggccaccaacacggagccgtccattgaggtggagcgcgagcgtttccgcgtggaggcaaccgaagacatcgcggcggcgcaagaagcagccgagcgcggcgcgcacgcggcggcgaaggcgatactcgaccgccggcaggaggcgctcgcccggtcggcgccgggtctcgccggcgacgccaggtgcgcggcgctgctgtcggagctgcgcgagctgagcgcccgcgtggcgagcaggcgggagtacgagcagaccgggcgcgcgtgcatgctcgccggcatgagctcgcacgcacagcagcgcgccacgtcggtgcagctgtttggagcggcggcgccgacgtggtcaatgccgatgtgtggatcggcggcgccgccatctctctctttcggggggtttggagggttcgcgacgccggcgatgcggagcatggtggagtcgtcgcgaaagagaagaaagggcggcgacggaagcttaagctttttggatctggtccgaactgaggaagaagccggcagctcagatgacgagaaggagaacctgtaa

SEQ ID NO: 13318 - DNA, 182 bp, Oryza sativa
  Clone ID: TFbOSC400621j.C1.o35.gp
atcctatgtcggatatgctttgagagagacatttgcatagttctgcttccatgccgccattatgttctttgcgaagcgtgctctgataagtgccggtcatgcccaatttgtcgagtgagtattgagaacaagctacctgtttgtgatgctatgagttcagctgattcaataagtgatacagt

SEQ ID NO: 13319 - DNA, 2874 bp, Oryza sativa
  Clone ID: TFbOSC400302j.C1.o1.fg
atggagcacccagttagtaataccatggagccggatctccgggccaaggaccaccgcgcgtgctccgcctccgccaccgacacgtcgtccaggatcatcgcgcagtgggcggcgcgccgccgccagctggcgtgcgacgaccaggtgatcgaccgccgcgaccgcgactccgagctgctcgctctcgcgcgcctccacgccgtctccatgctcgacgcctccttcctccgcgcacacgacgatgccggcggcggcggcggcaggcgtgcgcgttcgccggagcgcgcgctggtgcggaggatcgcgcgggagtggacggcgtcgtcgcggacgtccccgcgcgggggcggcgccggcggcgaggagctgcttggcgagacggagcggcagcgggtgcgcgccgtgcgggagcgcgtgcgcatggcaagccaggggcaggggcacggtggcgcgcacacgcccaggctgatgcgtgggcgtgggcggcatgggcaggacgtggtgacgcgcatggccatggaacgccagcgcgagctgcagggcctctccgaccaccgcgccgtctccgccttcgctcaccgcgcccgcattcagtcttttctacgaggtagatccttccatagtggaagccctatgcatgatgagagaccactctctatggcagccagagaattaggacagcttagacagagtcatccagtctctagattcagggaagaagttcgctcaagaacagaagttaccacaaatggcccagcaacaaaccacactggacccatggatactattgtagatctgcacttacatgaaaatgatcatcgccaagagaatgctactcacaatgaaatccagacacatcaatcaatggaaaatgaatctgtagatatccaaagaagtataacaaccagtaatgatgatgttgtccaaagtgactttggtcaagaacagcttcacagatatgaagattatccagattcagggtcctcagaagaggccagtgaacaatctgattcttccagtccatctgacaatagcaatcaacaagaagaagaaacttacgagcagcaaactaatctgctatggtcaagagagacatctagtagtgaagatggagatcatgaatggaatgttatgaattctcaagaagctgaagcacaatggaggtcaggtccaagtttttcttccaaccgaaatattaacaggttcagtccaccggacgatgatgtatatggagtggagctcagagaactcctaagcaggcgtagcgtctctaatcttcttcgtagtggcttccgagaaagtttggaccagctgatacaatcgtacgttcgaagacaagaagagcatgatgatcctcttgattgggattatcaaaggcagggaacagctactgggttacacagcgacgatcaaggtgaagacaggatcgatgaagcaacaaatcagactgtttctgacaccagggatcaccagccgtcgattcttccacagcaacggcattggcagatggaactgcctcatcatcatcataactggagtcaacaagccatgcgtcattctgaacttgactgggatgccatccatgttctgcgagatgacctgaccggactacagcgagggatgaccagcatgcagcagatgctagaagcttgcatggagatgcagatggagttgcagcgctccatcaaacaagaagtctctgctgctctgaaccgctcactagccgttcctgcaggcgaagaagggatgttagaggatggatcagagtggaagctagcgaggaaaggaacatgctgcatctgctgtgacaggcaaattgactcgcttctttacagatgtgggcatatgtgcacctgctcaaagtgcgcgagcgagctgctccacggggtgggcaaatgcccactgtgccgtgcgcctatcgtcgagggtttacttacctgggcatctccgagccggtttcgactccttgatgctcctggtctcttggcagctgtggaagaaatggaactccagggttctctcttctgtctatgtggtcttggagtctattctttcggatgtaacagcgtgcaacgctactcggcaactaaaactgacaagaacaagagcagcgatctgatcattcagcctcaaattaacgacgttacagaggagagcaaccagaggcctaccgatagcagtgagatcaaccctactgttggtgtttttggggaacattatttgttctggactcaacacatttgtcagcttagcagccaccgtgatggcaccatatacaacaaccagctttattggaaaaataattatgatatcgatgtcactaaccgtgaagagacacgggatcatgtcgactcaatgcttaattatgttttcaatcgcagcagagatgatcccatcgccgtgaaccagggttctcttatcgaaatgactggccctaagagaggcattgcactgatccccgaatgtctgtttgagtttgacatgagaatcaaaactggggagaaagaagaagatgatctacagctgatcgacggaatgatagagttggacgaaatgagaatgcccgagacgccgtacacaactcgcatcaatggcgattctggctccgtcgacctgtgtttagcgaatgtttctaacggagtagaggcaacggtggaagttgtcatatcggaactgatggtgaatggttttgatctatcgatcagctgtgttgtttcaagttcaaggtacgaatacgatgaaagtaaagagtttcagatattcggtggcagtattggtgaggcgtgtggcctaagaaggtttgtgttggctgtctacttggacactgatgcagctgaagttgaagttttggttgcctgcagtctgtacccctaa

SEQ ID NO: 13320 - DNA, 1932 bp, Oryza sativa
  Clone ID: TFbOSC400054j.C1.o20.fg
atgccgcaccaaaccaaagccacagtccagcagcagcgaccaccagcagcagcttccgtcgtccgcgccggcgcccaagaagaggatgcctctgctgcaggctctctccgtgccatcctcgcccagatccccctccagattcgccctcctcaaggcctccatcctgcccaacaagtgacaatgcgagtgagaagcagaatggaacccatgaaattaacggtgaagagccggtgcggcgtgtgctcccacggcgtgaagaccggcgcggcggcggtgttcacggcggagtgctcccactccttccacttcccctgcatcgccgcccacgcccacgccctcgccgccgccaccgctctctcctgccccgtctgcgccgcgccatggcgccaggcccccttcatcaacaagcgcaccaccaccaccgacgaccacaagcgcaagtcctacgacgacgacgagcccctcctcgcgcccaaggccgccgccggcgccttcaaccctatccccgaggacgacgaggacgacgccaccgagttcaggggcttcttcccggcgcgccccaggagcgggctggccgtcaccctcgccccggacgccgccctcgtgtccgctgggcggaggcacggcaagtacgtggtggccgtgagggtgaaggcgcccgccctgcgctcctcgccctccacgcgcgcccccatcgacctcgtcaccgtcctcgacgtcagccagggcatgatgggcgacaagcttcacatgctcaagagaggcatgcgcctcgtcatcgcctctctcggccccgccgaccgcctcgccatcgtcgccttctccggcgccgccaagcgcctcctcccgctgcgccggatgacgcgccagggccagcgctccgcccgccagatcgtcgatcgccttgtcgtctgcgccgccgcccagggccaggaacagccgcaggccgtctgcgttggcgacgcgctgcgcaaggccaccaaggtgctcgaggaccgccgcgaccgcaaccccgtcgccaccgtcatgctcctctccgacacgcagcagcagcagcagcagcagcaggatgcgatccggcgcccgccagccgcccctccggccacgcgattcacgcacgtcgagatccccatcgggccaggggaggagccggcccggtcggcgctggtggcggaggaggacgacgaccagttctcggagcacgccttcgcgaaatgcctgggcggcctcgtcagcgtggtgatgcaggaggtgcagctggagctggcgttcccgacgggcgagatcacggcggtgtactcgtgcggccacgggcagcaggcggtggcccttgggggcggtggcggcggcgcggcggtgagtgtctccctgggcgagatgtacgcggaggaagagcgggagctgctggtggagctgcgcgcgccgctgagccagagccacccacactcgctgtccgtgcggtgcagctaccgtgagccggcgtcgcaggagacggtgcgcggcgcggagcagcagctggtggtgccggccctccacggcgggagctcgtcgcggcggctgcacgacctgttcgtggcgacacgggcggtggccgagtcgcggcggctggcggagctgaacgactacgcgacggccatccacctgctgtcgtcggcgcgggcggtggtggtgcagtcggcggagcaggggctggttggcagcctggacacggagctgagcgacatgcggtggcggcgcgggcagtcggcaggcaggcggcgtggcggcgagtcggaggagactccggtggggacgccgcgggcgcgggggggagagccgctgacgccgacgtcggcgtggcgcgcggcggagcagctggccaaggtggccatcatgcgcaagtccatgaaccgtgtcagcgatctccacggtttcgagaacgccagattctga

SEQ ID NO: 13321 - DNA, 774 bp, Oryza sativa
  Clone ID: TFbOSC8178j.C1.o6.fg
atgccgcaccaaaccaaagccacagtccagcagcagcgaccaccagcagcagcttccgtcgtccgcgccggcgcccaagaagaggatgcctctgctgcaggctctctccgtgccatcctcgcccagatccccctccagattcgccctcctcaaggcctccatcctgcccaacaagtgacaatgcgagtgagaagcagaatggaacccatgaaattaacggtgaagagccggtgcggcgtgtgctcccacggcgtgaagaccggcgcggcggcggtgttcacggcggagtgctcccactccttccacttcccctgcatcgccgcccacgcccacgccctcgccgccgccaccgctctctcctgccccgtctgcgccgcgccatggcgccaggcccccttcatcaacaagcgcaccaccaccaccgacgaccacaagcgcaagtcctacgacgacgacgagcccctcctcgcgcccaaggccgccgccggcgccttcaaccctatccccgaggacgacgaggacgacgccaccgagttcaggggcttcttcccggcgcgccccaggagcgggctggccgtcaccctcgccccggacgccgccctcgtgtccgctgggcggaggcacggcaagtacgtggtggccgtgagggtgaaggcgcccgccctgcgctcctcgccctccacgcgcgcccccatcgacctcgtcaccgtcctcgacgtcagccagggcatgatgggcgacaagcttcacatgctcaagagaggcatgcgcctc

SEQ ID NO: 13322 - DNA, 1290 bp, Oryza sativa
  Clone ID: TFbOSC410095j.C1.o20.fg
atgtcggcgcgcgacagggagacggccgtggcgctggcccgcctcgccgccgcgctggacggggcggtgctcggcctcggcacggcggcgctcgccgtcgcctcgtgggtcaagtacctcgccgcgtccgggcagctgcggcgcatcgcctccgcgccggcggccgccatacccgacctccgctcgctcctcgcggagtacggcggcggcggcggcgacggcgaccagccgatcctcgcggtggtgcggggccacgtccgcgccgccccccgaggcaagtacctcgtccccccaggctccggcgagcactgcgtcgtcgcaaagcatacccagctgtggcatagaagacttgggttaatgttctggattgcttctggatttctgtggaaacagtatcctgaagcaaagttccagttattgattttgttctgccggggctgcggctgcactgcagccaaccggaacattccgtgcttgttcaatgaatggagaggcatctttgggtggacctttgatctgcatgctctctttttcaaatcaattaaggagcagattataacatcatttagatgggtataccatctgtactttgttccatttgttcttgtagatcctgaaaacatgactggaatggtccatgtgaagttagacagggcaatgcaaccattacctcttacaactgtgtatcataaacttaccccagtcgactcaactccttacacattgtttcagactattattggcaatggttacccaattgcgttgttggatgaggaaaagatacttcctgttggaaaggagattacagcaataggctatattcgacctcataaagcaagtgttgagatcagctcatgctcagaaataccttttttcttgtctgaccttaccaaggatgagatggaagccgagttgtcttctcgtgctaaaacactcttttgggctagtgttgttcttggaacaatgtcagtttgcttgctgggctttgcgacttacaggagctggaagaagatcaaagagcggagggaggcaaggcaagcccaagaggtatttcgacaaactactgatgaagttacagacgatcagtctagcgatgaagaggctggtgaaatgggagacgggcaactatgtgttatatgcttaaggaaaagaaggaaggcagcttttattccttgtggtcaccttgtctgctgctgcaaatgtgcactgattgtggaacgtcagttcgacccattgtgccctatgtgtcggcaagacatccgatacatgataaggatctacgacaattga

SEQ ID NO: 13323 - DNA, 190 bp, Oryza sativa
  Clone ID: TFbOSC400139j.C1.o1.gm
cgcgctggtcgccggcgagaaggtgaaggccctcccgccgtgcggccactgttttcacccggactgcgtcgacgcctggctccgttcccagcccagctgcccgctctgccggagcctcctcctcgccgccgccgccaccgccgccaaacccgacgtcaacggcggcgacgacgacgactccgccgtgtga

SEQ ID NO: 13324 - DNA, 783 bp, Oryza sativa
  Clone ID: TFbOSC400645j.C1.o14.fg
atgtggagttttgcgtcaaacgccatagctggaagcataaggaaaaaagcacagccctcaaaatgcagtcaatccaatcctgattgctctgatgatgatgtttcttcatgtgcaagtagagaggaaggccttgaatgtccaatatgttgggaatccttcaaccttgttgagaatgttccctatgtcttgtggtgcggtcatacaatgtgcaagaattgcatcttgggtcttcaatgggctgtcgtcaagttcccaacccttcctatacaactgcctctcttcatctcatgtccatggtgtaacctgttatctttccggctagtttacaagggaaacctcaagttcccacgcaagaactattttctgctatggatggttgagagcatgaatggcgagagagcaaagttccattcccctagtcatgaagagcgccattctttatgcccttctggtggtggcccaagttccagtcaacaccatcgaagacctgctccacgaacagaaagcgccagtggcagagaaaggagtgttgctggcaacgttttcaatacttacagcatcagtgcatctctccaaaagataatgttgtcttttgttcagatgacagccaagtttccactcgtgataattttccttctgatagttctatatgctgtccctgcaagcgtagcagttctagtattgtatgtccttgttacagttttgtttgcactgccgtcctttttgatcctctactttgcttatcccagtttggattggctcgttagagagatcttcaattga

SEQ ID NO: 13325 - DNA, 792 bp, Oryza sativa
  Clone ID: TFbOSC417199j.C1.o2.gp
gaaaagggaaacaaaagcttgcaataatgatctcctttacataatatttatacactctgcacacaggagataagatcaaagaaaaaaaaaacatgctgctgcatagcttcgatcctccccttccccacacatataactatcagtctacatcacgccgtccaccgggcgcttcagcgatccggcagctgatgcccaccgtcaaccactatgctaggcagctcgctctccacgccgccggtggtcgccggcgcggtcaccgcggcggccacatgagaagcgccgttctcggcgctcgccatgtcgtcgccgccgccgtgccgaaccaccacctgccgcagcagcagcccctgcagccgcagcaggtagctctgcccagccggctgcgacgacctcacgtaccgcgccatcgtcgccgctgtcacctcgctggccgacggccggtccggctcggaggatggccggaggttgttgagcgcgctcaggtcgaggttggggaagacggagcaccggcaacgggggcacttgacattcagccggagccactggtcgatgcactccacatggaaattgtgcgcgcacgggagcccacggacctgcataatggattgggaaaagaagtctttgtcagtccttaaaaatgctggagaacgtaacttcataaaccatctctagtcttgttttaccctcgaactaacaaaaatgctccactttacttctaaccatgcttttttattctttatacaagttatattcttcgttgaaattgtggcatgtacacattattactctttt

SEQ ID NO: 13326 - DNA, 792 bp, Oryza sativa
  Clone ID: TFbOSC18350j.C1.o5.fg
atggagcccgtgacggcggcgtcggcggcggcggcggcgagcgaggagcaggtgacgcggcgcgtggcgagccggatcatccgggcgctgcagcaccagctgcggctgctgcaccgcgcggggcccgagttcttcgtgctgggcgcgacggggaacgtgtacacggtgacgctggcggcggcgccggcgtgcacgtgcccggacccgtccgtgccgtgcaagcacatcctcttcgtcctcctccgcgtgctcggcctctcgctcgacgaggcctgcgtgtggcggcagtcgctccgcccgtgccaggtggcgcggctcgtcgccgcgccgacgtgcgccgaggcggacgtcgtggcggggccccgcgcgcgggagaggttccaccagctgtggtcggcgagggccgccgccaaggccgaggagagccgccgccgccgacgacgcgacgaccaggccgccgcagccggcgcgtcggggaggctcgacggcgcggcctgcccggtgtgcctggaggagatgtcgccgcctggggcggcggcggcggcggcgatgctgctgacgtgcgcgatgtgccggaactcggtgcacggcgagtgcttcgcgcggtggaagcggagccgggggaggcgggcggcgacgtgcgtggtgtgccgggcgcggtggcggcagccgagccgggagcaggagaaggagccgtacatcaacctgtccgcgtacatgaacgacgccggcggcggcgacgtcaacatggtcgccgccgacggcgacgacgggggactgtgcgccgggtag

SEQ ID NO: 13327 - DNA, 1077 bp, Oryza sativa
  Clone ID: TFbOSC413657j.C1.o14.fg
atgggggcgttctgctccaagcagaatccgtcggggcagcagccgcactgctgcaaccacagcagcagcagcaatgccgcgccgaaggggaacaatcggttcgccaagttcggcgatgattaccataccctagagcaggtaactgatgctcttgcacacgctggtcttgagtcatcaaatctgattgttgggattgatttcaccaagtccaatgaatggacaggcagagtttccttcaacaaccagagcctgcattctctgggccatatctcaaacccatatgagcaagccatatctatcatagggcaaactctttcacgatttgatgaggacaacctgataccatgctatggatttggtgatggccccacttcatttgcaccgatgattgagacagctattggaattgtggatagtagtggtggccagtatcatgtcctacttataattgcagatggacaggttacacgcagtgttgacacaggtaatgggcagctgagccctcaggaaagggagactatagatgccattgtgaaagccagtgactaccctttgtcaattgtgcttgttggagttggcgatgggccatgggatatgatgaggcaattcgatgacaacatcccttctcgtgcgttcgacaacttccagtttgtgaacttcacagagatcatgtcaagacctgttcctgccagcaaaaaggaggcagaatttgctctttcagcattgatggagatcccagaacagttcaaggcagcaataaacctccaacttcttggaaaacgtcgaggatttccacatcgaacagtgttacctccacctgtgagggatttccaacaatactatgggtgctcaacagtcaaagaaacgcaatctactagctatgggtcgctgcagaaaaagacatcagcacctaaacaggatagtgacataggtgatcagacttgtccaatctgctggttggaagcaaagaaccttgcttttggatgtgggcatcagacgtgctcggactgcgggaaggatctgaaggtttgccccatttgccagagggaaatctccacaagaattaggctctactga

SEQ ID NO: 13328 - DNA, 147 bp, Oryza sativa
  Clone ID: TFbOSC9137j.C1.o1.gp
ggctgagcgagagccaatccaagatgcaggtcgcatggaagcaatgcgagcagggcatcctcgtcagcttctctccttggtcgaagccctcaaagcacacagcgcagtcgctctccctcgcctcgctcacctgcgcttcctgcagct

SEQ ID NO: 13329 - DNA, 2046 bp, Oryza sativa
  Clone ID: TFbOSC101892j.C1.o22.fg
atggttgacataaaccctgatcacatctttgaggttccggacacccctgaccgaatacagcagtcaacatgccctgtatctagcccagctgctaggagaggtattgcaaaagcagctggaactccattaccatcgcgaagaattaaatttaagatcacaaataactccatccagggtcaatcaagtagaggcaatgcaagtagtgtgtcgcctgcacctttagatgctggcgatatttttaaacaagccgagttggcacgattgctgccagtggcagaagatcctgaagcaagatcatccttgctaaaatcaggtcggacgatagagacatctgttgagaatgaaaaggtgccaaaaaaatctggtttggatcagagcatgaatatttcaaacaatataaattgcaggggctctggagaaagggaccgtagttgccaaatcagaaaaggggatattagtgcacgggatgccaatagctgcaatgctgactttctctgtttaggatcaggtcttcctactactacggtgggaaaaccacgaaacagaatggggactatcacctttaagaagccgaaggaagtagtaggtgctaatgtctgttcagtatcgagtcctagagagggcaaaggggaagagatcactgacaagggcacaacaggaatttcaagctctacaccaagcattgttcctcaaaggcatgtgggccaaagaaagctggtgcggaatggttgtatttctccctccaacatagccaaaagaagtctgaaggttgatgaaaagcgagaaatatgctctacaagtggactcttacactatccagatactcaggttgatgcttctgggaagggaaatgtgatagatcttactgatagttcacctataataagaaggcagggaaacactgcaactgacatggaaaaaaggtcagggagaaagtcggcaataggcagagctggggagacggtaattccactggctgcaaatcaagtgaacagtattttttctgaaggtaacaagaataaaggaaaagaaatttcccatgatgtcgtgggtgctaagcagtctggagaggcttatatgaggagggtttgtccaagatccatgggagattcttcttccgttgcaaacaatgatcacaccggtataggttctgagcaaggtaagatgaccaatagttgtggaagagaatctggatcttctgaacagtctaatctggatcgagcatctgcagcaggagacagcaataactcaattgagggaggagacaacaataactcaattggtggagcaaaaacattgcagactgctagttttgttaatagaacaataaggatcagtagcagaaagaggaagcgcatcgcaagttcttaccatcctggtgaaagctctagctctgttgatgttgatcaacctagagttgcatcatcagactcaacagctgctagaaatcataccactcaccgtcatcatattcctgtagtagatattgatgacatatgctctcctgaagtaaggcctagtttgagtgggattggtagcagcaatcggacctcagtggatcccaacataagagaacagttggagtctgatgagttattggctcgccaacttcaggagcagctttacaatgaaactcctcatgttgttcccacagaagagattgatgcgatcatagcaatgtcacttcaacatgaagataatgcgcagccgacatctagaactgcgaggcggttccaaagcactacaagaggtccaagggtattgcgttcaactgttcctcagcatgctaatagggttcgatatgactcaaacaacagaagaataatttaccagagagctctttccagataccctgctgcacatattcaacctaatattgatctaaatgattatgatgcactgcttgcattagatgaaaataaccaccagcatgctggtgcttcagaaagccagatcaataatttgcctcagtcagtaatccagtgcatagacgaatggctaagaaggaagaaactatgtccagtttgcaagtctgggatcacataa

SEQ ID NO: 13330 - DNA, 657 bp, Oryza sativa
  Clone ID: TFbOSC411348j.C1.o1.fg
atggcgatgtcgccgcacgaccagcacgagcacgagccggaccacgcccaccgctcgccgtccaacggcacggcagcgaccagcaccatcgccaccaacagatggggtccctactccggcgccggcgacttcgccagcaacatggccgtcatcctcgccgccctgctcgccgcgctcgccctcgccctcgcgctcaacgccgccgtcaggtacctgctccgccgccaccgccgggccaggcaacaaccagccgccgccgccgccgccgccgaggacccggagaagccgcctgtgcaggaggccgacccgccgccgccgcccccggctctggtgtactccgcggcgggcaccaagctggccggcgccgcggagtgcgccatctgcctcgccgagttcgtcgacggggacaccgtgcgcgtcatgccgtgttggtgccaagaaattcctctggaatctgggctcagatttgcacagataaaggtttatcagacagggcctttcaatgtagaggctgcaaatttgcttccaactccgggaatttgcacaacctgcagatttgtttacaggggagtggtgaaacatcttcattttttatatggagactggagagacatcctagcttgttttgtgaagggaaagaaaaacacaaacagttag

SEQ ID NO: 13331 - DNA, 348 bp, Oryza sativa
  Clone ID: TFbOSC401961j.C1.o21.fg
atgcaggttggtggcaccgccgccgcggccgctgaggtgtccatgtcgtaccgggagacgaggagagaggaggaaaagaggaggggtaccaagatgaaggtcaagattcttcagtggcatggggtggcttcttggacatggaacgcccaggatgaaacatgcggcatatgcaggatggcatttgacggctgctgccctgattgtaagttccctggcgacgattgtccgctcatctggggttcctgcaaccacgccttccatcttcactgcatactcaagtgggtcaattctcagacatctacgccactttgcccaatgtgccgtagggagtggcaattcaagggctaa

SEQ ID NO: 13332 - DNA, 186 bp, Oryza sativa
  Clone ID: TFbOSC402359j.C1.o1.gm
cctttggcccgttatgggcccctcggcaactgcgcgcacgcgttccacaaggcgtgcatcgacaagtgggtcgacaagggccaggccacctgcccgctctgccgcgccgccctcctcccctccgccgacgacgccgacgccgccgccatcgccgccaccaccaggcaccacctcccctccttctga

SEQ ID NO: 13333 - DNA, 1122 bp, Oryza sativa
  Clone ID: TFbOSC404332j.C1.o15.fg
atggcatctggaactgatgagaaagccaagatggagggtttgacatcagctgcagcctttgttgagggtgggattcaggatgcatgtgatgatgcatgtagtatctgccttgaggcgttctgtgagagtgacccttccacattgactggttgcaaacacgagttccacctccaatgcattcttgaatgtcaagagctgctcgaggcagtggagcgtgaaaggaatgtaaggaccaatcaaactcgaaatacaactatatttcatcatcctgctcttggagattttgaggttcagcatttacctgttgttggtaatgatgctgaacttgaagagcgtatattacagcacctagcagcagccgctgcaatgggaaggtcacaccaccttggtagaagagaaggacacaggggtcgttccggctctcatggtcgtccacagttcttagttttttcttcgcatccaaacatgccttctgctggttcagtttcttcatcgtccgttcaaggggaagtggataatgaatcaagtcctgtccacacaactggtgaattatcactgcatgctaacacccatgaagaagcaggcaatcaaagtcctgggatgcttacctacgatgctgatcaagatgctgttgtttcatctggaaatagtacccctgtatctagccctaggtttttcaacaggaggcattccactgggcaatcaactccagtaaacaacgacagagctgggccttcagatcttcagtctttctcagactctctgaagtctcgcttaaatgctgtctctatgaagtacaaggaatctattacaaaaagtactcgaggatggaaggagagacttttttcgcgtcattcatctgtggcagatcttggttctgaagtaagaagagaagttaatgctggaattgcatccgtatcaaggatgatggagcgtctggaaactagaggtagtaatggtagaacaagtgatggcccagcaatatccacttctgaagttattcccagtacagaatcaagcaatgagagagttacagaaaacaatccaactactgcagcgacaagtagtggcaacacttctgcgtcttctgccccttgtgttacaacaaccggttcaaattag

SEQ ID NO: 13334 - DNA, 2136 bp, Oryza sativa
  Clone ID: TFbOSC10241j.C1.o6.gm
atggatgagaaggtgaagatggagagcaagctgtcctccgcggcggcgttcgtggagggaggtgtgcaggacgcctgcgacgacgcctgcagcatctgcctcgaggccttctgcgacaacgacccctccacggtgacgagttgcaagcatgagtaccatctgcagtgcattcttgaatgccaagaactacttgaggctgttgagcaagagaggaacattcgagctaaccgtttgaacactgccgctgtttttcaccatccagtattgggtgattttgaggtccctgtaggagctgatgatgctgaacttgaggagcgcattatacaacacttggctgctgctgctgcaatgcgtaggaatgaggctattcctggtggctccctgcatgcaagttcaggccaagatgaagaccatgaacaatcttctgacttaggttctgctcatccttttgctgctcttgctgctgtagaccaaggacatatgagtggtggttcgcagctatacgtgggtcattctgaccagggtgcttcaaatccatctctgcatgatgagagagcaatgagcaggaaaccaaacaacgcgtcgtcttcttcctgcgggaaactaggcgcccccaaaggatccctcgccgacgagggcgcggtagcagcagcacaagcaattcgcgcaggagagaagtggccgcaggccgcagcgatgggcgcgccggtttgtggcgcactcgtgtgcttcttcgttctcctcgttgcccgtgcggccgcggagacggcgccggtggaacgtcccacattgccctcagccgacgtcgccatcgacggtaatggcaacggcgctcgtgctggtgcgggcaaagctgccggcgccggcgccgtgggaggagggatcgtgtcaaactcggtgctggtggcgttgctggactcgcgctacacggagatggcggagctggtggagaaggccctgctgctccaggcgctggaggacgccgtcgccgagcacaacgtcaccatcctcgcgccgcggaacgaggcgctggagcgggacatcgacccggagttcaagcgcttcctgctcgagccgcggaatctcaactcgctccagtcgctgctcctcttccacgtcctccccgcccgcctcccctccggttcctggcccgccgcggccacccacccgacgctcgccggcgaggatgttgagctcgccgcggccgacggcggcggcggcatgcgcgtcgcccacgccgccgtctcgcgcccggacgcggtggtcaggacggatggcgtcatccacgggatcgaccgcctcctcgtgccgcgctccgtccaggacgaattcaaccgccgccgcagcctcgccgacatctccgccatgccgccgacggccgcgcccgaggtggatccgaggacggatcgcctcaagaagccggcgccacccggcgattctcctgtgctcccgatctccgacgcgactgttcccgatccctccgtcgcgctggcgtcggagcccagtgaccactacgacggcgacagccaggtgaaggacttcattcagaccctgctcaagtacggcggctacaacgagctcgccgacatcttcgtcaacctcacctcgctcgccaccgagttagcccagctcgtctccgaagggtacgcgctcaccgtgctcgcgcccaacgacgaggccatggcgcggctcaccgccgaccagctcagcgagcccggctcgccggagaacatcctgtactaccacatgatcccggagtaccagaccgaggagagcatgtacaacgcggtgcggcggttcggcaaggtgcgctacgacacgctgcggctgccgcacaaggtggtggcgcgcgaggccgacggctcagtcaagtttggccatggcgagggctcggcgtatctcttcgacccggacatcttcgccgacggcaggatctcagtgcagggcattgacgccgtgctgttcccgccggctgagacgaagacgaagacgaagccggccaccgcccggatcaggacggcgcccgctatcaccggcgtcagcaagattaaacaccggagaggcaaattgctagaagcagcatgccaaatggttggcatccttggccagcgatcgcaattcacacgctgccagtag

SEQ ID NO: 13335 - DNA, 497 bp, Oryza sativa
  Clone ID: TFbOSC34110j.C1.o1.fg
acttggttacttgtgttcgatccaacatataccacgtgaaacaaccacccaatactatgagcaccaaggcagtgtgccatgtcgtcgtcgacatcgagctccaagacgtagcccgcggcggcactgctgctactactaccaactgctgcgcggtgtgtgtggagccattagagtgggtggcgatcgggccatgcggccaccgctgtgtttgcgcgagatgcattgtccaggtccgcttcgtcagcgaggacaggcgctgtcacgtgtgcagagccccctgtcctctcgtcgtcgtcatcaaggggcactgcatcaacggcgccgatatcctcgctgagctgccatcatcaccgtccatgataactagacagggtagagtggacaacttctggttcaacgtcgacacggcggcctacttcgccgatgagcagcaattcaaggtggcgaggattgcttgcgttaaaaagtccttttataagcccaaggagaagccatag

SEQ ID NO: 13336 - DNA, 879 bp, Oryza sativa
  Clone ID: TFbOSC408853j.C1.o1.fg
atggcggaagtggccaatgtgggaacaaagtcgtccatcaataacaatgaagacaccagtcggcggcgacgaaggcggtcgacggtgaaagcgaagatgcccactaatggcggcataataggtcagccgtgtaagcggaaacaccagtcgacggcagcgaaggtgagccaacgattgagtttccccctgactgatttggatcaagtcagagaagaggagcttgaagaagtggtcgacggaaaggaagtgaaaactcccaaagcgaaagcgaagtcggcgactcatgaaattgattccatcgcgctcgttgataggaaactcgacgcaacccctacctggcgcgccaactgtcgaaacatgaattcggcaataataaaaggggacttggttacttgtgttcgatccaacatataccacgtgaaacaaccacccaatactatgagcaccaaggcagtgtgccatgtcgtcgtcgacatcgagctccaagacgtagcccgcggcggcactgctgctactactaccaactgctgcgcggtgtgtgtggagccattagagtgggtggcgatcgggccatgcggccaccgctgtgtttgcgcgagatgcattgtccaggtccgcttcgtcagcgaggacaggcgctgtcacgtgtgcagagccccctgtcctctcgtcgtcgtcatcaaggggcactgcatcaacggcgccgatatcctcgctgagctgccatcatcaccgtccatgataactagacagggtagagtggacaacttctggttcaacgtcgacacggcggcctacttcgccgatgagcagcaattcaaggtggcgaggattgcttgcgttaaaaagtccttttataagcccaaggagaagccatag

SEQ ID NO: 13337 - DNA, 1998 bp, Oryza sativa
  Clone ID: TFbOSC420483j.C1.o21.gm
atggatgagaaggtgaagatggagagcaagctgtcctccgcggcggcgttcgtggagggaggtgtgcaggacgcctgcgacgacgcctgcagcatctgcctcgaggccttctgcgacaacgacccctccacggtgacgagttgcaagcatgagtaccatctgcagtgcattcttgaatgccaagaactacttgaggctgttgagcaagagaggaacattcgagctaaccgtttgaacactgccgctgtttttcaccatccagtattgggtgattttgaggtccctgtaggagctgatgatgctgaacttgaggagcgcattatacaacacttggctgctgctgctgcaatgcgccaagatgaagaccatgaacaatcttctgacttaggttctgctcatccttttgctgctcttgctgctgtagaccaaggacatatgagtggtggttcgcagctatacgtgggtcattctgaccaggaaggatccctcgccgacgagggcgcggtagcagcagcacaagcaattcgcgcaggagagaagtggccgcaggccgcagcgatgggcgcgccggtttgtggcgcactcgtgtgcttcttcgttctcctcgttgcccgtgcggccgcggagacggcgccggtggaacgtcccacattgccctcagccgacgtcgccatcgacggtaatggcaacggcgctcgtgctggtgcgggcaaagctgccggcgccggcgccgtgggaggagggatcgtgtcaaactcggtgctggtggcgttgctggactcgcgctacacggagatggcggagctggtggagaaggccctgctgctccaggcgctggaggacgccgtcgccgagcacaacgtcaccatcctcgcgccgcggaacgaggcgctggagcgggacatcgacccggagttcaagcgcttcctgctcgagccgcggaatctcaactcgctccagtcgctgctcctcttccacgtcctccccgcccgcctcccctccggttcctggcccgccgcggccacccacccgacgctcgccggcgaggatgttgagctcgccgcggccgacggcggcggcggcatgcgcgtcgcccacgccgccgtctcgcgcccggacgcggtggtcaggacggatggcgtcatccacgggatcgaccgcctcctcgtgccgcgctccgtccaggacgaattcaaccgccgccgcagcctcgccgacatctccgccatgccgccgacggccgcgcccgaggtggatccgaggacggatcgcctcaagaagccggcgccacccggcgattctcctgtgctcccgatctccgacgcgactgttcccgatccctccgtcgcgctggcgtcggagcccagtgaccactacgacggcgacagccaggtgaaggacttcattcagaccctgctcaagtacggcggctacaacgagctcgccgacatcttcgtcaacctcacctcgctcgccaccgagttagcccagctcgtctccgaagggtacgcgctcaccgtgctcgcgcccaacgacgaggccatggcgcggctcaccgccgaccagctcagcgagcccggctcgccggagaacatcctgtactaccacatgatcccggagtaccagaccgaggagagcatgtacaacgcggtgcggcggttcggcaaggtgcgctacgacacgctgcggctgccgcacaaggtggtggcgcgcgaggccgacggctcagtcaagtttggccatggcgagggctcggcgtatctcttcgacccggacatcttcgccgacggcaggatctcagtgcagggcattgacgccgtgctgttcccgccggctgagacgaagacgaagacgaagccggccaccgcccggatcaggacggcgcccgctatcaccggcgtcagcaagattaaacaccggagaggcaaattgctagaagcagcatgccaaatggttggcatccttggccagcgatcgcaattcacacgctgccagtag

SEQ ID NO: 13338 - DNA, 309 bp, Oryza sativa
  Clone ID: TFbOSC8672j.C1.o3.gm
atggatccgacggccgggacaggttcctccaccaagaagatccctagttggatggtaacggagctgccaatgctatcgacggaggccaaccgcttgccacagatccctagttggatgataaggaagccgctaatgctatgtatggaggccggccgctctggcaaggccgccgccgccgccaccgcggacgccatggagcagagctgctcggtgtgcctcaagaatttcgagaaggacgactgcatctggtcgatgccctgctcccacactttccatcagctctgcatcttgggcgaccgctcctgcagg

SEQ ID NO: 13339 - DNA, 379 bp, Oryza sativa
  Clone ID: TFbOSC18110j.C1.o1.gp
tttcttaagaaaatcttcaacttcatatacaattaattcgtttgtacactcgaatagtgataacaagttaaatcaatgagaaaaaaaaaagcatagtcaacattgtcgacgtagtagtagaactagaaaccatcagttgaccgttgaacaaacaaattccacctcgcctgcagcggatccgccaccatcggatcggccaccagcacatgcacatcctctccggccgtcgtcgtcgccgctgccgccgccgccgtcagctcgcgccggcacatggggcaggtccctagcttcacccgagcccaagactcgaggcaccgcgagtggaagcggtgcgcgcacggcgtctccacccacgcctccgtcgtcgtcttctccccac

SEQ ID NO: 13340 - DNA, 743 bp, Oryza sativa
  Clone ID: TFbOSC400014j.C1.o1.fg
atggcctcatggccgacatcatgtaccaaggtgtacgagatcattcagttttcgcgctgcaaggaggaggcgagcgcaacatcaagcatcatcgaccacaggacggccaaagtcggcagacgagatgacggcccgaacatgtcaaaggtgctaagagctacaatacctgagaattcagttagtggatcatcagttcgaggaaagctgcgagaaatggagatggacttggcagtcgagcagtacggcagtataggtgcgtcctccatattaagtactctctccgtcccagaatatagcaacctagcatgggatgagacctatcctaagaccatgttatctgctctctctgcaacaaagaacaggatgtacaacaggattgctccaattgtggggcatgcttgggtaaatatttctgcgcaaaatgcaacttttatgatgacgatgcaagttgtgctaaatatgcattcctgtgacggagtaatgaaatatgagccctttttgataaatctcaccatcacattttacagaactggtggtgcagagaacttctttcactgtgacaaatgcggatgctgctacagctatgtgctgaaggattcccatcattgtgtggaaagagcaatgcaccataactgccctgtatgcttcgagtatctatttgactcaacaaaagacatcagtgcactgcactgcggacacacgatccatctggaatgcctatacgagatgagatcccatcaaca

SEQ ID NO: 13341 - DNA, 420 bp, Oryza sativa
  Clone ID: TFbOSC900071j.C1.o7.gm
atggatccgacggccgggacaggttcctccaccaagaagatccctagttggatggtaacggagctgccaatgctatcgacggaggccaaccgcttgccacagatccctagttggatgataaggaagccgcttatgctatgtatggaggccggccggtctggcaaggacgccgccgccgccaccgccaccgcggacgccatggagcagagctgctcggtgtgcctcaagagtttcgagaaggacgactgcatctggtcgatgccctgctcccacactttccatcagctctgcatcttgggcgaccgctcctgcagggacatgaacgccaatgaggagtgcaaggagctttctttggtagaggatgaagcttctactgcaagagaagcaagcgagctgggaagaactagaggaagcttttag

SEQ ID NO: 13342 - DNA, 960 bp, Oryza sativa
  Clone ID: TFbOSC900389j.C1.o9.fg
atggccgtcgacgcgcaccacctgcaccgcctcccaccaccgatccagcctgctgaatccatgttctcgccgaggcagccttgtttcggcgccgccgccggcgaggttgtcgtcggcggcgccggtggcgcggtgatggcggggctttgccaggaggagcagctggtgcaggggtaccgccaggtgtttgttggaggtggtggggtgaggcagccggcggcggcggaggtgatgaggcagtactcgcaggtgtgcgcggcggcggcggacgcggcggagagcggcgtcacgttcggcggcgggcaggaggcggcggcgccgaggaagaggaagcgcgccgaggtgccggtggttcttggcgccgcgggcgacgtggccgtggcggcgcaggctcgccagcagctggtcgacgtcgaccgcctcgtgctccaccatgcggcgaagatgtgggcggagcttgcggagcagagggggaggcacgcgaggcagatggtggccaccgtggaggccgcggcggcgaggcggctgagggccaaggacgaggagatcgagcggatcggtcgcctcaactgggcgctcgaggagcgcctcaagggcatgtacgtcgaggcgcaggtgtggcgcgacctcgcgcagtccaacgaggccaccgccaacgccctccgcggcgagctcgagcacgtcctcgacgcccacgcgcgccgcggcgccgaccacggcgacggcgacgacgccgagtcctgctgctacggcgagaacgacgtgctcgcgcgcgccgccggcgacggcgaggcggcgtcggccgagcggcgctgcaaggggtgcggcgaggcggcggccgtggtgctgctcctgccgtgccggcacctgtgcgcgtgcgcgccgtgcgcggcggcggcggcggcgtgcccggcgtgcgggtgcgccaagaatggcagcgtcagcgtcaacttttcgtga

SEQ ID NO: 13343 - DNA, 562 bp, Oryza sativa
  Clone ID: TFbOSC404797j.C1.o7.np
ggccgccgaagctgcgcggtgtgcatggagaccctggagtgggcggcgatcgggccgtgcggccacggcgaggtctgcgccggatgcgcgctccacatccgcgtcttccagaacaaccgcctctgctgcatctgccgatcgccgtgccgcgtcgtcgtcgtcaccaaccccgacgccatcgccgccgccggcggcggcggctggcccgccgtctcctcgcggctaccgagcgagggacgggtgggcgagtactggtaccacaccgggatgggggccttcttcgacgacgagcgccagtacgcagcggcgaaggcggcggcgcggctggggccgccgccgtgtggagatgcaaacgagaaccctcctcctcctccgccgccgcattgtgtcagatcgaggcactcagttcacctcaagagttacctgaaggtctcgcagatgtgcacaatgtgtttcacgtgtctcagttgaagaaatatcttcgtgttccagaagaggctttattttcgccgtttgttgagttgtcccgtttcgcgtgtagtttcggagcccgaagacctgc

SEQ ID NO: 13344 - DNA, 981 bp, Oryza sativa
  Clone ID: TFbOSC414535j.C1.o8.fg
atgcggaggaggttccaggactccgtcaaggccctcgaggccgacatcgagcacgccaatgagctggcgtcggagttcttgcgggattacgacggggcggtgatccagatgcggatggcgtacagcgccgtcgcgcacttcctcgtgcagtggatcgactgcaagctcgccggcgcgctcggcctcctcaagatcatgatctacaaggtgtacgccgatggcaccacggctctgccggagtgggagagggaggccagcatcaggcaattctacggtgtcatcttcccgtcgctgctccagctgccgagtgggataactgaattggacgacaggaagcagaggaggctgtgccttcagaagttcaggaaggtggaggagagggtctcggaggtggatttggagagggagctcgagtgcggcatctgcctcgaggtgaatgccaagattgtgctgcccgattgcgcgcactcgctgtgcatgagatgcttcgaggattggagacaaaatttcgtttacctgaatgtggtgttcaagaaagagagaaaaagattacctttgccatatattggctggttgtgttcctcaggatgtaaagtcagttgtaaatctcctgcacttctgatagagtaccacaatgccctctccacagagtctttaaccatcttcatgcatcaagatgtagtccatccaatcaaacctgcatccagaatgactttatttataactgcagcaaacattctattgaactatgtcctgctcttgagcaggaacaccaaatcaaagtcgtgccccttctgccgcgcctgcctcaagaaggtgaatccgagcagcctgtggttgtacaccgacgaccgcgatgttgtggatatggatacgttgactagggagaacattaggcgcctgttcatgttcataagtaagcttccacttgtagtgctccatgtggttgaccttgacatttacgagtaccgtatcaagtga

SEQ ID NO: 13345 - DNA, 300 bp, Oryza sativa
  Clone ID: TFbOSC401965j.C1.o30.gp
aacaacaaagttttttttcctttttttttaaaaaaaagagcaaattgctcatgcaggcaacagctaggatggattctgattaaccaagctagaaaccggcgacgaagagggaggagaaccagatgacgaggtcgtcgccgagctggagctcgtcgagcccggccacggcggcggccaccacggcgccgccgacgtggaggcggcagagcgggcacgtccgccgccggcagtagagcgccagccaccggtcgacgcagtcccggtggaacgcgtgcccgcacggcagccgccgcacctcct

SEQ ID NO: 13346 - DNA, 693 bp, Oryza sativa
  Clone ID: TFbOSC826j.C1.o13.gp
aggacatccaatgacacatatatgttaaacaaatagcaagtatcaatacacactttgcttgactgagcaaagtagcagaagaaagtaggcatgtgaattcttttacaacactccgaccggtaactgcagcaactacaacgtttgaaaattttaaaataaaactattctaaagaaacaatcacacaccaccatatagtcattttgttatcagatgtaccaacggaacattctagaacatagaccaccaactctttttggtgtccacatgtacttcagtggcacttggggatctacagtacagttgccttctaccactcctagcgggatttgtaaagcataaaactagagcgaaaccgatgaggcttacaactggagcagcagcaataaaaagccatccactgcgcctgcgtgcactgtttggttgctcatcaacacgaacattgtgttcacttgtattagtctcttcgatcacaccagcagccatctgacgagttacctggacctcttgttcatcagaaatttcttccacaacctgaatgtctcttacattggttgtggcttgcttggacctttcatactctgcatcatctgtaggaagctcatatcggcagacaggacatgtatttctagaactaagccatggcaagatgcacgatgaatgataaagatgcatgcatggtagctgttttgctc

SEQ ID NO: 13347 - DNA, 1155 bp, Oryza sativa
  Clone ID: TFbOSC401130j.C1.o66.fg
atggcgtgtggtataggcaggtggagcagagcggcggcggtaggagtgaaccgacaagcagcagcgggcgagctcgatctccgcccgggtgtcctcctctcactctcacgatttcgaccgaagcggcaacgggtgaagcaaaggggtggaggtcatgggcgatgcggtgcagcttcatcacgggccctcaccggcaccgaaaatgggaagggagagtggaggggaacaaaaactacaagctcaagtggatcaagattggcttcatcattggtgtcttccgccggttcacgctcgtttacaattttgctccttttattttttccggatcaaacagccatctgccaacagactaggagtaccaaggagtcgaagccggtgcggaggtgctcagcgccgccggcgccaccgaccacagccgcatcgtcaccgacagcgagtacgacacgtctcctggacgacgacagcagcagtagcgccggcgccggcaacagccacgtcgtgatagacatcgacgacgacgacggcggagtcggagacagcgacgacagcgcctgctcgtcgtcgtcggccgaaggcccctgctgcgcggtgtgcatggagccgctggagtgggtggccgtcggcccgtgcggccacgccggggtgtgctccgtctgcgcggcccgcatccggtcgtccaggagctggcagcccgacctccggtgctgcatctgcagggctcactgccccttcgtcgtcgtcaccagggcggcggcggcggctgcccccgccgccatgccggcggtcaacagctaccaagagtggcgggcgcgggggtactactggtactgcaccaccatgttggcctacttcgacgacgtggagcagtacagggcgacgagggcgatcgcgcgcggcgaggttaaggggggcgccgccgtggacgtggacgggaacgacggcggcggcggtggccgccgcacgctgagcagctgcgtagacgtgttcaggttcctgctaattgtggccatctttgcgctgttcggcgtgctgtttggctccgtcttttcgtcactaacagcgggaggaagagccacaccgggtgacaatctggccttcatttcagcatgcgccgcggtctcgatgctaggatcaattctcttttattttgcatga

SEQ ID NO: 13348 - DNA, 1608 bp, Oryza sativa
  Clone ID: TFbOSC8604j.C1.o3.fg
atggccgtagtgcttacccacggagtcgtggacgagggcggtggtgagcggagatggatctggcttgtagcggaggaggcagggaaggaagctgcgaggagaggaagaggagaatgtggcaagaggaagacgaggagatggagcagctcaccgaggccatccaggcctccctaccctccaatgccgccgcccccgcgccaccggaggaaccttcccacgcctcatgtgccctggaaatcccacgccgccgacctcgcgcgagccgagcatgaccgccgcgacgcccaggcctgccgcgcctaccacgcccgggccgccgcctccgtccgcgtcgccgcgcacgacgccctcttcgcgcgcgacctcgccgccatcccggaggacaggtgggcccacgacggcgactacttcgagcggcccctccccctggaaggaggcggcgcgctcttccgcgtgctgttcaagggcatggcgagcagggaggtggtggggccgcgtgaccgtgaccctggcgtcggggtgctcgccgtcgccatctgcgggccaaggggggaggtggtgctccggatacacaagcccgtgcaggcgcaggcgcagcaagggcggatgatgctggaggcgatggcgctggtggaaggcctcaatgcggcgctcgccctcggcatccggaccctcaacgtcctcactgacaacaagccgctgcacaaccatatgagtggtatatggcgcccaagacagaagaggcttgtggatttgatcaatgaggctttctcaacaaaacagaaatttgagcaatgtgagatcctctgtgttgcacgaacccaagtcaactatgtcacaaaattagcaacagattctctgcatactcaaattgccaaagctgctgctgtgagtgctggcaaggagaaaaaagagaactgcaccatctgcttggaagacactgacgtctctaagattcatgcagttgaaggctgcgcgcatcgcttttgcttctcctgcatgaaggagcgtgtcaaagttaagctacttcatgggatgctcccagcttgcccacaagatggttgcactaccaagctaaactgtggagggttcaaagatgttcctatctccacggttattagcgatcatggtgcagcgtatcagggaagcacaaattcctccaactcacaagatttattgcccatatcccaagtgttcagccttgatgtccatgagagaactgatacatccaatgcaagcatcatcctcaaaatgacttgttatgactacaagaggaggtacccccatgctcgtctagaagatgcctatctacagaaccttgcacggcagcggtgcggctatgagttctgctacacctgtggaaaagaatggaaggagaagaaagcgacctgctcttgtccactgtgggatgaacgcaacattatccgtgatgatcctcaaggcaatgctgctatccatgatgatcctgaagatgaatatgatgactactatgatgaggacgaaaataattactatgttggagaaggccttcagtacaatgtggattaccatcgtcagtatgatggaggggaccgtcaccatggccacttctatcaatacaatcgctag

SEQ ID NO: 13349 - DNA, 981 bp, Oryza sativa
  Clone ID: TFbOSC401130j.C1.o102.gm
atggctcaactccacggcggcagcgtcggccacagccaagccatcgacgacatacctcaattctacgcgagcagctgtagcgccaccgcctaccacagccatgccatggagatgtcccggctcgacgcgagcgggcgcggtagctcccgcaccgccgccgacgacaaaggcggccacgtcgtgatagacatcgatgccgccgacgacattccaattccattctgcgtggtgtgcatggagcccctggagtgggtggcggtcggcccctgcggccaccgcgtcgtctgctccgcgtgcgccgcccgcgtccgctccgcgccctactccgaccaccggtgctgcacctgcaggacgccctgccccaccgtgttcgtcaccaaggcggcggcggcggcggccgacggcgaacttaattaccttctccaactccaaggcgatgctggcagccttcaagacgggcgggtcggcgagtactggtacttggcccccatgtcggcctacttcgacgacgagcggcagtacgaggcggcggccgcgtcgtcactgatgatgaagcatcagcgaccgccgcccgatgctgacggtgagttccaaccccgccatggcggagatcgcggcgacggtgcactaccgggcgatgaattcggggcgccggagctgtcgtttttggctcttttctttgcggcgtgcggcgcggttgtcggcctcggcttcactggatttggcactggctggggtcaaaaggtggccatcgtgttaggatccgccgtggcaaacggtgtcaggggagcttctaagcttcttcgtttctgttggaggcatgacatgagagccttcgaccaaccctgccgaaaccatctattcgacgagggatcaaaccagaggcgtcggcttcgaccaaggcgaaggtacatggcgaaggccatgtggcgaagcgtgtgggcgaagaccaaagactcggttccaagcctcgcagtctag

SEQ ID NO: 13350 - DNA, 3201 bp, Oryza sativa
  Clone ID: TFbOSC400049j.C1.o37.fg
atgacaaagacgcagccgcaactagtggagtcggagccggtgaagaagctccaacgcttgccaccagtgtttagtcgtgtgttggagcttccattcccaagggataccaatgttcgtaagctctttaccaccaacgctgacctcttttttgtgccacatggtgtcggtggtgaacctgatgttgttaaggtacacattgtgagactcgagcgctgggatatgactagggtggtggtgcacattggacctggggagccagacttaaggaatgatctagtctatgacaagtggcgcttccccctagctgagacatccattctatcgatggttatggcagggatggatgcaagcggtgatggtgggaatgaggggatcccaatgtggcccaacattgataaaagaggaggaggaggaggaggaggcggcggattcgggcttcttgctggtgcaagctacattcctaccaagttttcaaggcctcgaaattctcagaaagttgaaaagtgtgtgttggataaggtgaaagcctctaagttcaagagtgccagagattatgactcgattccgatcgaggggcaattcatctcggttgccaacctgaaggagcggatttttgagtccaagcatcttgggagaggcacagattttgacctcatgatttcaaatgcgcagaccgacgaagaatatgctgatgaagctactatgataccaaagaacacatcggtgttgattcgtcggataccaggaagaccaaggaagcctattgtaacagaaccagaagagacaaaagccatggaaggtagggtagaagaaaccatgccttctggtagtgcttttcttgctgatgcatctatgaaatatcctgaagaatctgagtgggatgacgagtttggcaatgatttatatgtttctgattcagtcccttcacagctcggtagccaggcggttgatgcatctgaaaataaagttgatgaagatagtaaaataaaagcacttattgatacatctgcactcgactatagtcaaattcctgatgggtatggtggtggaagaggctatggaagagggatgggtggaagaatgatgggtggtcgtggttttggtcatttcattcaacattgcccaacaaatggtgatgctagatttgacatgaaaaggatgaaacctccaactggcattccaaaatctatgttgatggcaaccccagatggctcatatgcactaccaagtggggctggtgctgtcttgaagccaaatgaagctgcttttgagaaggagatagagggattacccacaacccgctcacttggtgatcttccaccagagttacgttgcccattgtgtaaagaagtaatgaaggatgctgttctaactagtaaatgctgctttaggagtttctgtgataaatgcattagggactacattataaacaagtcaatgtgtgtctgtggtgccacaagcatattagcagacgatcttctccccaataaaactctaagagaaaccatcagccggatattagaggcaccaccaactagcagtacagaaaatgtgggaagcatggtgcaagtacaggatatggagtcagctattcctgtacagcccaaggttaggtctccagctgtttctgctgcttcaaaggaagaaccaaaaagaacacctgcacctgtagaagagtctccagatgttgagagccatagcgaagtgaaaactacaaatgttgatatgagttcttcagataagaaggtccccgcattaccagatgttgttgaaggaaccatggagtctaaaattctgaaagaaaaaacaccagaagcaacacctgttgtgaaagagtcacaggaaaaaatgcctgttgtgggcgaacaagtcgtaaagaaaaagaagaagaagaaggtgcgcgcaccaggaaatgctgaggactggaaaccctatcaggactttggagctgaaaattttgctggaatgcctatgggtccggcaggaggcttcaacccttactggggaggggggatgccattgccaatggattacatgggtgcgccatttcctggtcccatgccatacatgggttatccaccaggtcctttcgacccttttggtgggggagtcctcccacaagatccatttatgcccccaggatacatgatgccagcagttcctagggacctttctgaattagcagttaacagtatgggaatgaatatgggtccaccggttgttagcagggatgaatttgagctccgaaagcctgataataggaggagacgtgaaatggagcgattcaatgaaagggagagggagcgtggacattcccgcgagagagaaagagaaagggagagggagagggagagggagagggagagggaaagggaaagggaaagagagagggacagagaccaaaatcgagatcgcgatcgagaccaagagcgggatcgggatcgggagcgagacagggaaagagaatctcgaagggaagcgagggaatcatccggagccaataacgatagtactacctcaatgaggccgaaggctaggtcaaggtcgtcgcagccggcggacaggtcggcgccgcctccgccggcgagccccgaccgccactcccggcgctccccgcaccgctcctccggctccggcaagaagcgctcctcctccgaccgctacgacgacctgcccctcccgccgcctccgccgcccgcgtcgcgccacgaggcggccgagcacgcccacgcgaagaatacggcggcggcggccgacgcgcggtccaaggccaagggcagcgtcttctcccgcatcagcttccccggcggcgacggcaacccttccgacgccaagcgcagccgcaggtcctcctccgacaagcccccggcgtcctcttcttcctcctccaagaaagcacgtgccgctgtggcggaggacaacgacggccgccaccaccgccgccaccaccgtgaggcggccgccgcggcggaagagaggcggaggcccgcggccggagactactacggcgaggaggaggaggacgacgagagcgaggaggagcagcatttcaagcggcgcccctcgtcgtcgtccaggcgggagcgggagcatcaggaggcgcaggaggagccgcggcggtccagggagcgccgcggcggcggcagcgacggcaaccaccaccacaaccatggcggtggcggcggccacaagcgccggtga

SEQ ID NO: 13351 - DNA, 921 bp, Oryza sativa
  Clone ID: TFbOSC401130j.C1.o74.fg
atggctcacctcgacccaaacagcggtagtggtgccactgtcgccgctgccagccacagccacgtcgtcgtcgatatgcctcaactggacgcgagcagccatagcaccgccagctacgacgacaaaagcggccacgtcgtcatagacatcgaatccgaaggcagatcaggtaccaccggctccgacattatcttgtcctgcgtggtgtgcacggagccgctcgagtgggtggcggtcgggccctgcggccaccgcgccgtctgctccatgtgcgtggcccgcgtccgcgccggcccggacgccgacaaacggtcctgcatctgccggacgcgctgctacaccgtggccgtcaccaaggcggcgacggccgctgacaccctacacgccttcccaaagacggtgccggtgacctcccgagactggcggatcggtaaattctggtactacgctgccatgtcggcctacttcgacgacaggaaccactacaaggagacgaagcgcgcggtccgcgatttccttgaaaagcagcgggcggcgccgtctccgccgccgccgtgcccggacgacgatgtcactgatgaaaacttggaagcgcagccgccggcgccgcaccacccacgtgtatcgtggtgtggaatcctgtttgttttagttgcctttgcatttgtctgtggacccccagcgctccgcgccggtgtgcaccgggtagaaacctgcgccacggccgcgacgaggacgcatcaggacgaagtgctacgcatcagcaaggctcctaagtcgcagccaagtgctacgcatcaggacggctccttgccaattgccatggagaaactggacggagaggacagagaggaggaggaagaagaagaagaagaagaaaagaagcaagcagcaagcattagcgtaatgttgacacactag

SEQ ID NO: 13352 - DNA, 2607 bp, Oryza sativa
  Clone ID: TFbOSC22501j.C1.o1.fg
atgtccactctcgcggcgcatccaccgttggggccagcggcggcggcgcaggagaaggcggcgagccggaacaagcgcaagtaccgcgccgagccgccgtccgccgagctggggtcattcgggctggagtacccactgacggccgactgcgtgggcttcgagttcatgtcgccggagaaggcagccatcgcggcggcggcggccgccgccgcggtggccgccgagggcgtcaacctggacctcatcccgggctcgtgcgattgcaaggatattcaccccacggcggaggagctactggagtgccagagatatgtgaattggaatgaccccaacgaggcgctgctcgaggagatccttctcaagggcctggacgcgacgttcgacaatgccgtaggtgtgatcatcgcgatgggttactccgagcccaccgcgcgtgccgccgtcctgcgggctgccacgcagtacaattggagggagagccttgctgggttcggcgaggcggcggtcgaggtgctcaagaccgagggggacatgttgagtgagggcgcctccgaggaagacatgaggaagattgagcaggcagtgctcggtggcatgattgcgttggtcaatcaggctcagccgttctacactacaggtgatgtgatgttctgcttgcttatgtcggatatgaatgtggccaatgcctgtgccatggactacaatccggcttccctcccagcagtggatacgcaagtgattgcccagccagttgttggaaactatgaacctaataatccaagttcggatttatcagtatctattaccaacccacagactggcgtcacttttcgtggaaaacttaccccagtgccacccaattcttacaatactgccaaggctgattcatccgcaacaccagcaaacctgaatgtaccgagcagtaaaccctctgtctcaggtaaggcgcagagtgaaatcccgaatcttaagccaaaagaaaactcaaatcctgtgcctgatcattcagaggagcaaccattcgttgctgctgcgacacaacctgtgaaagatgataagccaatccctagtaagagggggagttctaagcgggattccttgcatcggcagaagttgatgagttttgataagagttcccgagcactgggttctaaaggatctcttaggtcaagcaagcatagctctttgggtagcgcagtgctggacaggaagtgcaggtcgttttcagattctactactagcagtttgaaggcctcatccaaagtaggcaaagggttttctgcaagcatgaagggaccggaagtaccacctgacctttcttttactggtgctgcccttccctccaatccatcatttgatgccaagctgagtagtaacttgaacccattaccagctgctagcacagatctctcattgtcgttgccattgccgtcctcaaatgacagtcctgctccatcttcgaatcatgatgccaatacagagggtatggactctagcagcaaaatcaatttatcatatgatgaggatcagaaggtttggatcccacaagataagaaggatgaaatggtcttgattcttgtccagcggcagaaagagttgcaagcacatatgagggattggacagactgggctcagcagaaggtgatgcaagtcactcgtcgacttgccaaggagaaggaagagcttcattcacttaggaaagagaaggaagaagcggaccgcctccaagaagagaggcacaatctggaagagagcactcggaagaagcttttagagatggaatctgcgatttctagggcgaacacccagctggaaaaggcagaatcttctgctcgtagacgtgaagccgagaatgaacagctcaggatacagatggaagctgcaaagcggcatgcactagtgtctgcaacaaatattttggagctttcaaagaaggatgagaacagtcataaaaggtctcagcattgggaatctgaaagagccctgttgcaagaggatcttgctgctcaaaggaacaagctatctcaggtccaccagcaacttcatcatgctaaagagcagaaggatcaaatccaggcaaggtggaggcaagaagaggctggaaagattgaggcaattgcccgtgtaagcttagagaagaaagagagggatcagattgagacatcactgaggtcggaagagaacttcctgcatctcaaagcggagaacgatacgcaaagatacaagagccagatacgtgctctcgagcagcagatttcgcagctgaaggtatccttggactcgttgagggttggtgcccctcccaagtggggagcagacaacagaaccaacgcgttgcgcctttctgaagggagaaagaatggcagcgctcaaattttggccaatatagcagcggtaccccaggatttcgattttgacgacatacagcgtgaccgggagtgcgtcatgtgcctgagcgaggagatgtcggtcgtcttcctcccttgcgcgcaccaggtggtctgcgcgaaatgcaatgacctccatgacaagcaagggatgaaggagtgcccatcgtgccggacccccatccagcgcagggtgtgcgcccgcctcgccggttgctag

SEQ ID NO: 13353 - DNA, 401 bp, Oryza sativa
  Clone ID: TFbOSC22501j.C1.o2.gp
aaccaacacccatcccattatccattatctctgcggggttttgattgatgtgcgaccaaccatgtatattattctcaaagtttaaccactctcaccaccactcattattccatccaatcttccatccatccatccaaggcaagctcagcaaatcaatcaaaaaaaacaaataaaaagagaaaacaaaatggtgtatatgaagaagtctagcaaccggcgaggcgggcgcacaccctgcgctggatgggggtccggcacgatgggcactccttcatcccttgcttgtcatggaggtcattgcatttcgcgcagaccacctggtgcgcgcaagggaggaagacgaccgacatctcctcgctcaggcacatgacgcactcccggtcacgctgtatgtcgtcaaa

SEQ ID NO: 13354 - DNA, 1620 bp, Oryza sativa
  Clone ID: TFbOSC900169j.C1.o23.gm
atgggtacttcggggaggcagtgggcattgtgtggtggtgaagggaataagaaggtgggaatgtggtgtaaggaatggcaacttcaaaggacgttcgtggagctatttcttggaattaaagcatcttctcagtatccaaaagcacctcctcatgtttatgccgtggaaagtaagggccttgatgagaatcgacaggtgtatcttattagcagcatccagaacaaggcaagagaactttcctgctacccgatgcttgtgacgctgtgtgaggaagctgtggagatgctctcaaatatgaatcatccagctggggattgcccactttgtctatatcctttagtcaaagagaatgatggttctgctttgccatttatgaagttgatgtcgtgctaccactgcttccacagtgactgcattatgagatggtgggaatggctacagaatgatgatactgactcgaagaagagtagtacagcagcaactactgaagtttgccgcaaagtgtttgatgagaaggatattgagcatgttcgtgatctgctaggtgcaaatacttctcaactgacaccacaacttcaacctcaggaacggagccactcaaccagacaaacagcactggtggtaccaccaagcacaacagcagttcaggtcatcgaaggagacatcgatctcatgcttcaagaagacaaccacatgggcaagggcaacctgctaggcaacaatggcagaggaaaggcggagacacttcacaccaatagcaggaaaggaaagaagttattatcatcactgctagttgtggtgtcgaccaccctgaccttgaagcataccgctgccagcaccagcagcctagctttcgcggcgttgcccggctgcccagacaagtgcggcaatgtcagcatgccgtatccttttggcaccatagatggctgcttccggggaccacccttccgcgtctactgcgaagacgaccatgcggtttatctccaggagcacaagaagttgaaggtcttgcgattcgagctggcccagggcgaggttctcatccagaagcgcatagcaacaagctgcggcgtcaacctcaccggtaaagccgtcggcattccatgggtagtgcacgatggtggcttagcagatgactatccctatctgacaatctctaccaagaaccagtttgcagtagtcgggtgtggtatcacagcgatcatcgttggtcagggagagaaccagcctgattacacggtcggatgccgatcattctgtgatgatgtcgatagcaatattgtcgaagataatagcacgcaatgcaatggcaacacgggctgctgccaggcttccatcccaggtaatctcaaggctttccagccctcattcttaaaaataagcggtgtgaactactccggcgtcccgtgtgtctacgctttcgtcgtggagcagaactggttcaaattcaagacctcatatgccaaatcgatggaactttattcaaagtatcgaaataagggcaccggggttcctctagtgctcgacttggttgttgacctagccgctcagggtacctttgcaactgctctcaaggttatgaaggaaatccctacctacatggaggctgccaaggtttaa

SEQ ID NO: 13355 - DNA, 1497 bp, Oryza sativa
  Clone ID: TFbOSC400138j.C1.o14.fg
atggcgacactccccatcttctcgcaccgcaatcccagacgagagggggaagcaacaggatgcttccccacatcctccctcctcgcaatcgtggacaaagaggatgagcaacagtcaggaggagaaagaggagtagtcgtcggaaggtgccttgaggtgtttgttcttgcaagggagttctgcgaacaagcttatggctcgtcgattacttacggctacgaaaggccccatggggccagcacggctagccgggagtggtcctcgattgggcggagcgatccgctctggcggactaacgctggcttttcgccgccgctgtcgaggaggtgggagtaccgcatcaattctgaggggctgtcgtatggctcccagggtgacagcggggctgctgcgcactacggttcgtcgctatcctcgaatagtaaagagcctagtaggagctgggagaggagtgatgttccaccggatcatcatcgttactccacctcggaaggtgccatttcgtattttaacagtccggatgttaccttccagaaccaccatattatgcttcctatgctgcaggattctggcattgatgaatacatgcgagtctcggtggctgagccaattggtgcattgttattgtcagaggggatatctggacagcaaaacagtggtggttccacttcctctcgctctgatggaagtgaatatgatattgtaccaaaatcatattcctctaccccacgcaacttcccaagtcgtcgatcattcctgtcaaagccaatccatccgctctcgtttccagagcatgcactagaagggcaagaaactgatagccctgttgccaatgcaagcaccagcagtcctatgccctcggagttcaaggcaataggggagatccgcccgtcaggtctgatggactacgcctacgccagtggcagtcatggggagtcagcaaactggagtgccgcaagtagcatggatcttaccgatttatcagaacgacatgatgctgaacgctctggaccactgcgttccaataacataatggatagaacaaggtgcgacctttgcgagaggctcttgtccaagagatcgccctggggctcccgccgaatcgtccgtactggagatctgcctgttgctggtgtgcttccctgctgccatgtctaccatgccgagtgcttggagcgaaccactcccaaggggcagaagcatgaccctccttgccctgcctgcgataggctgtccggcaaagacaccgagcagtggtcgatctgcaggctaagaaacggattcccgaggctaaggtcacttggggaaggcccttccagggtctggagctgtgcccaagctggagactgcgtggctggcgctgtccagataccaagagcaagcagcatctctctgctgagccggagtggccacaagaggcatcatgctgcttccaagggagaatccggcaaagactgggctgagacatcatcatcatcaagaactgcctgcatgtag

SEQ ID NO: 13356 - DNA, 672 bp, Oryza sativa
  Clone ID: TFbOSC401130j.C1.o67.fg
atggttcaactcgacgccgacgacgcgaacagcggtagcgccgcctccgccacccacagccacgccattggcgacatgcctcaaccggacgcgagcagccgcacaagcgccgacgaggatgatcacggccacaacgttggcatagacgacatcgacgacgccggagacaacggtagcatcggctccgactccgacgtccccagctgcgcggtgtgcacggagcccctcgagtgggcggcggtcggcccgtgcggccaccgcgccgtgtgctccgcgtgcgcggcccgcgtccgctcggcgcccaaccccgacaaccggtgctgcatctgcaggacgatctgccccttcgtcgtcgtcaccaaggccgcagcgggagtcgtctccttctcgacgttgccggcggtggccagccacgacgacgggagggtcggggagtactggtactgcgccgccgtgtcggcctacttcgacgacgagcagcagtacgaggcggccaaggcggtggcctcgcggcgccatggtgatcagccggcgatggtacaccgagccgtgcacggtgtcggttcacccaaagccccaacaatgcaaattgcactcagggtttacaaaacacatagtcacatagagattggcccggatttcacggaacctggatttcctgtaatggagtaa

SEQ ID NO: 13357 - DNA, 1725 bp, Oryza sativa
  Clone ID: TFbOSC408625j.C1.o6.fg
atgctgcggcggccgctcgccggagctccgcccgcactcgccgtcggcacctctctctccgacgaaggccaagtgagcagcggctcgctcgtcgcggccgtggaaattaccatgatgacgccgggatcgtcctcgacttcggtgccgggagatgaggccgacgccggcaactgggatgcgggggtggagacggcggcgcggctggaggcgatggttcatgcggaggacgaactctcggaggagcagattcaagccaacaaccagacacaggaagatgagctgctggcactacaggccatctatggtgatgatttggttatcttcgacaataaggacggccttcgatttttccagatttctctgcactatcaactcgccggtgacatccgagtttacctgaatgtctgccccaacgggagaacagaaaccggagcagaaaacgacgacgacgacgacagtgaccgactcttgtatgcttgcagcctgcagcatctgcctcctgttgtgctagcctgcctactaccacgtttatatccgagtcaccgtgccccctacttcgtggtcgccgcgaagtggctggacgagccggaagtttcaagcttctgctctgttcttgatgagatctgggcagagcagcctgcagggcaagaggtggtgtacaaatgggtggactggctgagcacctcttcctggttttgcattgcttcagatgatcagattgtatttggaccagatgcagactcggctggtggtgatgaccgggcaatcggaagaagctgctcccttgattctatgatccctctaattcaacgttacagcaaggagagatcacatgaaattttcgctcgaagaatccatgagtgcggagtctgtctcagtgaaaatacaggcagaaacttcatacagctcccatgcagccactccttctgcgtcaagtgcatggagacgcagtgcaggatccacgtgaaggaagggagcgtggcgaggctgacatgcccggacacgtcgtgccgccggccgctgccgccggcgctgctgaggggcctcctcggcgacggcgagtacgcgcggtgcagcgccgcgtgcgtggcggccggcgacgacgcccagtgctcgaggtgcttcttcaccttctgcgccgtctgccgggagcggcgccacgtcggggacacctgcgtctccccgaaccagatgctcgacatcatgctggaacggcagaaggagaagaggccgttggcggcgccgtcgccggacagccaggcggtgtcgtcgaagaggaagatggaggagcttctgagcctccgcgaggtgatgcgcacgtcgaggcagtgcccgtcgtgcaagatggccgtgtccaagacggccggctgcaacaagatggtgtgtagcaactgcggccgccccttctgctaccgctgcagcagggccatcaccggctacgagcacttcgctggggagtgcaagctgttcgagagcgtcggcaaggggtggttcccggggcaggcgatgtggatgaacctcgaatacgactacgacgagatcgccgagatcgggacgccctcgtggatacgggctatcaggtatccctgccctacctgcggcgccaagcgcaccaagtcgggcaacaatgaccttctaacgtgcagaggatgccgaacccattactgcgcgctgtgctcgaagaaggtatggagcatcgccgagcactatgggccagcagaatga

SEQ ID NO: 13358 - DNA, 1032 bp, Oryza sativa
  Clone ID: TFbOSC401405j.C1.o1.fg
atggacggggagatgttcgggagtggccactggggtggttccttcccctacgcctccattcccaaggagagccagttcgtgtttgatgccaaggcctcgccgctgcagctgcagctcttcgggagcgccgcagttcctgcggtaggaagtactggttattataactacattgcaaacaaccacctctctgctatgaatcaagaaagaaatacaaacaacgatgttggtcatgaaaagcaactcaatcttcagatgtccctgaactactttcctgttgaaaatcttgatcggttagcacgtattggtaatccaagtgctgtatcaactgggctaagactgtcctatgagaacaatgagcacacttcaatcacatctggcagtggtaacatgtcatcattgcctatcatggcatcctttgttgatgaagtgatggctgaattagacaaagaaaacaaagagttcaactgttatttcggacttcaggtggaacaattggttaagtgcatgaaagatgtaaagcagaggcagatggttgaatttcttgcatcccttgaacgaggagtaggaaagaagctgaaggagaaagaactcgaggtggaggccatgaacaggaagagcaaggaactgaacgaacagatcaggcaggttgcattggaagtccagtcatggcagtcggtagcactgcacaaccagtctgtcgctaacagcatgaaaagcaagctcatgcagatggtagcccatagcagcaatctcaccagggaaggctctggcgacagcgaagtggacaacacagcttccagtcagaatgtcaatgctgtgcctggggttttcttccagtcaggcctcctcggcatcaacagcatggctgatggtgggctgggagcatgcaggttgtgcagaatgaaggaggcagcggtgctggtgatgccgtgtcgacacctctgcttgtgtgctgattgcgagaaaaatgctgacgtgtgccctgtctgccgcttccccaagagttgcagcgttgagatcaacatgtcatag

SEQ ID NO: 13359 - DNA, 4089 bp, Oryza sativa
  Clone ID: TFbOSC400522j.C1.o7.fg
atgaagagcaatgcctctcctgagcctgatgggatgaatgtagccttcttcaaggcggcgtggggatggataaaagatgacgtcatgaagctcgttgaagacttctataacacaggtaatcttcccaaagaactgaacaaaaccaatattgtcctcattcctaagaaaaacaggccagctaaccctgcagatttcaagtccattagtctttgtaatgtgatgtacaaaatcattgccaaatccattgcaaacataatcaaaggttttctgctgaaaattgatctctccaaagcttttgatagattggaatgggatttcattgcttctgctatgaaaaagaagggctttcactctaatttcatcaatttggttcagggttgcatcagctcctcttccttttatgtgacctttaatggtcaatcttatgatgctttcaatgctaatagaggtgttagacagggttgtcctctttctccttatctgttcgtgttggctcttaatgagctttctgatcagcttaatgaggatctccttaataatcagatgaaaggcattaaacttagccctcaggggccggccattcactctctcctttatgcagatgatttaatcattacaggtgaagctactgagatcgaagcaagaaaaatcaaagaaatcattgaggatttttgcaacaaatcaggccaaactcccaactggagtaaatctgccatccttttcagcaaatccactcctctttacatccagaattccatcaaaaccatcttccatgttgcttctgttgattccaataccaaacatttgggccatcccctctttgtcactaatagaacaaaaatttttgtctaccaattcattgtggataaattcaaagccaagcttactaatctaaaggctaacaaactttcccatgctggtaggcttaccttaatcaaaactgtttttgcctcccttcctgtttattacatggctaccaccctccttcccaaaaagatcattgccaaactcacttctatcatcagaatcttctggtggacaggagtgagggagggtcaggacaagaagcctctctgccttaaatcctggtctgatatttgcaaacctgttcaggatggtggtttaggtataagagatattcagatggcgaacaggagcctgattctaaatgctgcctggagactagtcagtaagcttgatgagccggtatctcaaatcctgaaagcggggatgtaccagtggcgcaagttcgagttcttcgaggagaaggcggccgggcggggcgtgcccggcgagatcgcctcccgcgtcagctgctgctccggcggccgcggccgcgtcgccgtcggctgcgacgacggcacggtggggctccttgaccgcgggttccgcctctcctacggcttccaggcctacgcctcctccgtcctcttcctccagcagctcaagcaaaggaatgttcttatcacggttggcgatgatgatcagccatcttcactatcgtcagcaatctgtctaaaagttttcgatcttgataaagtacaagaagaaggttcaagtacaacaagtcctttctgtgttcaaattttgcgcatcttcactaagcaatttcctcaggcaaagattacatcttttgtggttctagaagaagcacctcctatactgctaattgcgattggactggacaatggttccatttattgcatcaaaggtgacatcgcacgtgagcgtatcacgcgattcatgttgcaagtcgaggatggcaccagtttacctattactggtcttggtttccgagttgaggggcaagcacaccagttatttgctgtaactcctagttcaataaccttgtttagcttgcatgatcatccaccgaggaggcaaacgcttgatcagattggttgtgagaccaatgctgtggcgatgagtgaccgcatggatctgattattggtagacctgaagctgtgtatttctatgaaattgatggtagaggtccttgctgggcctttgatggtgagaaaaagtttgttggatggtttcggggctatttactatgcattattgaagatcagaggagccggaagaatactcttaatgtatatgatcttaagaatcggttgattgcacatagcatgccagtgggggatgtttcacacttggtctctgagtggggatatattattctgataatgagcgataaaaagattctttgcattggagagaaagatatggagagtaagcttgatatgttgtttaagaaaaatctgtatacagtcgcaatcaatcttgtacaaagtcaacaggccgatcctgcttcaactgctgaggttctaaggaagtatggtgaccatctctatggaaaacaggaatatgatgaggccatgtcccaatatatccacaccattggccatcttgaaccatcatatgttatacagaagttccttgatgcaaaacgcatctacaatctcacaaactatttagagaagttacatgatcgagggttagcatccaaagaccacaccacccttctgttgaattgctatactaaactgaaagatgtggagaagcttaaccatttcatcaaagatgaagatggggtaggtgaaatcaagtttgatgtggaaactgccataagagtatgtcgtgcagctggatatcatgagcatgctatgtttgttgccaaaaaggctgggaggcatgagttgtatttgaaaattttactggaggatcttggtagatatgatgaggcactgcagtatatatctagccttgaggcgaatcaagcaggtcttactgtaaaagagtatgggaaaattcttgtggagcatagacctgctgaaacagttgaaatactgttgagactctgtacagatggtggagatcctatgacaagaagaggttcaaatagcatgcatttgcttatgataccttctccaatggactttgtaaacatatttgtacacagcccgaaacatctcatggaatttctagagaattataccaaagcagtaaaggactcacctgctcaaacagaaattcataacacccttctggagttatatatatcaaaagatttaagtttcccttctatgtcacaagaaaatggctttgaggagcagaatagtaaggaaagaaaaggtaaagaagttgcaaatggctataaatctggcccaagggagaaaggaaatctgggaaaggaagatatgaatgtcgcaaaggatattgttgataggcaaaggaaagggcttgcattgctcaagtctgcatggacatctgagatggatgatcctctgtatgatgttgatcttgctcttatcatctgtaatgcaaatgcattcaaagatgggctattgtttctgtatgagaaactaaaactattcaaagaagttattagttgctacaagcaagctcatgatcacgagggtctaattgcctgctgtaagaagctaggagattcatctcaaggtggggatccatctctttggggtgatctgttgaaatattttagtgagcttggggaagattgctctaaagaggtcaaggaggtattgacctatattgaaaaggaggatgttttgcctcctattgttgtgctagagacattgtcgaaaaacccatgcttgacactgtcagttgtcaaggattacattgcccgcaaacttgagcaagaatcaaagctaatcgaagaagataggaaatctattgacaagtaccaggatgagacagaactgatgaaaagggagatagaagacctcaagacaaacgcaaaggtctttcagcttagcaagtgtacgacgtgcacctttacgcttgaccttcctgcggtccacttcatgtgcatgcactccttccaccttcgctgccttggggacaatgagaaagaatgcccagaatgtgctcccgaatatagatctgtcatggaggcaaagcagaagctagaacataacgctagagaccatgatctcttcttcaggcagctgaggggttcaaaggatggcttctctgtcgtcgcagactattttagcaagggcattgttaccatggtaatggtatttctccttgctgttcttgcaataatacgcaattga

SEQ ID NO: 13360 - DNA, 2450 bp, Oryza sativa
  Clone ID: TFbOSC406019j.C1.o5.gm
atgccgggaacggttttcgttgtctcacgtgagtcgtgcttctcggcagccattcaaatggtcacggagatcactggtgccgcggggtggaagggcacggatctcagcttgtgcgttgagaaaaacccagcaagcttgcaaggacaagatttagccgcactaggatcctcctcgggcttggatgtcgtcgacgttccgttctccgctcctacgggaggatccttcgacatggagtcgtccgaggttgtagccacggcgttctcgcttccggtcaatgatggaccagtcgagaccggcactgtggaatccgactattggcgacgtgataattctcttaagggcataccaaatttcaatgttaacaagtgcggccacttcttccatgcgggatgcatcgaccgttggctccgcaagtatcggcggtgcccgctgtgccgcggcgggctgtcgtcattgccgctgcttccgaaacctgacttcgtggcgtcgtatttgttgttcattgagacctactacgtgttcctccagtccggcggcggcggcgcgttccaggctgtggtgtacaaatcggcagggcagcaggaccggtgctacctcgccatggtgcgcgcgccgtccaagatcagatatggcagcgggcatgtaattcggagccaaaaccccgctggcaaaaatggtaccccaggtggagggggcgatatggaaagtcgggaatggatgtatcattggccgaggtttttgtctccatatagaaacgaagtggctaaatttattggtattgccaaggttcgcgctgagaagaacaatatgaggaagataatttgtccgtgtgctgactgtaagaatgaaatagcctgggactttgatgatgcttttaaagtgaaggagcacttagtaactcgcggatttatggacaagtacgaaatatggacacgtcatggcgaagaacaagtagacgagcctgaaaatgtagttccgacacaagttgaagacatggtgcatgacgatggttctgttgaggacaaaatcgacctagaggaaatgttacgtcatgcagaacccgaggtgctgatggggtcggcaagagggctaaataactttgaagctttacagaaggcagcaaaggaagttttgtacgataagtcgaagggctgtgacagtgatttcacaacactccgaaaatgctaccgaggcctaactcactaccatccagcacatatcaagcaaagaaactcatatgccccctttcacttgggaccccgtcagcctggtattgatatagacgtatttcttgaaccattgttggaagatatggccgatttatggaaagagggattgaaagtgtgggacgagtacttaggggaatacttcacagtgaaggcaatcatcttcgtgaccattaacgattatccagcaatgttttcagtttcaggtcaaattaaaggtaaaacaggatgtgtgatctgcttgaatggaacgtactataggtatctcccgggttccaacaagcttatgtacatgcggcaccggcagttcctacgcacaaatcacaagtaccataagatgaaggcggagttcgatggtactgaagagactgatcctgcaccaaaacctacatcgggagaaaatgtgtgtgcaatgacagagaaaattgtttgcgagtttggaaaaatgactaagaaaccatcaaaggggacaaagtacaagaaacccgagaagaatacgaagggaggggaaagtaagaaacaagatgacagttcgaagccagatgataaactccctcccccattcaagaagcattccatattttttaagtacctcccgtactggaaagatctggaggttcggcatgccatagacgtcatgcatctagagaagaatgtgtttgacaacatagttggaacattgttggacatgccgaagaagactaaagatggtctgcaatcaaggatggacctagtcgagatgggaatcagggaagaattacaccctcaagaaggagaaaagaatggcaaaatggttgcgcttggcccattgtacctccatcaaatgtggtcatacgagcgttacatggtggttctgaagggttacgtccgaaatcgtgcacatccagagggatcaatggttgagggttatagtactgaagaggttgtcgacggtgtctgtgtggaggcaattgatgaagccgaggaaaaacaatcatacttcgggtttattgaagaaatatgggaaattgactatgagcacacaatgcaattccccatatgtaagtgccagtgggtaaaatacccgaacggggtaaatgttgataagttcggtcttactgttgttgaccttgcgagagtgggtcacaaggatgatccttggaagattaagaatgtcgagacatctactcagaagaccgtgaagccttacatgcgcacggacggtgtgggcaaaaatgttaaagg

SEQ ID NO: 13361 - DNA, 2334 bp, Oryza sativa
  Clone ID: TFbOSC900035j.C1.o3.gm
atggcccccgatgtcctgggccagtgcacggatctcagcttgtgcgttgagaaaaacccagcaagcttgcaaggacaagatttagccgcactaggatcctcctcgggcttggatgtcgtcgacgttccgttctccgctcctacgggaggatccttcgacatggagtcgtccgaggttgtagccacggcgttctcgcttccggtcaatgatggaccagtcgagaccggcactgtggaatccgactattggcgacgtgataattctcttaagggcataccaaatttcaatgttaacaagtgcggccacttcttccatgcgggatgcatcgaccgttggctccgcaagtatcggcggtgcccgctgtgccgcggcgggctgtcgtcattgccgctgcttccgaaacctgacttcgtggcgtcgtatttgttgttcattgagacctactacgtgttcctccagtccggcggcggcggcgcgttccaggctgtggtgtacaaatcggcagggcagcaggaccggtgctacctcgccatggtgcgcgcgccgtccaagatcagatatggcagtaatatatgtgagcaggttacgtcgtgcgcctgcaaagatcaatcttcgcaggcgacgcttatatggcccgcctgcgaagatatggaaagtcgggaatggatgtatcattggccgaggtttttgtctccatatagaaacgaagtggctaaatttattggtattgccaaggttcgcgctgagaagaacaatatgaggaagataatttgtccgtgtgctgactgtaagaatgaaatagcctgggactttgatgatgcttttaaagtgaaggagcacttagtaactcgcggatttatggacaagtacgaaatatggacacgtcatggcgaagaacaagtagacgagcctgaaaatgtagttccgacacaagttgaagacatggtgcatgacgatggttctgttgaggacaaaatcgacctagaggaaatgttacgtcatgcagaacccgaggtgctgatggggtcggcaagagggctaaataactttgaagctttacagaaggcagcaaaggaagttttgtacgataagtcgaagggctgtgacagtgatttcacaacactccgaaaatgctaccgaggcctaactcactaccatccagcacatatcaagcaaagaaactcatatgccccctttcacttgggaccccgtcagcctggtattgatatagacgtatttcttgaaccattgttggaagatatggccgatttatggaaagagggattgaaagtgtgggacgagtacttaggggaatacttcacagtgaaggcaatcatcttcgtgaccattaacgattatccagcaatgttttcagtttcaggtcaaattaaaggtaaaacaggatgtgtgatctgcttgaatggaacgtactataggtatctcccgggttccaacaagcttatgtacatgcggcaccggcagttcctacgcacaaatcacaagtaccataagatgaaggcggagttcgatggtactgaagagactgatcctgcaccaaaacctacatcgggagaaaatgtgtgtgcaatgacagagaaaattgtttgcgagtttggaaaaatgactaagaaaccatcaaaggggacaaagtacaagaaacccgagaagaatacgaagggaggggaaagtaagaaacaagatgacagttcgaagccagatgataaactccctcccccattcaagaagcattccatattttttaagtacctcccgtactggaaagatctggaggttcggcatgccatagacgtcatgcatctagagaagaatgtgtttgacaacatagttggaacattgttggacatgccgaagaagactaaagatggtctgcaatcaaggatggacctagtcgagatgggaatcagggaagaattacaccctcaagaaggagaaaagaatggcaaaatggttgcgcttggcccattgtacctccatcaaatgtggtcatacgagcgttacatggtggttctgaagggttacgtccgaaatcgtgcacatccagagggatcaatggttgagggttatagtactgaagaggttgtcgacggtgtctgtgtggaggcaattgatgaagccgaggaaaaacaatcatacttcgggtttattgaagaaatatgggaaattgactatgagcacacaatgcaattccccatatgtaagtgccagtgggtaaaatacccgaacgggaagattaagaatgtcgagacatctactcagaagaccgtgaagccttacatgcgcacggacggtgtgggcaaaaatgttaaagggtaa

SEQ ID NO: 13362 - DNA, 452 bp, Oryza sativa
  Clone ID: TFbOSC900254j.C1.o3.gp
tgtaaatgcgattttttctttttttggttgctattccgagaaggttttatacacaaagctcacaaaaagtgctacacccgtaggagcactctcttgctgcgaggtatttacacggtacaggcacaaaccgcccgaaacggaaaaaaaagggacaaagtgaggggtgaaagtgcaaaaaaggcaaagagctctctctctagtttcctacgcccacacggggaggccacccggagacggtggcgcgtagccggcgcggggcggctcgtcggagaatcgaatcgagtcgaatcgaatccactcgctaagtccgggccaaggcggcggcggcggccggcggcgaggaggagtcggcgaggaggcgggagcggcagagcgggcaggtggcgtggtcgtagtcaagccatgtctcgaggcaggcgcggtggaagatgtgaccgcaggggaggcggttc

SEQ ID NO: 13363 - DNA, 1815 bp, Oryza sativa
  Clone ID: TFbOSC401130j.C1.o106.gm
atggcgaagagcgggcgacgggcgtggtgggggcgggcgtggcaggagcgcggcgtcgcggcggagggagtcgcactcgacgcggagggcgtcctggcgggagcggagggcggtgctaagaaggcggcgacggcggtccgggcgaagaaggcggcggcgtcggcggtggttcgggcagctgtatgtgatgaagacgccgccgttgaagcactcggcgcgggcgcagccgatcctggtgaagttgagcctaactatgaagacaaagtggctgcacttgtggaagtcaacaccggcggtgcagttgtcggtgtccctgtcgtacaagtgccgcttgggcaatctctgcctccaccgccggactcccaggcaactgaggcaagctccgcctctgccgctagccacgcgggcgatctccgcctccgcaaccggacttccggacgagctccgcctccgccgccggtagacacgaattggagcgcggccgagcacgatcacatcgccatagacatcggcgacagcacggccggctccgactccgacgacgtcccgagctgcgtggtgtgcacggagcccatcgagtgggtggcggtcggcccgtgcggccaccgcgtcgtctgctccccgtgcgcggcccgcctccgctccggacccaaccccgaccaccggtgctgcgtctgcaggacgctctgctccaccgtcgtcatcaccaaggcggcgacggccgcccacagcgtattcaccttctcagatcagtcgtcgatgccggtggccgccgcccaagacgacgggcggccggtgggtgcgtactggtgcagcgctgccatgtcggcctacttcgacgacaagaagcattacgatcaggtgaccaagcaggtggtggtggcagctgctgatcgctgtttcctgagaacgccgccgcggcggccggacgtggacgcgtcgccgctacgccgcctgtgcgtacgcatgtcgtggcgtggacatgtgctggcgctcctagttgttgtacttgtcactgcactcgtcggaggatgggtggggtatcttacctcaggggatgaaatgatgagcgacaggataggcattgtggcaggaattgccgctctatggggtgcacttgcagccgtcgtttacgtctacaccgttacgccaatctcgactggcccagttactatcgggaacgagaacggcacagttacgacttcgagaaacgacatcccgccgacaattcctcccacgcaagtggagaacggctgccacttcctcatatccaacaaccacgagttcaatctcagtgtgttgccaaggaacgagacggagcaacaacctcagatcggatccggccagaacgcccacccagcaactacaagcgctcgacacaatatcgagagaaagccctttcgtgccgccgctgggacgagggcatgcggcagcggcgcgggcccgtggcggcggcacgattggggctccggcacgcggtggcgaggcgtggcactgacagatagggtgatgtcgcgggcacggccatgcggcggcgggacgcgcgtggctgacgccgtggtggccgacgaggggtggccatgcggcggtggcatggccctgcgtgggcttggtggccgggtgaggttacaacgccgcacggcggcttacaagagatcacaactcaacaatgagtacggccggcgtggcgtggcagccgatggcagcgccgcggggcagccgaggcaggtgcggcgcggcgcgacgggcatcgacgtggtgcagccaggccacagtgactgtcggggagcggccgtgcgacggcgtagacactag

SEQ ID NO: 13364 - DNA, 927 bp, Oryza sativa
  Clone ID: TFbOSC411383j.C1.o3.fg
atggccccaggaagcagcattgtgaccgatatccctgagtcggattgtgtatctgatgggctctctgaggcactcactggcattaggcttgatggagattctacatgcaagccctggtctacatcacttgtcacagttgagctatcatcgctgacgggcttgaatgatttgctcgagtgtccagtctgcacaaactcaatgcgcccacctatactgcagtgcccaaatggtcacacaatatgctctaactgcaagcatagggtggagaatcattgccctacttgtcgccaagaactgggtaatatcagatgtttggctcttgagaaggtggctgagtcacttcagcttccatgcaaatatcaaagcctaggctgtgctgagattcatccttaccaaaacaaacttaagcatgaggagctctgcaggttcaggccatatagttgtccatatgcaggttcagaatgcctgattgctggcgatgttccgatgcttgtctctcatctcataaacgaccataaggtggacttgcatgaaggctgcacctttaaccaccgttatgtgaagtccaacccttatgaagtggaaaacgctacatggatgctgacggttttcaagtgttttggacagcacttctgcctgcattttgaggcattcctgctggggatggcaccagtgtacatggcgttcctgaggttcatgggcgaggacagcgaggcccggaacttctgctacagcctggaggtgggcgggaacgggcggaagctgacatggcagggcatcccccggagcatcagggacagccacaagaaggtccgggacagcttcgacggcctcatcatccaccggaacatggccctcttcttctccggcggcaacaggcaggagctcaagctgcgggttaccggccgcatctggaaggagcaatga

SEQ ID NO: 13365 - DNA, 1206 bp, Oryza sativa
  Clone ID: TFbOSC400186j.C1.o9.fg
atggccgtgcaggcgcagtacgtcgcccacgcctcccgctcctcctcctccgcggcgtacgccatcaggccggctctggagaacgcggcgccgagcagcggcgcatcggcgttgttcctggacgaggccgtctcagcggcgctgctacagcagcagcttgttgttgctgctgcggcggtgggcggcggcggcaacaacaacaacacggcggtgttcagtgacctgcgaagcgagcttacttgtagccagcgccgctttgacgacttcggcggcggcttcgtgccgcggaagcgcgcgcgggttggcggcgagggagaggcggcggcgggtctgttgatgagcagcagcgtcatggagggcggcgggcaccgcgcgctgttgccgccgccaccgccgcaggtgacgccgcaggcgttcggggacgtgcacaagagtagcagcagggtcgtcggctccggcgcggcgtccaccagcggccgccctgtctgcggtggtggcctcctgttgtcgcatctctaccgccagagcgtcgaggtcgacgcgctcgtccgcttcgaggtgcgcgccaccgatcgcgcatttatttatcgccatgggcgctggagctccgtgtcgttttgtctgctctcctctctcgaatgggcgtttgactcgatctgcacctacctacagaatgagaggctgcgcgccgggctggaggaggcgcggcgccggcacctgcgggcggtggtgtcggcggtggatcgcgccgccgcgcggcggctgcacgccgcggaggccgagctggagcgcgccctggggcggaacgcggagctcgacgagaggctccgccagatgggcgcggaggggcaggcgtggctgggcatcgccaagagccacgaggccgccgccgcgggcctccgcgccacgctcgaccagctcctccagtcgccctgcgccgccgccgccgccgccgccgagggcgagggcgatgccgaggacgcgcagtcgtgctgcttcgtgcaggcgcccgacggaggcgcagccgaggtgtccggcggcgggaacgggaggagggcgtgcagggcctgcggcgaggcggacgcgtgcgtgctgctgctgccgtgccggcacctctgcctgtgccgcggctgcgaggccgccgccgacgcgtgccccgtctgcgcggccaccaagaacgcctcgctccacgtcctcctcccctga

SEQ ID NO: 13366 - DNA, 819 bp, Oryza sativa
  Clone ID: TFbOSC900178j.C1.o15.fg
atgacgagcgcctccgagctcttcaccgcccgccgcgcccgcgccgcccgcctctccgaccccgatccggacccggatccgcctgcggacgcgctccatgacccgcacggcctcgccgatcgccgcggccggcgccggggctgccgcccgcgccgccagctcgacgccgccggggacgtccgccagcacctgcacaccggggccccgccctcccgccgccgcgcttcgtacaccgatcgtgtcttatcatacatagacaatagcaacattggggactctgcaactaggaggaaccgactggataggctgatgttcagaacaaatgagcggcttcctggtgctgtactgcaagcacaagcacgtgttctagagagactgagaggcatttctattggttcatctgtgtcaaggccatctatcacattggatgaattttcagctactgatgtgtttagaatcattgacttcgggaacagggatgctccatatgaagcaaataggtccagctcatcattggcccatccaagtagcgagtcagatgaagaaaggtcacccattgacaccagttccttaaaaagatcacgtgggctgagcaaggcggccttccttcggctacagatagagatttttgaggcaagcaaagatgacaacagggaggcatcaccagaatgctcgatttgccttgatggattctatgacggagatgagctcataaagctacgttgtgggcacaggtttcactcgaattgcctggagccatgggtacggaaatgtgctgattgcccatattgtcgaacaaacatacagtcacgatcctga

SEQ ID NO: 13367 - DNA, 465 bp, Oryza sativa
  Clone ID: TFbOSC423123j.C1.o8.fg
atggagagccaggagctctgggcgctgtacgtgggcgtggcgtcgctggccatcgggatgctcggggtgctgggcgtctggctctgctacctgttccaggccgtggcgcgggggccgcctccggacccgccgccgccgccgacgccgccctgcacgccggagacggaggaggacgacaagaacgggctctcggaggaggagctgaggatgctgggcgggatctgcgtggcggtggccggggatggcgaggaagaggaggaggagcagctctgcccgatctgcctcgacggcatggaggccgggcgcgccgtgcgcgtcctccccggatgcagccgcgcctttcaccaggactgcgtcgaccggtggctcaccatctcgccgcgctgccccgtctgcaacgcctgggtcaccacgcagtcgccggggacctcgccgccgcgcaccaagcctgctctgaattcttga

SEQ ID NO: 13368 - DNA, 444 bp, Oryza sativa
  Clone ID: TFbOSC491j.C1.o4.fg
atgccgttctccctgttactcttcaccggcgccgtcgctggagtcgcgatgttggtcctcccttggtggtgcgccgtcggcgaggacgacgacacctacatcgacggcgtcgtcgatgactcttacgactctgattcctggtacacagattatagcgacgaagacgacgacgacgttggcggcgacaataaggacggtttaacgccagaccagctgcggcggctgccgtggttcgcctactgcggcggcggcggcaggagctgcagcatatgcctggaggagatgcgcgacggcgagaggtgccggcggccgggtcgctgccggcacgcattccacgccgcctgcgtcgacgagtggctgacgacgagacgcacctgcccgtgctgccgtgagctcgtcctggtccctccggctgcaaggctagctgctcccacgtatcggtag

SEQ ID NO: 13369 - DNA, 1839 bp, Oryza sativa
  Clone ID: TFbOSC16830j.C1.o4.fg
atgacctcgccgggcgcctcctctttcgccgccgcgctcgtcgtcgaggacttcccgtgggtgaagagggaggaggagatggggatggacccggacaagtaccgcgaggtgttcgacctcgcgcagcgcggtgctcgcgccttccgcgacggccacttcgacgaggcagtttccttttactctaaagcacaaactttgagaccaggagatcccattatccttagcaaccgaagttctgctttctgtatgataagtcaagtgttgagggagagatcagcagctgactcagagtaccaaccattgaatggtcttgatcccacaacgcatgcggaggtagcgctcaaagatgcagagaaggtattagctatcggcagtaattctccaagaccatatcttctcaaggcatatgcgcttatcctgttaatgcttactgttggctgcttgttattgcctcctctaggtgctatgcatgacctgtacatgatattttctcccctcataagaaaactcatccttaagcagcacttcagaaaaccagaaaattgccccatctcgagtgccatcctcttctcaataagagtaaccattgaagttctaacagaagccatcacgcagcgccgccgtcgttgcatcgagctatctatggactggatgcggcggctggggatggggacgaatgatgaggacgaagtgatgggtgctagcctgctaggtttcactttcacctccctcaatgggctgcttagtattggtgacttgacttctcatgtctctctggctagtagttgtacttatgccaatgtccttcaggtgttggagcagtaccatgaggcacgggaggctattctttctgggcttcaagttgatcccctcagccatgtcctgcaaagctggctcagtgatctgcacagaaatacaagtattgcagctcgagcaagacgtccaacattagatagaccagatgattttgagtgcacattatgtttcaagctattgtttgaaccagtcaccactccatgtgggcactcattctgtcgctcttgtttacatcaatcaatggatcatggcaataaatgtcccatgtgtcggacagttctttttattggtccaaaaacatatcctataagtgtaacgctgagcaacataattcagaaaaattttccggaagaatatgctgagaggaagtcagaacatgagactatgacatatgcaggcgttgatttgatgcctctctttgttatggatgttgtactgccttgtcaaaagatggcactgaacatatttgaacctcgctacaggctcatggtaaggaggataatggaagggaatcatcgcatgggaatggttggtattgattctgctacgggtactgtagctgactgtggttgtgaggtggaaattctggagtgtgagccacttccggatggtcgtttttatctagaggtggaaggttcacggcggtttcgtatcttgcgatcatgggaccaagatgggtatagggttgctgaaattgagtggctccaagatatttcattaccagacggatcgcaggagagaaaagatctgatggaaagggctaatgcagcttcagaattggccaggacatatataaggcgagctagagaaatctcaaggcctgcgaggcgagcaagacagacagatcttgagagcatgcctggaccacaggatcctgaaaaatttagtttttggcttgtcaacttaataaatttgaggccgtcagacaggttggatctattgcgccttagtgatactcgagagagaatttctcgtagtcttagattgctgggtgatgcagaacaaatttgtcgtgtacagtaa

SEQ ID NO: 13370 - DNA, 2982 bp, Oryza sativa
  Clone ID: TFbOSC401429j.C1.o3.fg
atggcggacacggggagcctggagaagatggggcgagagctcaagtgccccatctgcctgagccttctcagttcggcggtatccatctcctgcaaccacgtcttctgcaatgattgcctcacggaatcgatgaaatccacgtcgagctgccccgtgtgcaaggtcccgttccgacgacgagaaatgcgaccagcacctcacatggacaatctggtcagcattttcaaaagcatggaggctgcagcaggtaccaatgttgtctcaacacaggaggctcctgtggtaaaacttgcagatggatcagattgtgtcaacagcgggaaaaattccaaaaggtcacaaaaatcattgacacgaaaaaggaaggtaacatccgagatggaaaaaaatacagcaaaggatgctacagcttctgcatcccaacctactacaaagccttccttctctactaacaaaagaatacaagtgaaaccattccctgaatctgagacaccaataagagctgagaagattatgaagcctgaagagccaaaaaataatctgaataatgatgttgaaggaaagaataaagcagtggcatcgggtcaacctggaagtccttcattgtcaccctttttttggctaagggaacaagaagaacaagaaggctgtaccgctgagacgttaagtgaaacgcaatctttagacacacccttgcgtcataatgcaccctcttttagcgatattaaagattctgatgacgaaatccctttaaatacaactccaaatagcaaagctgcggctacagaactctttgacagtgaaatatttgaatggacccagagaccatgctctcctgaattgtattccactccattgaaaaagcagagtaaagctaagagtaaactagatcaaattgaagagaagggtgatgaagaagatgtgcatattggtggttcatttgataagctgggtaatgcaagtaatgcagctcagcttgtcaatacaaaagcaacaaagcagaagagaaagaaaacaagtcccagtaacaaaaacagtgcaaaattgtccaatcgtgctgagccctgcataaaaaagtctgatgccaatcaacaaggttcaaatagacgtaaaagtgctgccctaaaatcttgtcagaaaagcagcagtgctgtagggaggaatacttcaggtagaagaaacaaggcctctagcaacagcaagccaattcatggctctagtgataactccccagagtcatatcttcctaaggagggtttggatgttgaagcacctgacaaacccctttctgaaaggatccaaaacttggagaaaactagtcgacgaaagggaagtgcaaggaagctggaaatggcagggaaaactatttcagatactacagagaagaatagtgagccaagaagtaagagagtcagaagaatgtctgaccacgctatagctaaaccggttgaagttccttcaggatctggaaatgaaacagaaataccacagcttcacaccctcacaaaaggcagcattcaacgcaaatcctccaacgctagaagacatagcaaagtttgtggagaacaggaaggtaagaataaacttgagaacacgacaatgacacctattattttacatgggaaatgccaaaataaagaggcagtatgtacagctccttcagtaaggactgcatctgttaagtacaagcaagcaaaatttagcgaacaaccagattgttttggaacggagaactttggaaaccttcaagcatgccctgcacgtaatgttttactgaagaagtgtgaggtatctactttgaaggtttcctgtgctttctgccagaccgatgtcatcacagaggagtctggagagatggttcattatcaaaatgggaaacaagtccctgcagagttcaatggaggagccaatgtggtgcactctcacaagaactgccttgagtgggctcctgatgtctacttcgaagatgattctgcctttaatcttacaactgaattggcgagaagcagacggatcaaatgtgcttgctgtggaattaaaggagctgcacttggatgctttgagatgagttgtcggagaagtttccacttcacctgtgctaaactaatcccagaatgcagatgggataatgaaaattttgtgatgttatgccctctacatcggtctacaaagttacccaatgaaaattctgaacagcaaaagcaacctaaaaggaaaacaacactcaaaggaataaccggcttttccaggtcatctcaaataggatccaatcaagattgtggtaataactggaaatggccatctggatcaccacagaagtgggttctctgctgctcatcactttctagttctgagaaggaacttgtatcagaatttgcaaagttagctggcgtgcctatttcggcaacttggagtccaaatgttacccatgttattgcatcaactgatctctctggtgcttgcaaacggacgctgaagtttctcatggcaatcttgaatggcagatggattgtctccatagattgggttaaaacttgcatggagtgcatggaaccaattgatgagcacaaatttgaagtcgctactgatgttcatgggatcactgatggtcctaggttaggaagatgcagggttattgacaggcaacctaagctgttcgacagcatgaggttctacctccatggggactacacaaaatcctacagaggctacctgcaagatctcgtggttgcagcaggtggaatagttcttcagaggaagcccgtatcaagagaccagcaaaagcttcttgatgacagctctgacctcctcatcgtttacagcttcgagaatcaagatagggcaaaatccaaggccgaaaccaaggctgctgatcgcaggcaggctgatgctcaggctcttgcttgcgcttctggaggcagagttgtgagcagtgcatgggtgattgactcaattgcagcctgcaatctgcaacctctttga

SEQ ID NO: 13371 - DNA, 2868 bp, Oryza sativa
  Clone ID: TFbOSC900234j.C1.o22.fg
atggcggacacggggagcctggagaagatggggcgagagctcaagtgccccatctgcctgagccttctcagttcggcggtatccatctcctgcaaccacgtcttctgcaatgattgcctcacggaatcgatgaaatccacgtcgagctgccccgtgtgcaaggtcccgttccgacgacgagatggatcagattgtgtcaacagcgggaaaaattccaaaaggtcacaaaaatcattgacacgaaaaaggaaggtaacatccgagatggaaaaaaatacagcaaaggatgctacagcttctgcatcccaacctactacaaagccttccttctctactaacaaaagaatacaagtgaaaccattccctgaatctgagacaccaataagagctgagaagattatgaagcctgaagagccaaaaaataatctgaataatgatgttgaaggaaagaataaagcagtggcatcgggtcaacctggaagtccttcattgtcaccctttttttggctaagggaacaagaagaacaagaaggctgtaccgctgagacgttaagtgaaacgcaatctttagacacacccttgcgtcataatgcaccctcttttagcgatattaaagattctgatgacgaaatccctttaaatacaactccaaatagcaaagctgcggctacagaactctttgacagtgaaatatttgaatggacccagagaccatgctctcctgaattgtattccactccattgaaaaagcagagtaaagctaagagtaaactagatcaaattgaagagaagggtgatgaagaagatgtgcatattggtggttcatttgataagctgggtaatgcaagtaatgcagctcagcttgtcaatacaaaagcaacaaagcagaagagaaagaaaacaagtcccagtaacaaaaacagtgcaaaattgtccaatcgtgctgagccctgcataaaaaagtctgatgccaatcaacaaggttcaaatagacgtaaaagtgctgccctaaaatcttgtcagaaaagcagcagtgctgtagggaggaatacttcaggtagaagaaacaaggcctctagcaacagcaagccaattcatggctctagtgataactccccagagtcatatcttcctaaggagggtttggatgttgaagcacctgacaaacccctttctgaaaggatccaaaacttggagaaaactagtcgacgaaagggaagtgcaaggaagctggaaatggcagggaaaactatttcagatactacagagaagaatagtgagccaagaagtaagagagtcagaagaatgtctgaccacgctatagctaaaccggttgaagttccttcaggatctggaaatgaaacagaaataccacagcttcacaccctcacaaaaggcagcattcaacgcaaatcctccaacgctagaagacatagcaaagtttgtggagaacaggaaggtaagaataaacttgagaacacgacaatgacacctattattttacatgggaaatgccaaaataaagaggcagtatgtacagctccttcagtaaggactgcatctgttaagtacaagcaagcaaaatttagcgaacaaccagattgttttggaacggagaactttggaaaccttcaagcatgccctgcacgtaatgttttactgaagaagtgtgaggtatctactttgaaggtttcctgtgctttctgccagaccgatgtcatcacagaggagtctggagagatggttcattatcaaaatgggaaacaagtccctgcagagttcaatggaggagccaatgtggtgcactctcacaagaactgccttgagtgggctcctgatgtctacttcgaagatgattctgcctttaatcttacaactgaattggcgagaagcagacggatcaaatgtgcttgctgtggaattaaaggagctgcacttggatgctttgagatgagttgtcggagaagtttccacttcacctgtgctaaactaatcccagaatgcagatgggataatgaaaattttgtgatgttatgccctctacatcggtctacaaagttacccaatgaaaattctgaacagcaaaagcaacctaaaaggaaaacaacactcaaaggaataaccggcttttccaggtcatctcaaataggatccaatcaagattgtggtaataactggaaatggccatctggatcaccacagaagtgggttctctgctgctcatcactttctagttctgagaaggaacttgtatcagaatttgcaaagttagctggcgtgcctatttcggcaacttggagtccaaatgttacccatgttattgcatcaactgatctctctggtgcttgcaaacggacgctgaagtttctcatggcaatcttgaatggcagatggattgtctccatagattgggttaaaacttgcatggagtgcatggaaccaattgatgagcacaaatttgaagtcgctactgatgttcatgggatcactgatggtcctaggttaggaagatgcagggttattgacaggcaacctaagctgttcgacagcatgaggttctacctccatggggactacacaaaatcctacagaggctacctgcaagatctcgtggttgcagcaggtggaatagttcttcagaggaagcccgtatcaagagaccagcaaaagcttcttgatgacagctctgacctcctcatcgtttacagcttcgagaatcaagatagggcaaaatccaaggccgaaaccaaggctgctgatcgcaggcaggctgatgctcaggctcttgcttgcgcttctggaggcagagttgtgagcagtgcatgggtgattgactcaattgcagcctgcaatctgcaacctctttga

SEQ ID NO: 13372 - DNA, 708 bp, Oryza sativa
  Clone ID: TFbOSC29125j.C1.o6.gm
atggctcggcgagtgcgcgggcgcgcgcgctggggccacgaggtagtgagggttttaggccgcggcgagcacgtgttggcgcccgtctcaccttcacctaccatgcgtcacttgctgcagtcgtcggagcacctgaccgccgcgacggcgacggcggcggcgtcgggcggccggggcgtccacacggacacgttcctcatcctcgccgccgtgctctgcttcctgctctgcgtcgtcgggctggcgctggtggcgcggtgctcgcggctgtgcaacccgtcgtcgttcgccgtcgaggcggaggaggcaatgcccccggcgccatgcaaggggctcaagaggaaggcgctgctgtcgctgccgaccgtgtcgttcgccgaggcggcggcggcggaggaggaggaggagcggccggagtgcgccatctgcctcgccgagttcgcgcgcggcgacgaggtccgcgtgctcccgccgtgcggccacggcttccacgccgcctgcgtcgacgtctggctcgtgtccacctccacctgcccctcctgccgccgcgccatcgtcgtcctcgcggcgccgtcgcctgcagtcaccgccgccgccaccgaccccccgccgccgtgctgcgccgccgacgcggcacaggcgtcgtcacagccaccgcaacccaccggcgccagcgaccgcggcggctgccggacatcggtgccgtag

SEQ ID NO: 13373 - DNA, 699 bp, Oryza sativa
  Clone ID: TFbOSC407333j.C1.o3.fg
atggatccgtcgggcgccttcttccacgcggctccccggagcggctcgaatgtgtcgctggcgtcgctggcgaggacggccggagggaggaggatgatgcacagggtcttccgcggcgtcatcaccttcatcttcgccatagctggactgtttcttggagcggtgactggcgggctgatcgggctggccaccgagagcggcctcttccgcggcaccggcatcggcgccatcaccggcgccctcgtctccatcgaggtcgtcgactcctccatccgcgtctggcgatcccgccgatccgggatctccagcatctgctatgtgcttaatgtgatctacagcctcctgaccggcaggcttgtccgcgagaaggtcgatccggcggtgcagcgggtggtccggagccagatgaatgcagtggattcatcgcccttcagggagtcccctgacctgttcgagatcgagggcaccaacggcatgccacgggcatccatcgacaagctcccggaggtcaggatcactgaggagtacaggaggaacgccattggtgacctctcgggatgttcagtttgcctccaggatttccagacaggtgagaaggtgaggagcttgccggattgctggcacgtgttccatgtgccgtgcatcgacggctggttgatcaagcatggatcctgcccgttgtgccggaggaagctgtga

SEQ ID NO: 13374 - DNA, 801 bp, Oryza sativa
  Clone ID: TFbOSC422826j.C1.o4.fg
tgcctcgtgcacgtcggcctcgtctgctccgactcccgccgccgcccggcccatgctcggagctccgacgtcgagtccgccgacggtgacgccgcgggcgctgggaccgacagctcggacagcgacgacgacgacgacgagggtagggagcagaggagcagttttgcgaagcgttgtgagtcgataaacacgatggtgtcatttctgtggtggataattgggttctactgggtggtgtctggcggggatgtgctcgagcaagatgctccaaggctgtattggtattgtggccctaaacctgtacccatcactgactactttatgatcgtacaatcaaatgttcacatgctaagtgttgtttttctagcatttgatgtcttcttcgctgtgttttgcgttgctatggcctgcttcatcgggatcgcattgtgctgctgcttgccttgtgtcattgcaattctatatgcactggctggccaggagggtgcatcagatgcggatattggctttcttcccagatatagatattctgatcccagtgaggatggacaaaaaggaactgacgagggagttatgatccctgttctgaataatagcggaacatcaaccagtgaacgtattctccttcatgaggatgctgaatgctgtatctgcctctcatcatatgaggatggagcggagctatctgccctcccttgcaaccatcacttccattggacatgtattaccaaatggctacgcatgcatgcaacctgtccactttgcaagtacaacattcttaaaggcagtgaaagtgcatga

SEQ ID NO: 13375 - DNA, 570 bp, Oryza sativa
  Clone ID: TFbOSC102233j.C1.o1.fg
atggcgagaatgctccttgaggcggccgcctccggctcggtggaggactcactcaactcggacctcgtcgtcatcctcgccgggctgctctgcgcgctcatctgcgtcctcggcctcggcctcgtcgcccggtgcgcgtgcacgcgccgctgggcgcgggccgccggcggcgggacagcggctggcggcggcggcggtggcgccgccgcggcgaacaagggcgtcaagaaggaggtgctgcggtcgctcccgaccgtgacgtacgtctccgacggcggcggcggcgaggcggaggagtgcgccatctgcctcgtggagttcgaggacgggcaggccgtgcgcgtgctgccgcagtgcgaccaccgcttccacgccgcctgcatcgacacgtggctgcgcgcgcactcgtcgtgcccgtcgtgccgccgcgtgctcgtcgccgccgagatgccccccggcgagcggtgcggccgctgcggcgcgcgctccggcggccgcggcatcggcgcgctgctcttgaattactggaaggcgccggcctgcgacgccgaggggccagagttggcgtag

SEQ ID NO: 13376 - DNA, 653 bp, Oryza sativa
  Clone ID: TFbOSC400945j.C1.o17.gm
atggatcgaagacggctacaggcacgagccggcatcgacgaccatcgactggagtcgctgcaccggccgaggctgggggagacgagggaggaggcgtgcgccgtgtgcctgcaggatttcggggagaaagacgaggagctcaggatgatgccgtgctcgcactcgttccatcagcgctgcatcttcggttggcttgcgatcagagacaactgccccgtctgccgctcggcgatgtcctcgtacaacgatgttttggaggagctgcacgctgagctagagcaatggatacaggggacgtacggtgagcgcctccggcgtgtgttgctgccgcagatcgatggaggtggatgcctccgcggtagtcggacgctattaacgcaggaagaagctcatgagatcattcgcgagcgcttgaggtctgacattcgtcgggggcgcatagaactggacgccgacttcttgcagcagcttgttgatcaggttcgcgatcatattcttcagcgtcagcgccgtggcactgccactgccattgccatggatggagtactggaggaggatgcgtacaggaacggtgggttcggcgctgtccccgcgtcgagcaaggccatggtcgaactgcaggaggcgatggcaagcgacgccagggaacgcgg

SEQ ID NO: 13377 - DNA, 354 bp, Oryza sativa
  Clone ID: TFbOSC8676j.C1.o2.gm
atggatcgaagacggctacaggcacgagccggcatcgacgaccatcgactggagtcgctgcaccggccgaggctgggggagacgagggaggaggcgtgcgccgtgtgcctgcaggatttcggggagaaagacgaggagctcaggatgatgccgtgctcgcactcgttccatcagcgctgcatcttcggttggcttgcgatcagagacaactgccccgtctgccgctcggcgatgtcctcgtacaacgatgttttggaggagctgcacgctgagctagagcaatggatacaggagcgtaggacagtgagcacaaagttagtaggggcgcaggccgcagggcagaaattaggatag

SEQ ID NO: 13378 - DNA, 405 bp, Oryza sativa
  Clone ID: TFbOSC964j.C1.o2.fg
atggacgcggaggatttcatggacagctggctcatgtggggcaacatctttttcttcttcctcgccctcgccatcaccgtggaggtcgatctcatccgcctccgccgcaacgacgacggcaataacaagtcggcgcaccagtacgacatgctgatcgagaggctgctgctgctacgacctaaagacgaccaagacaacgagcagtgcgtcatctgtctgtcggagaacgaggacgatgtcgacggcggcggcggcgagcgggggagagggaggatgctgccggggtgcgcgcacgcgtttcacaaggattgcgtcgtcaagtggctgcgcaaccgcacaacatgcccgctctgccgttctgacgtcgccgtcgccgccgccgccgccgcagataacatggtctga

SEQ ID NO: 13379 - DNA, 852 bp, Oryza sativa
  Clone ID: TFbOSC23981j.C1.o3.fg
atgtcaggaggtaggcaatcatactggtgctaccaatgtagacagcgggtgaggccccgcggccaggatatggagtgtccctattgtgattccggttttgtgtctgaaatggatgatgttgatgctctcatgcgccactttgttgggatggatcctgatttccatcgtgatccaagattcggtatcatggaggcaatctctgctgtgatgaggcatggcatggcgggaacgaaccgggaagttgatgtgagaggaaggccaaacatattttctgacctggagatggagtttggctcagggccatggttgctcttccgtggccagcttcctggtcatctctcagaagacaatggttttgatgtattcatcaatggacgccgtggtgttggcatgcgcagagcaaacattgcagactactttgttggacctggactggatgatctgattgagcaattaactcagaatgatcgacgagggccgccacctgccactcaatcatcgattgatgctatgcctactgtgaagattacacagaggcatctcagtggagactcacattgccctgtctgcaaggacaagtttgagctgggatcagaagcaagggagatgccatgcaagcatttataccactctgattgcatagttccttggctggaacagcacaattcctgccctgtttgccgatatgagttgccaccacagagctctactggtgctagctgctcgcgcacaagatcaaccaaccaaagtcagagttcaagtagcaatgggagaaccaatggacgtcaaaggagaaggaatccgttctcgttcctatggcctttccgatcatcaagctctagctctcgttag

SEQ ID NO: 13380 - DNA, 1551 bp, Oryza sativa
  Clone ID: TFbOSC423203j.C1.o5.fg
atgccgatcgcctccaagctcgtctacttccagcgccgccgcccatcgccggcgccgccggagccggagccggagcctcccgaccctcgccgcagcctgccgagccggagccggagcctccgccgcacgccgccgcaagccgctatttcccgttcattctcttttgatggttcctttgctgtggagcttggataccaagtgcgtcgttgtcaacacgttcgcatccttggaggccgcctatttggacttgaagtgtcctcccgtcgctcaaggtcgttagccatggccttcgtccagcgaccgtggctgaccggcggtgctaccgacagaggtgggtgcctggctggacgcctttcccgatggcgccgtcgtcgtcaccgccgcagcgctgccgaaagggttcgaggcggcgacaatggcgtggggacgggcctggtcatccgcgggtgggcgccgcaggtggcgatcccgcgccaccgcgccgtggggtggtccctgatgcactgcggcacgaacacgatgctggaggcgacgtcggcgggcgtcgcgatgctcacgtggcccatggtcgccgaccacttcgtgaacaagattttgctggtggaggccggcgtggcgatgcacctggcggagggcgcggacgccgtgcctgactctgggcagatggcgaaggcgatcgccgccgtggtcggcgacaaggggaagcccttcagggagcgtgcagtggcgcttgcccgcatggctgcagcggcggtagcagagggtgggacttcgtatagggacttggaaagagggaggaaatggggaataagggagaagagacgaagggcaaatgagtccaacgatatttttctccacttcgatctaacgccgttacctcataatgtgacggaagtgctacgggtcgaaggaaaaacgggtcaggaacatgttccaggaagcaaaagagatacctcaaagggtgtcgcatctgctggaaacataacaggacaagcaggcagcacgggctccagctcaaggctaaaccgcagcgtatcagatcatggccggcttcctgattccgttcagcaggctagggaacggctacttcagaggcttaacagcgtggacttatcaggaagaaggcaaaatacatcgttgtcatcagaaaccattcatggtggagtagccccgggcgtctccaccaccgcagatagcatattcagcagtctaaccagttgcttccacactgacgtatcgatcgctccctgcaaactccaagagagcacagctgaaaccttcaacaccgcagataagcatacgttcatcgcgcattgttctgaaccggctcctacacaagaagtagcaagctgcagagtaacagatgatgacgaactcgcgggaccttcaacggagtgctctatatgcctggagagatgtggggatgcagatgggctcctcgagctgcggtgcaagcacatcttccactcggcctgcctcgagcgatggctgcgctctcgcagcgactgcccctactgcagggccagcgtgctcctaacagcagaaggatga

SEQ ID NO: 13381 - DNA, 582 bp, Oryza sativa
  Clone ID: TFbOSC900293j.C1.o3.fg
atggggagcgtgaagaagaaggccacggccatggcgcagaggagcgcccaccacggcaatcgtacctcatccttgaagacggtgcagagcaccagcgcctccgccatggccaacgcggcggctggcgccggcggcgaggacgccgggagacctcaggctcaggttcaggtggcggcggtggaggtgcggtcgtacttcccgttcccgtacgccgccggcccgttccggccctccgcgggcggcggcggcggcggcgtgagcttagggactcatcaggctgatcagccgccggcgccggaggtggtggcggcgcagcagcagctgccgcacttcccgtacgcgccgcggggcggtggcagcgccagcgcgtcgttgtcggtggagtgcgcgatctgcctggagcggctccggcgcggcgagctgtgcagcgagttgccggagtgccgccacgtgttccaccgggactgcgtcgcgctgtggatcaagagcaagagcacgtgcccgctgtgcagggcgcggatctcgccgtggttctcgggatcgatcggagcgccgccgccgccgctcgctgacatggtgtag

SEQ ID NO: 13382 - DNA, 1074 bp, Oryza sativa
  Clone ID: TFbOSC400184j.C1.o5.fg
atgggttcgcgttccggctcgtcgacgacgacgagtacgccgccagtggcgccggatgagaaccggccgccggtggtcaaagggccggcgatcttcagctacacctgcgctggcctcgtcacgggcgtcgcgctcgtcgccgtcgtcgtcttctactgcaaccgccacgtccggaggcgcgcgcatgtcgtcgtcgccggcggcggcgggcgagaggacgacgacgtgcgcagcgtcgctggcgtggcggccaagatcccggagttcgcgtacaccgggtcggcgagcggcggcgagggggcggcgcagtgctcggtgtgcctcggagcggtgcggggcggcgagatggtgcggcggctgccggcgtgcaagcacctgtaccacgtggagtgcatcgacatgtggctggcctcgcacgccacgtgcccgctctgccggacggaggtcgagccgccgccgggggacgacggcggccgacctgcgccggcggcggatgagactccgggcaacggtgatctggaggcgcggattgggggaggcgtggaggcgggcacccaggcggagatcgggggcggcgagggcgcggaggagatcggcgaggaaggcgtcgatagtgacgccggcgggagagatcgccgcgggctggtggacgacctggcgagagatgagagcggccgatgttgccacggaatggatgtggcaaaaagtcatattgcaacactttacatcgtttggcagaggagatttgcgagggcggcggcgagggagcgtctggagaggaggccggcagccgtggctgctgatgaggcgatgcggctacgaggtgaggaggcgacacagggaggagggcgaaggtgtaggatcaatccgatgcgaggtggaggcgcggaggagattggagagggcggcggcgatcgcgggtctggagaggaggccgacgggcgtggaggaggcgacgcggcggcggggcgaggaggcgacgcggcggcggggcgaggaggcgacgcagcggcgtggggaggagatcaatccgagagaggagatgagcgatcgcgtgatgggggaggagattga

SEQ ID NO: 13383 - DNA, 789 bp, Oryza sativa
  Clone ID: TFbOSC900112j.C1.o5.fg
atgcccggcgactcggcgtcgtcgacgctgcagtacacgggcatcggcgcattcgtcgccatcgtcggcatcgtcgtcctggccgtcatcttctacacccgttcgtccgcccgtcacgccgcccccggcgcggcgcccgacgcggtcaccgcgctccaggggcagcagcagcagcgcggcctcggcctcggccccgacgacgtctccgtgctcccgacgttcacgtaccacgccgccgccaccgcctcgcccggccgatgcggcctgatcggacgcggggacgcgaaggcggcggcggactgctgcgccgtctgcctcgacgagctcggcgagggcgccgtcgtgcgcatgctgccgtcgtgcaagcactacttccacgccacctgcgtcgacgtttggctgctgtcgcgggccacgtgcccggtgtgccgggggagcccagggcaggagaaggtccgcctcggcctcgcgtccctctcaccgccgctgccgcagctgcgccggtgcgcgccgtcgccgcccaaggaggccgccgccgccgccgctgccgatacgtcgagagccaacgacgatgactcctccgcagccgcgtcgaggtcgccatccccgataagatcgagcacgcgtttcgacctcgcggccgccgccattgacgccgccgcccgtagtccggcaatgtcgccgtcgccgactcgcccgtggactccggagcgtgtggcgcgggtgtcaaggtcaccgtctcccgtgacgacgacggcgacgaccgatttgcacgtggtcgaagtgtag

SEQ ID NO: 13384 - DNA, 627 bp, Oryza sativa
  Clone ID: TFbOSC34548j.C1.o2.fg
atgtcgtcgtcgccggcgccggtggagtccccgtggctgacgatgcgcgccatgcggcgcgttggcggcgcggacggcggcggcgggcagcggagcgcgctgatggtggcgtcgtacccggtgctgctgctgctcgtcgtcctcgccgcgttcgtcaagtacgtgtggatcgcgctggcgctctacagcgcgctcctgctgctgttctcgtgcgcgtcgcgccgcctggcgctggcggagcggctgccgtcgccgctgggaggaggcggaggaggaggaggagtcgccgcggtcaccgcggcggaggagctccagggcgcggcggcgcggggcggggtgtccggggagacgctggcgtccatcccggcgttcgcgtacgacgcgtccgcgcacggcggcggcggcgaggcggcggcgcagtgcgcggtgtgcctggaggcgctgcgcggcggcgagacggcgcgccggctgccgtcgtgcgcgcacacgttccacgtcgcgtgcatcgacatgtggctgggctcgcacgccacctgtcccgtctgccggcgccgcgtcgagcgcaagcacaagggcggcgtgctgccgccgatgccgccggagccggagacggagccgccggtgtag

SEQ ID NO: 13385 - DNA, 705 bp, Oryza sativa
  Clone ID: TFbOSC401411j.C1.o7.fg
atggcagccaatgttggggaatccacaagtggcagcagcagcggcggtgccgattctgggggaagcttcgagtgcaacatatgctttgagcttccgcaggagcctattgtcacgctctgtggccacctcttctgctggccatgcctctacaagtggctgcacatccactcgcattcacctgagtgcccggtctgcaaggctgttgtcgaggaggataagcttgtccccctctatggccgtggtaaggaccgtgttgacccaaggtcaaagaacgtccctggggctgacattcctaatcgcccagctggacagaggcctgccacggctccgcaggccaatcctaacacccacttccccaatgccaaccccaacccttggttcatgggtggaggcatcccactagccaatgcacggtgggggaattacaccttctcggcggcatttgggggtttgttccccctgctcagcttccaagtccatgggttcccagatgcaaccgcctatgggcagcctgctggttttccctacggatatggacacggccacggtcacggtcatgggcacgcgttccacggcggacatgcccatgctgctgctgctccccgccatggaccgcctgggcaacaacagcaggcggatgtgtacctgaaggcgcttctcatcctggttggttttcttgtgattgcaagcctcatcacattctag

SEQ ID NO: 13386 - DNA, 588 bp, Oryza sativa
  Clone ID: TFbOSC404615j.C1.o8.np
atgtcttgtacctccccagacccgcccgattactgctcggccgcatcgcctgagcttaagctataccaagccttcatcttctccgtgccggttttcttcacgttcgtcttgcttctcttcttctacttgttctacttgcgacggcgcagagcaaactggcagtccttgcgcatgaggactaataacttgatacggggagataaccccagattggagtgcggcataaagaaggagatgcgggaaatgttgcctgttgtggtcttcaaggagagcttcttgatcagggaaacacaatgctctgtctgcttagcagactatcaaccggatgagcggctccagagaatacctccttgtggccataccttccacatcgattgcatcgaccactggctctcgacaaacaccacttgccctctttgtcgagtatccctccttccatcccccaaaaccgccagcattgatccagtggatttggaagcacagaccgttgaagagaacagctctttggatgaaaaaaggtgagtaaactacaggatgaaaggtacacaaaagcgaaatttcccctcatgtcatggtggcaaccaaaaa

SEQ ID NO: 13387 - DNA, 627 bp, Oryza sativa
  Clone ID: TFbOSC900112j.C1.o22.fg
atgtcgtcgtcgccggcgccggtggagtccccgtggctgacgatgcgcgccatgcggcgcgttggcggcgcggacggcggcggcgggcagcggagcgcgctgatggtggcgtcgtacccggtgctgctgctgctcgtcgtcctcgccgcgttcgtcaagtacgtgtggatcgcgctggcgctctacagcgcgctcctgctgctgttctcgtgcgcgtcgcgccgcctggcgctggcggagcggctgccgtcgccgctgggaggaggcggaggaggaggaggagtccccgcggtcaccgcggcggaggagctccagggcgcggcggcgcggggcggggtgtccggggagacgctggcgtccatcccggcgttcgcgtacgacgcgtccgcgcacggcggcggcggcgaggcggcggcgcagtgcgcggtgtgcctggaggcgctgcgcggcggcgagacggcgcgccggctgccgtcgtgcgcgcacacgttccacgtcgcgtgcatcgacatgtggctgggctcgcacgccacctgtcccgtctgccggcgccgcgtcgagcgcaagcacaagggcggcgtgctgccgccgatgccgccggagccggagacggagccgccggtgtag

SEQ ID NO: 13388 - DNA, 1155 bp, Oryza sativa
  Clone ID: TFbOSC419415j.C1.o1.fg
atggcgggaaggtttcttctcggcggccgggagatcgtcaggacgggggatgatggcccgttggatgatggtcctgccgtggcgccggcggcggggtcgtcggcgccggcgacgtctgcggcggcggcgagggtgacgccggcggtgctgttcatcacggtggtgctggcggtggtgctgctggcgtcggggctgctgcacgtgctgcggcggctgttcctcaagagccaccgcgccaacgccagcgccgaggcggtggagcgccagctgcagcagctcttcagcctccacgaggacggcgccggcggcgcggggccggggctcgatcaggccgccatcgacgcgctgccggcgttcacctacgccgagctgctcgccggcgccgccgcgcccaatggcggcggcgggaacgggaagaggcagttcgactgcgccgtctgcctctgcgagttcgacggcggcgaccgcctccgcctcctcccgctctgcggccacgccttccacgccgcctgcatcgacacctggctccgctccagctccacctgcccgctctgccgcgccgcgctctccgcccgcgccctcgccgccctcgccgccgccgccgcggacacccccgccgccgcgcaacaccgccagcccgacgtcgaggaccagaagctggaccaccaccacccgccgccgccgtccgacgagcccgcgaccagcttcgtgctctccgtcaggctcggccggttcaagaacacgcagcgcagcgacggcgacgccgacgcgagcggcggcggcagccgctgcatcgacgcgcggcggtgctactccatgggctcgtaccagtacgtgctcgccgacgacaacctgctgatctccgtgcactggcgccccggcgatggcattagcgccgccaccgccgccgccgccgcgggcgccaatgtcgccacggcgcgcactggcattaagcagggcggcggcggcggaggcggcaagaaggtgttcggccgaggcgacagcttctcgatgtccaagatctggcagtggcgcggcggcgacaggaggctcccagtcctccactccgacgcctcgccgccggcggacgacggcttgccgtgggcgacggcggcggcggcgagcacgcgaacgaggcaagaaagcgacacctga

SEQ ID NO: 13389 - DNA, 1008 bp, Oryza sativa
  Clone ID: TFbOSC401520j.C1.o14.fg
atgtcgtcgacgatgccggcgcagggcggcgtgcggcaccaccggacgtgccgcatgtactggtgctaccagtgcggccgcgccatccgcatcatctcctacccgtccaccgacgtcttctgcccgcgctgcttcggcaggttcctccacgagatcgacccgccgccgcgccccgcgccgcccccgccacacttcttcccgcagccttaccacccgcactacgacggccacccgcgccgctggctcatatacggtggcgaggcgccccccgtggcggcgccgggccgcgcgttccgccagcctgcgcccgcggtgccaggacgcgcgttccgccagcccgggcccgcgcccgcgccctctccagcgccggcgccgcctcgccgacgcatgccgtccccaccgccggtggcgcggcggccgtctactccaccggccatcgaccctgggaactatttcaatgggcccaacctgaacaacctcatcgaggagctaacccagaacgaccggccggggccggcgcccgcgccgtcgtcggccatcgactcgctcccgacggtgcagatcaccggagcgcacctgtccgacggctcgcagtgccccgtctgcaaggaggacttcgagctcggggaggccgcgcggcagatgccgtgcaagcacgtgtaccactccgactgcatcgtgccgtggctccgcctccacaactcctgccccgtctgccggtaccagctgctgtcctccgccgccgccgggtccaacgccaacagccgagctcgccgcggcagcgccaacaacggtggcggcggcggcggcggcgatggccgggacagggagcagacgatcgtgaggtgggggcccttctcgtggatgtggccgccgcgggggctcgaagaccccgacgacgggtgggagtacggacggcgaggaaggccagaggcgggcgacgccggcggtagaatgtgtaacgaccatggaaatttccgaaagttggtgacaatgatggatggctga

SEQ ID NO: 13390 - DNA, 736 bp, Oryza sativa
  Clone ID: TFbOSC401716j.C1.o23.gp
accaacaaatatacggtatttcctcgcaaaatgatactacttatacggtaatattacaagcctgtacgtaactgtaagcgtcctgtacctcctaacctccacaacaactgcccttgctagccaagatcgaaatcgaatggacggtggactactgtgagtaacctacaaactgaacagacgagcgggcccacccgtcatcctctcacagcaccaacgtcggaaaatatctcacggccatgggccatggcctggcccaaggagagatttttttacataggtccaaaacaagaaaggagattttttacatgggtatgttacactgggcccacagcggctgggggaagcgggggcccacctgccccggtcacgcgatgaccaccgtcacggcggcggcggcgggggcgtcgacctcgctccccggccgccggctgcccgcggcggcggcggcggcggttggtttgtgcttggtggtggcgccgtggaggacggagccccggcacgtggggcaggagtcgtgggagacgagccacgtgtcgacgcagcggacgtggaagccatggccgcagcgcggcagcacgcgcaccttctcgccgtccgcgaactcgccgaggcagatggcgcagacctccgccgcggcggcggggctccctccaccacctccgccgtacacctcgatggggatgctcctgagcgcgcgcttcttgagcccgccgccggcgcccgccccctccacgcc

SEQ ID NO: 13391 - DNA, 627 bp, Oryza sativa
  Clone ID: TFbOSC401716j.C1.o25.fg
atgggggtgcacacgaagtcgatgagctggtacatggggacgccggcctcgccgtcgccggggagcgccggggaggcgcagcacgcactgagcagcggcgggggagggggcagcgacgccagcttcgacaccaacatggtgatcatcctcgcggcgctgctcttcgcgctgctgttcgcgctcgggctcaactcgctcgcgcggctcatcatccggtgggcgcggcgggcggcgacgggggaaggcgccggcggcggcgtggagggggcgggcgccggcggcgggctcaagaagcgcgcgctcaggagcatccccatcgaggtgtacggcggaggtggtggagggagccccgccgccgcggcggaggtctgcgccatctgcctcggcgagttcgcggacggcgagaaggtgcgcgtgctgccgcgctgcggccatggcttccacgtccgctgcgtcgacacgtggctcgtctcccacgactcctgccccacgtgccggggctccgtcctccacggcgccaccaccaagcacaaaccaaccgccgccgccgccgccgcgggcagccggcggccggggagcgaggtcgacgcccccgccgccgccgccgtgacggtggtcatcgcgtga

SEQ ID NO: 13392 - DNA, 525 bp, Oryza sativa
  Clone ID: TFbOSC422293j.C1.o7.fg
atggtggctgtgccggtggtggccgacgatggaggcggagggcatggggcgaaaggggaggagagtgtgagcgggagcgtcgcgggcatttcgccgagcatcctcatcatcgccgtcatcgtcgtggtgatgctcctcgcctccgtctccatccactacttcatccgccacctgtgccgccgctcgtcggcgtcggcggccgcgtcgtcctccgcgccggtgctccccgtcgtggtgcgccccgcgtcgtcggcggccgtgggggagcaggtggtggggaaggcgtcggcggagcgcgcggcggagatggagcggctcatctcgcggctgccgctgttcacgctggcgtcgtcgctggcggcgctccccaagtcgtcgcgcgactgcgccgtgtgccagagcgcgttccgcgacgacgacgagctccgcctcctcccggcgtgccgccacgcgttccactcccgctgcgtcgacccgtggctccgcgccaacccctcctgccgtcccaaaaaaaaggcaacctag

SEQ ID NO: 13393 - DNA, 732 bp, Oryza sativa
  Clone ID: TFbOSC403264j.C1.o6.fg
atggccgcggcggaggagcagctcgccacgacgccggagatggagatggagatggagtatatcccactcgatggttacaacagccactacgtgcgcgacgacgatccttaccggcgttaccgcgagctccggatgctcgcgccgccggcgaacgagatctccggccgcctcctcgaggcggcggacgaggacgccgccatgtcgtcgtcgctctgggacgatgagttcgagctcaccggcggcgccgacgccgaccgcttcaccccgcccggcccgcgcctcccgcgcccgcccacccaccacctcaacatcttctcttcccggctgcagcgcctcgcgtccacccgcgcgccgccgccgatgccgccgccgatcgacgatggcgacttcggcgtcgtcttcttgacaggcggcgcccggcgccatgtcgccgtggccgccgccagggtggcgccggcggataccagctgcctcgggaagagcaagtacgaggaaccgcgcggcggcggcgagacggcgatgggcggcgcggattcgacggggtgcgtgatctgcatcgcggagttcgaggtgggcgacgagctgagcacgatcccgtgcgcgcacaggcatcggttccacgacaagtgcctcgccgagtggttgaagcgaagccgctcctgcccgctttgccgccatctccttcccgccgtcgttcccgccaatacccgccccaacatccattttctttaa

SEQ ID NO: 13394 - DNA, 870 bp, Oryza sativa
  Clone ID: TFbOSC400555j.C1.o38.fg
atggacgcgccaccggcattccgctcctcgtcgccgtcgtcgtcgaacgcgagcgtcccgatggttgtcatcaccgtcgtcggcatcctcgcggcgttcgcgctgctcgcgagctactacgcgttcgtgaccaagtgccaggcgctgcgcgggctgtggtcccgcggcgcgatgccgtggcgcgggcacggcggcggcggcgcgcggcggcgggccgcgcgggaggcgtcggtgatccgcaccgtggcgaccgaggagcgggggctcggcatgccgtttatacggatgctccccgtcgtgaggttcacggcggcggcatgcggcggcgccggcggcgaaggtggcggcggcggcgtgggcgcgaggatatccgtgtcggagtgcgccgtgtgcctcagcgagttcgtggagcgggagcgcgtccggctgctgcccaactgctcccacgccttccacatcgactgcatcgacacgtggctgcagggcaacgcgcgctgccccttctgggggagaggggaaaaaatgggaggaagaaagggaaggggggattcgcaccaccaccaccacaaccacaaccaccggccggacgacgagctcatcaacagcatcgtgatcgaggtgagaggggagcacgagagctgggttagccaccgcggcggcgccgccgccgcgccgcctgcgaccaagcggacgccgcagcggcggcggaagccggagagcgtgggcgacgaggccatcgacacgaggaagaagtacgacgaggagttcgcggtgcagccgatgaggaggtcgctgtccatggacgactcctgccacaagcagctctacgtgtccgtgcaggagttcctaacccaacagaggcaagtgtaa

SEQ ID NO: 13395 - DNA, 540 bp, Oryza sativa
  Clone ID: TFbOSC402160j.C1.o16.fg
atggcggaggtcggcggtggcggcctcccgccgtcgcgcgccgtgctcgcctcgcggttccgttccaactccgaccacctcatgcggctccactccacctggatcaacagcgccgccacgcccgccgctgcgccgtatagccgcgagtcgctcgcgatgctcgccgcgcggctgctctccgtctccgacgaccatctccagcgccagcagcagcaacatgtctccatgattatctccacctccctgcccggctgcaccaccggcggcgtggcgcccgcattcaaggaggcgatcgaggcgctcagggacgtcgtcgtcgaccagctggcgccggccgcggagtgcgcgatctgcctccacggccaggacgcggcgacggcggcggcgggacggtggaaggagatgccgtgcgggcaccggttccacggcgtgtgcctggtgaagtggctgcgcgtgcacggcacgtgccccatgtgccgccaccagatgcctgcaaaggaggcggcggcggctgctgctgctgagggacgccggagctga

SEQ ID NO: 13396 - DNA, 1326 bp, Oryza sativa
  Clone ID: TFbOSC900249j.C1.o21.fg
atgggaggggcgcacttccccggtgagggcgaggtggtggccggggagggcgacgccgtcgtccccctccgcgacgtgggcaagatggagcacgggtgcgagcattacaggaggagatgcaagatcgtggcgccctgctgcggcgaggtgttcgcttgccgccattgccacaacgatgccacggcttcaggtgatcggcataccatttgccgccaggatgttgaaaaagtagtatgtctactctgtgatactgaacagccggtgtcacaagtgtgcataaactgtggtgtcaatatgggagagtacttttgtgatgtatgcaagttttatgatgatgatacagagaaagggcagtttcattgctacgattgtggcatatgcagggttggtggcaaggaaaactacttccactgcgcaaagtgcgggtcttgttatgctgttgctctgcgtgataaccatcagtgtgtggagaactcaatgaggcagaattgcccaatttgttatgagtatctatttgattcattaaaaggaacacgagttctcgactgtggacacacgatgcacatggaatgcttttctgagatggtggaacataacaaatacacttgtccaatatgctccaagacagctcttgatatgacacatcactgggcattgttagatcaagagattgaagcaacaatcatgcctcccgtctaccgttacaagatttgtcttcgttttacacagccgagagagccggcgcattgggaggggattcaaggtgttcgacgatttgctcaagagggcatcgggtgcagggattttattccgttccacatgatttttgggctggccatgggagaatactgcagttcgtcatcgaatcaatccaaggtacccatcatcctcctcttttcagcatcaacgatcgtacaatctagtatagtgaattggttctctgtacacagctctagtggcaccatactgatgataatgacgtgcatgcatcctttcgtgtcagctatgcgtttgaagattgagaaatgcttgctatcctttgaacaaattgtggttctgaaataccatggctctttctccgaaaacattacgcgtcttggaagaacaaaagttaggtcttgtgttgcacatgttaaagaatcatgggtacagtgttggaatgcaatcacaagcacagtgctgaaatgcattctcacacagccgcaagcccgcaatactatggaagataatgaaaatacaaaggtgagagctgtcaatgcagatataaaggataaggatatcattctcttgtcctgctggatgtttgcgtcatgcactaaaatatga

SEQ ID NO: 13397 - DNA, 453 bp, Oryza sativa
  Clone ID: TFbOSC400945j.C1.o1.gm
atgggaaatttctcgtcggaggaggagccgccgccgtcgccgtcgccgccaccagcggacgaagacgtattaccgttcgaagagtacccgccgccatcgtccgacgaagaggaggaggaggagatcaaccaccccacgccacagacctccaacgaggcggctgacaggcgccctggattactcccggcctcgcgcaaggccatacagggcctgcgtgaggtgacggcggccggcgcgggagaagacgagtgcgccgtgtgcctgcaggatttcgaggcgggcgacaagctcaggatgatgccctgctgccacaccttccaccagcgctgcatcttcgactggctccgcctcagctgcatctgtcctctctgccgccacactctgcccacgcagaatgtggaggacgacaggcttgggcgcgctgcccacacagtggcaggatcaaccggctga

SEQ ID NO: 13398 - DNA, 2445 bp, Oryza sativa
  Clone ID: TFbOSC418226j.C1.o1.fg
ttgcctatcaggttaactataaaccttctcttttcagatggtacttgtgcacccatagagagggacactcttagaagtcttgtggaatctggtgcaactgaaagttcaggttgtttgcctggttgccacttgggaagtgatgcccctccattacatctatccacagctaatgctcttggggatatcttttttccatcaagtgatcttttgcaagcaaatgaggagtgtgctttggctgctctcactaaattaccagaaaatgaccgcagtaagcaactacagagtactagtagcaacctgttgtccagcctcaataatgtcgtacaagcattaagtaatcttcagttgaagcacaagcagttagcagaggattatcaaaatcaaagagattccagtgcccgaaaaagagctgaacatagacgtctaaaagaggagttggccagtgctgcttctgagttggaagaaactaactacaaactggcagcacttaaagctcaaagagataatacacaaggagctcgaatcccatatcctacattaggaaacaaaaatatgcctgaagataaggaattgatttcaaagcggttggtggaaattaagagattacatgaagagagaattgaaattttgaacaaaatagcaacttttcagaatatcttgatggatttcaagagcattcgttcttcaaaagcttttcagcttgttaatgatcgacttcagaagtcacaagcagaattggatcactaccagacattattagagaaattacaggttgataaggataagtttgtgtggcaagaaaggcaatttaatttgaaagttgatctggctgagattcctgagagggtttctacatattgtgagtctagcattgctgatctcaagaaggatattcagaaactatgtgatgaaaaaaacatgcttattctcaaacttgaagaggcttcaagagaacctggtgcggtagttactattcactttaccaagagtaactttcaaacttgtcttgctaaagcagctttagtgtcatcgataccaagggaaatgggcgcgatgcagagtgaaatgaccaaacacaaggaggcttccttggagttgaattctttgcgagcagaagtccattcactttctcgcattctgtccagaaaggaacgtgataatgaagaagcatcatgcagatctgcccgtgcgggatctgatataacacaacttcaatcagtgatttctgatctgaagcaaactaataaggagcttaagttgttcgcggatatgtataagcgtgaatccactgattccagggaaataatggaatccagagatagggaattccttgaatgggctcatgttcatgccctgaaatcatctcttgatgaaagtaagctagagcagcgtgttaaggctgccaatgaagctgaagcaatcacacagcagaggctagcaactgcagaagctgagattgctgaatcagggcagaagcttgggacttctagaaagtacagaattatgcttctgaacattgtttctcttagaactgttgaagtaggggtcacttctcttttaggggatctagtcagtttatcccatatgctgaagtctaaacaggaagaatgtgaagcttacagagtggaggtcgagtgtatcgggcaagcatatgaggacatacaggcacaaaaccaacaattgctacagcagattattgaaagagatgatgataataccaaggatgttagatttggttatattgttaatttgattgttccggagactcagtacttcattgaaaagctgtttacttgcgttaagttgatttttatggagggtgttaaagcaaaacagacacaagatgctttgcatttggaaacatattctttgcgcagaaacttgcagcaggaaagctctttgatggatctgtacaaccagaaaattgtttccttagaagatcagcttaaaatgtggtctgatcgggttgggaaacttcaagaggatggatggcaacaatctgtttcattgagtaattaccaaagaaagctggttgatgtgcacagagatgctcaaaagcttatgcaatcattggatggaatacaagcgaatgttggaagcagtcgtttggaagtcgctgatctgcttatagaacttgagaaagagaggtttagtaagaagagaatagaggatgatttggaggttatgtcaaggaaagctagctctcttagagccaaggcacgtgaatcagcagtcctggaaaagcttcgtcatgaggtcaaggagtatagggggatattgaagtgtggtatctgccatgataggcagaaggaggttgtgattaccaagtgctaccatctcttctgcaatcagtgcatacagaagtcccttgggaaccgacagaggagatgtccttcatgtagcttgagttttggggctaatgacgtgaaacctatctacatatga

SEQ ID NO: 13399 - DNA, 762 bp, Oryza sativa
  Clone ID: TFbOSC400220j.C1.o16.fg
atggaccagatttacatggctgctgtcaataacaagacttcattgcctgatgatgagccaatgaagaaaattagtggagatatgcctgtgactgctggaaacgcttgctttgactgcaacatttgccttgattttgcagcagagccggtggttactctttgtggtcatctctactgctggccttgcatctatgagtggctatgtccaggggttggatcgactgccagtaacaacagcagtttggcaaggcgacagtgccctgtgtgtaaggctacactctccccagacatgctggtgccattgtatggtcgtggggggagtctgaagaaatcactgaatggtgtgcccattccacgacgaccaaccgtgcagcgggaggcggttgagcatcaaaacacacacaataacatcgatgatcggcaccatgagaacatggaacccagccctccaccacaaccgctgcggcattcgagccatcattccagtgcaactgaatttgattttatttacccgccatcaccaattgggcgtggcttgatccactcgacggctggtggtgtgcttggggggatggcagtggcggtgctaccatgggcattccgtggccaggtgccaccgagcatgttcatgagtccccactatgtcacggcacacaatatgagctctagagcgaggagacatcagatggaagttgagaggtcactgcatcagatctggttcttcctcttcgtttttgtggtgctgtgcctgctcttgttctga

SEQ ID NO: 13400 - DNA, 498 bp, Oryza sativa
  Clone ID: TFbOSC405087j.C1.o5.gm
gaagagaaagaaaggttccggaatatcaaaaaacctcctgtgccccccccgaggccccgaagcccttcgttcgtgtggagggcgccgctgttgcccccccggttccgatcccaccgtgtgccggcaacaacggtgaagccctccgcccgcccggttgtagccgacgacgtggcgctcttggcgtacgcgtacgagaagaagaagaagaagaggagagggagcgacggcgacagcggcggcggcgacgacggcgacggcggcggcgaggagtgctcggtgtgcctcggcgagatgaggcaaggggaggcggcgaagcggctgccggtgtgcctgcacgtgttccacgaggagtgcatcgacatgtggctcggatcgcacgccacgtgcccgatatgccgctctccggtggacgccggcgccgtggcggcgcgggtgcagcgcttcagcagatgtgttttcatctgcatctactttgagttggatccgtttgttgattga

SEQ ID NO: 13401 - DNA, 963 bp, Oryza sativa
  Clone ID: TFbOSC900068j.C1.o18.fg
atggcggcggcgggggtgtcgaggagcatggtgctgacgctgctggggttctgcgtcagcgtcctcttcatcgtcttcgtctgctcccgcctcgcctgcgccctcctcaggcgacgccgcggccgcgcccgcctccgccgcgcctcccctctcgccgtatcgggggtcctctccatctacgtcgaccgccacggccaccaccagccctcgtcggccgccggggccgcttccgggaccgggggcctcgaccccgccgccgtcgccgccttccccacccgcgccttctcccccgccgcctcctcctccgcctccgcctctacccagtgtgtagtctgtcttgcagaatacgaagagaaagatgtgctccgtgttcttccctactgtggccacggctttcacgtggcctgcatagatatttggctaatgcaccattcaacatgcccagtttgtagaatttcgttgtgcgactaccctgatagcaagcacacgatgtctcctgtaccaagtgcagtgataataccattacctccatgttctcctgaagcatcaagatcagatcaatgcaattgcctattcgtcggaacaggtcattcgccaaggacatcgcaggttctcagaaatgaacctgaccaggtgaaactacctgtaatattagaaacatcgacacagggggatccgtggattgctgtcataggttcagatggtgatatgatatctcttctgaagccaggggcctccagtggcagaagaacagcctatatgtttgtccacgcatggatgtcggccggtccaatcatggctcatacaatagatctgaactttgtgtgctcaaagcatcagcagcagcaatggttcttcttccctgctgcaacagggaaaagtcgtgttgaaccaagagatgctgacgcagggcttcactcatgtcttctccccgaccttcgggaattagctctgaagatctga

SEQ ID NO: 13402 - DNA, 879 bp, Oryza sativa
  unsure (1)..(879): unsure at all n locations
  Clone ID: TFbOSC900298j.C1.o20.fg
atgcggggcgcactcgccgctggtggcggcatcccgagttacgcgcaccgcgacggcgacggcgacgttgagtgcgcggtgtgcctacggcgaggtggagcagggggaggcggtgcggcggctgccggcgtgccagcacgtgtgttccacgccgcgtgcatcgaccggtggctgcgcgcctgcgcgcgagcgccacctgcccggtttgccggangaggaaaagagaggaaagtgttctgtcntgttcccattgttctaaagctcttgctcgccgtcgtcccgctcgccgtcatcgccggcgtgctcgtgtacgtcgccggcgtcccgtgggccatctccatcgtcgtcctcgtcgtcgtcttcgtcgtcgtgcacagggcgcgccgtggcaggtcaccggcggcgggaggaggaggaggaatggtccgggatgatcaagaaccgacggtggcgcggccggcggcgccaagcgccgtcgtcgttgtggtggcgccgccgctgccaccgccgttcccgatccaccgtgtgccggcaacaacggtgcagccctccgcgccgccggttgtcgccgaagacgtggcgctcttggcgtacgcgtacgagaagaagaagaagaagaggagagggagcgacggcgacagcggcggcggcgacgacggcgacggcggcggcgaggagtgctcggtgtgcctcggcgagatgaggcaaggggaggcggcgaagcggctgccggtgtgcctgcacgtgttccacgaggagtgcatcgacatgtggctcggatcgcacgccacgtgcccgatatgccgctctccggtggacgccggcgccgtggcggcgcgggtgcaggtgcaagtgcaagtgcaagtgctatcatgttag

SEQ ID NO: 13403 - DNA, 642 bp, Oryza sativa
  Clone ID: TFbOSC400259j.C1.o108.fg
atggacgtcgaacagctgcagcagcatgccaggaggcttctgtcgaacggcagggtggtgtcggcggcggcggccgccggcgcgtcgcctggtccggctgggcgcgtgttggaaggcggcgcggcggcggcggcgcgtcgtccggcaccgttcagctcgctggacgcgacggtgatcacggtcctgtccctcctcctctgcgtgctcgtcgtcgggctcgtgctccacgcgatcgcccggtgcgcgttccgcgtcacgcggcgcatgtgctacggccaggagccgcccggggatcacggcgacgaggcggcggcggagcgatgcgcccgggtagccaggaagaagccgggacgcgccatcgcggagaagatcccggcgatcgtctgcccggccggcgggctcgatcggctcgccggctgcggctcgacggagtgcgccatctgcctctccgagttcgcgcagggtcaccgcgtccgcgtgctgccgcgctgcggccacggcttccacgcgcggtgcattgaccgatggctcgccgcgaggcagacctgcccgacgtgcaggcgggagccgtttgcggcggccgcggccgtgcagctgcaggtttaccctgacgccgccggcggccagcacgagacgccttag

SEQ ID NO: 13404 - DNA, 546 bp, Oryza sativa
  Clone ID: TFbOSC407812j.C1.o3.fg
atggaggtgtcccacatggccaactgcagcaacgtctcctcaccggagcagcagccgatgccgccgtcttcggcagcggcgtcgtcgccgtcgccgccgcagcttgactacgacgtggtggtgatcctggcggcgatgctgtgcgcgctggtgtgcgcgctggggctcaactcgatgctccagtgcgtggtgcggtgcacccggcgcgccgtggcggaccccgtcggctgggtggagcaccgccgcgccggcgcggggctcaagcgcgaggacgtcgtggcgctgcccgtcgccacgtacgtcgcctcgccggcgccctccgtcgccggctgcgccatctgcctgtcggacttcgccgacggggagagggtccggctgctcccggcgtgcggccaccggttccacgtcgtgtgcatcgacaggtggctcctggcgcactgctcctgcccgacgtgccgccgccgcccctcgccagaggccgacggccacggcgccgtcgtcggagaagaccaccaccatcgcctgcaagttttgactgctgcttaa

SEQ ID NO: 13405 - DNA, 1161 bp, Oryza sativa
  Clone ID: TFbOSC408022j.C1.o9.fg
atggcctcttctccccctacaacaccaaatctcggttcgcagcctacatgggtgccctatgagccaaccagggattgctcccagggcctctgcagcatgtactgcccgcagtggtgctacttcatcttcccgccaccgccgccggccttcgacatcaccggctccagctccgacgactcctccggcccaaccttctcgccgctcgtcatcgccatcatcggggtgctcgcgagcgccttcctcctcgtcagctactacaccatcatatccaagtactgcggcaccttcagctccctccggaacagactccttggctccagcgctcaccgcggcagcggcggcggcgccgacggcggagacaattccaggagccaggagccgtggagcgtcgcgctgtcggacgggatggacgagacgctgatcaacaagatcacagtgtgcaagtacaggcgcggcgacggcttcgtggacagcacggactgctccgtctgcctcggcgagttccgcgaaggcgagagcctccggctgctgcccaagtgcagccacgccttccacgtcccgtgcatcgacacctggctcaagtcccactccaactgcccgctctgccgctgcaacatcgcgttcgtcaccgtcgggatggtctcgccggagccggaggcccgcgttccacgggaggataggagagacaaccacgagctggtcctgacaattgacaacccggagcatgtgcgcgaggagccacagaacgtggtgaccggtgtcgccgtcggcaacggcggccgcaaccacgaggcgaaggatggtccggggaggtcggaagatgcaaatggcacagctgagatcagagaagacggcgccttgatgccgcccacaagggcgccgtcgtcgttgtcagacacgcaccgtgaaggccggatgtccattgccgatgtcctgcaggcgagcctggaagacgagctgatggtggccagggagagcggcctcctggcaggctcttcggggtcctcaagacggtgtcacggggagcacagcaaggacggcggcggccgcagtggccgggcattgccggacggcgcgaatatgaagagattggcgccggccgggagatcatgcttcagcagcaggagtggcagaggaaaggactccgttcttccaatgtga

SEQ ID NO: 13406 - DNA, 3468 bp, Oryza sativa
  Clone ID: TFbOSC401134j.C1.o46.fg
atggcgacgccgacgcccatggcgggggaggggacgctcgcggcggtgatgccgcggtcgccgtcccctacggcttcggcggcggcggggtcggcggcggaggcgccgatgctgatattcctctacttccacaaggcgatccgcgcggagctcgaggggctgcacgcggccgccgtgcgcctcgccacggagcgcgccggcgacgtgggggcgctcgccgagcgctgccgcttcttcgtcaacatctacaagcaccactgcgacgccgaggacgcggttatctttccagcacttgatatccgagtcaagaatgtcgcaggaacctattctcttgagcacaaaggggaaaatgatctcttcagccagctgtttgctctgttacagctggacattcaaaatgatgatagtcttcgaagggaactcgcatcctgtacaggggccattcaaacatgtctctcccaacatatgtccaaagaagaagagcaggtctttccattgcttacgaagaaattttcatatgaagagcaagctgatctagtgtggcagttcttatgtaacattcctgtaaatatgatggcagagttcctcccctggctttcgtcttcggtttcatctgatgaacatgaagatatccgtagctgcttatgtaaaatagtacctgaagagaaactccttcagcaggttgtcttcgcgtggatcgaagggaaaacaacgagaaaagtaacagagaattccaccaagtctaattcagaagcaacctgtgattgcaaggatgcctcctccattgatcatgcagataaccatatttcttcacatgaagattctaaagctgggaacaaaaagtatgcagaatctattgatggtcaggttgaaaggcatcccatagatgagattctgtattggcacaatgctatccgtaaagagttaattgatatagcagaggagacaagaaggatgcagcaatctggaaatttctctgatatatcatctttcaatgcaaggctgcagtttattgcagatgtgtgcatcttccacagtattgccgaggatcaggttgtgtttcctgcagttgatagtgagctgtcctttgtgcatgagcatgctgaagaagagcgccggtttaacaattttagatgtttaattcagcaaatccaaatagcaggagcaaaatcaactgcactagacttttactctgaattgtgttcacatgctgatcagataatggagacaattgagaaacacttctgtgatgaagaaaccaaggtgcttcctcaagctaggatgcttttctctcctgagaagcaaaggcaacttctgtataaaagtttatgtgtgatgccactgaagttattagaacgtgttctcccatggttagtgtccaagctgagtgatgaggaggcatcttcttttcttgaaaatatgcgcttggcagcaccatcatcggaaacagcactggttacccttttctctggttgggcatgcaaagctcgttcagaggacaaatccaattctggggagtacttatgcttaacatctggagaaatgagatgcctattggatgaagttgatggactggaaaaatgtcggccattctgtccatgtgcttcacgtagcaatacagatgcttctctgcatccgcagactgaaaatggttctaggccaggaaagcgaggaaatgatgcagaatctgttcctggtactaatggaagtgacttgtctcagactgatgacactgaagcacgtccatgtagcaaaaaaccttgctgtattcctgggttgagagtagaaactggcaatcttgctattagttcatcgctggcttctgcaaagtcatttcgctctctatcatacaattcttctgctccttcattatattcaagccttttttcttgggagacagatgcatctttatcttgttcagatggcatatcaaggccaatcgatactatattcaaatttcataaagcaattcgcaaggacttagagtacctagatgttgaatctggaaagcttattgatggtgatgagtcttgtcttcgccagttcattggaagattccgtttattgtggggtctttacagggcacacagtaatgctgaggatgaaattgtttttcctgctttagaatcaagagagacattgcacaatgtcagtcactcgtacactcttgaccacaagcaagaagaacaattatttggagatatatctgatgccctcgctgagctttcgcagctacatgagaggttgacccacccccacattgaagtcagtgaagcagagaaaaacgattttaattcctctgatgagattgattggactagaaagtacaacgagcttgccacaaagcttcaaggaatgtgcaagtctatccgggctgcattgactaatcatgtccatagagaagaacttgagttgtggccattgtttgatgagcatttttctgtggaggaacaggataagcttgtaggtcgtataattggttcaactggtgctgaggttctccaatcgatgctaccctgggttacttcagcacttactcaggaagagcagaacatgatgctggatacatggaaacaggccactaagaatacaatgtttggcgagtggctaaacgagtggtggaagggagctccgacatcatctgattcttcagaagaggcatcctctgctccagaagatagtcatttacaggacaagattgaccagaatgatcagatgttcaagcctggatggaaggacatatttcgaatgaaccagagtgaacttgaggctgaggtgcgaaaggtttcacgagatcctacacttgacccaaggcggaaggcctatcttatccaaaatctcatgaccagtcgctggatagctgctcagcagaagctaccagagccaaaatcagaagagtgtagtgaaggtgccggtatccctggatgtgctccttcatatcgagaccaggagaagcaaatatttggttgtgagcactacaaaaggaactgcaagcttgttgctgcatgctgcaacaagctgttcacttgcagattctgccatgataaaattagtgatcatacgatggaaagaatacttatgttgcctgatcatactagagaaagcgacacaggagatgatgtgcatggtcttggtgttgatttcttccattgcatgaagtgcaattgctgccttgggatgaaattaacagaacacaaatgccgggagaaagggctagagacaaactgtccaatctgctgtgatttcctatttacatcaagcgcggcagttagagctcttccctgtggccatttcatgcattcagcttgctttcaggcatacacttgtagtcactacacttgtcctatctgctgcaaatccttgggagatatggcggtgtactttggcatgttggacgccttgctggctgctgaagagcttcctgaggaataccgtgatcggtgtcagggttgttctcttgcttcttga

SEQ ID NO: 13407 - DNA, 453 bp, Oryza sativa
  Clone ID: TFbOSC8662j.C1.o1.fg
atggccgatgaacagatcagagacctgaacttgtcggagacccatacgttgctgctcatcaacctttatttgtcacacgtacaggggccgagctacgttccacacggtgttgaatcagcatacatccacatcaatcgtgatatcgaagaagatgacgacacgtacagtgatgacgggttctgcgccgtcccggcctccagcgacgccatcgctgcgctgccagtgccagagacgacggtgagtgagaccgagacgagggaggaggaagcatgtgcagtttgcctagagggatttaaggagggtgacagagtcaagaagatgccttgctctcatgacttccacgcgaattgcatctctgaatggcttagggtgagccgcctctgtccacactgccgttttgctctgcctgctgagagggattctgaacagaaaaacccagaaggggaagcgtga

SEQ ID NO: 13408 - DNA, 336 bp, Oryza sativa
  Clone ID: TFbOSC8664j.C1.o2.gm
atggcgaccacaggacgattgctgctgccccacgacatcaacggtcgcttcggctccgtcccggcgtgcagcgaggccatcgccgccttggaggagacgtcggccggcgaggcgaaggagaaggactgctccgtgtgcctggaggccttcgaggaggagagcgacaagctgatgaggaagatgccgtgctgccatgccttccatgagagctgcatcttcgagtggctgcaggtcagccacctctgcccgctctgccgcttcgcgctgcccacccaggcggaggcggaggcgggactgtggccattgctcacgcctggttctggttcggggacatga

SEQ ID NO: 13409 - DNA, 792 bp, Oryza sativa
  Clone ID: TFbOSC23746j.C1.o8.fg
atggaagggagggtgctgcggcggagtgtcacgctggcggaccagctggccgccgtggggcccgcggggacggccgccgccaccgccgccgcggggtcctgcaacctccgcgacctcctcaagctccgcgacgaggacgacctcgccgcgggccgccgcgccgcggtcaccctcgcgtcggccatggcggccgagaggttgacggtggcgcctgcgtcctcggctgccgcggcggcggcggcggcgcgcaccttgctggatatcatccgggatgaccagctcccgtcgtcttccggtggtggtggggaaggtggtgaccccctcgtccgccgcgcggtctccctgcctgctccggttacggcgactcctcctcctccgccgccgccgccggagacgccgccgcgacagctgccgtctgtgtcgccgccgacggtgggggaggaggaggaggaggagcagggggagagggtgtccctgatggcgctgctggagcagacggagcggcagtggagcgccggctcgggcgcgaccgtgcagcagcatctcgcgtctccctccgccgccgcatcggcatcggtatcggcggcggcggaggacgaggcggaggcggaggcggggaagggggcggcgggcggcggctgctgctgcgtgtgcatggcgcgggccaagggcgccgccttcatcccgtgcggccacaccttctgccgcacctgcgcccgcgagctcctcgccggccgcggccgctgcccgctctgcaacgccgccatcctcgacgtcctcgacatcttctga

SEQ ID NO: 13410 - DNA, 1005 bp, Oryza sativa
  Clone ID: TFbOSC401719j.C1.o43.fg
atggacgacgacgcctcctcctacacctactgttgccacagctgcgacagcttcgtccacccgcacccccacctcgacgccgctgtgctctgtccccactgcaacgccgccggcttccttcacgaccacgagatgcctcccgccgccgaccactccccgttcaacccccccgtcatcgtcctccgccgctccgcatcccccgacgacgccaccaccttcgatctcctctacgacgacggcgcctcctccgccctccgccccctcttcgaccgcctcctcctccgcatcccctccgcctccgacaaccccaaccccccggcctccaaagccgccgtcgactccatgcccaccatcctcatcggggcctgccacctcgccgccgactcccactgcgccgtctgcaaggaacccttccacctcgccgccgaggccagggagatgccctgcgcccacatctaccaccacaattgcatcctcccctggctcgctctccacaactcatgccccgtctgccgccaccgcatgcccaccgatgaccacgactcgaccaatgctgctgctgctcaggctgccgccggaagcagcgacgaggacgccaccaccgtgggtactctcaccatttggaggcttcccggtgggggatatgcggttgggaggtttgctgctgctggtgggacaagagccggtgagagggagctcccggttctctacacccagatggatgatggcggcttcaacggcggcggcggctcgggctcgccgacgatgatcgggtggtcatctagagggagtcgttcgtcccagagacagagaagcatcatcccacgcttgtttcgcaacatgtttgcatgctttaggcatcatgatgcaactgcagattcaggagattattcctcacgggctgggaggagatcctcctcctctgtcttcacccgcagcctgaggagccagatcacgagctggagatcggaagatggccaccccgatgccattgctactagatga

SEQ ID NO: 13411 - DNA, 903 bp, Oryza sativa
  Clone ID: TFbOSC405090j.C1.o1.fg
atggccgcgctggtcctcagcgtcgtcggctgcttcgcccccaagagcgtctggaaggcgtccgtgctcgccgggatggtgctactggccttcggcgtcgccgactacctcgcgccggcgagctggtgccgccgccgcggcgggacgaacacccgcgccgcggagcgggaggctcagccgggagcttcttcctccagcacgttcgggctcgagaaggccgcggtggacgcgctgccgacgttcgcgtacgcgtccggtggcgctggcgccgcgcagggcggcggcgacctcgaggccgggaacggcgagccgtgctcggtgtgcctggaggagctgcatgccggcgagatagtgcgggagatgccggcgtgcaagcacctgttccacgtggagtgcatcgacatgtggctgcactcgcaccggacttgcccgatgtgccggtgcgacctctcgccgccccgggaagtggccgcgaaagaggccacggcggcggagacggcggcgccgccgggtgatgacgccttgccgccggataggatagcccagaggggaatattccccctagatgatggatggattaatccggccgatttgcccggatacagccgcccgagcgctcgggcgagcggggcgagcgacgaggtgggtcacgtcacccctctcaccatgcgagaacaacgacgacgcgagggaggcagtgggatgcaagctcggctgccggcaagtgggtgcgagtgtggtggcggcagcggaaagaaggggggcagcgagcccgaaggttggaggcggcggcagcggaaagaaggggtggcggccagcccgaaggctagagacggcggcaacgggaagaagggacggtggcgagcccggaggagaatgaatcaccgccgccgactaggatga

SEQ ID NO: 13412 - DNA, 1008 bp, Oryza sativa
  Clone ID: TFbOSC900298j.C1.o27.fg
atgtcgaacgtgttcgcgaggatatcggcggcgacgctgcggggcggcggcgaggaggagcggggcggcggccgcggccgccgcgcatgctacggcatcgcggcgtccttcgcggcggtgctgctgttctgcgtgctcgccgtcgtcggcagcgtctggaaggcgtccgtgctcgccgggatggtgctactggccttcggcgtcgccgactacctcgcgccggcgagctggtgccgccgccgcggcgggacgaacacccgcgccgcggagcgggaggctcagccgggagcttcttcctccagcacgttcgggctcgagaaggccgcggtggacgcgctgccgacgttcgcgtacgcgtccggtggcgctggcgccgcgcagggcggcggcgacctcgaggccgggaacggcgagccgtgctcggtgtgcctggaggagctgcatgccggcgagatagtgcgggagatgccggcgtgcaagcacctgttccacgtggagtgcatcgacatgtggctgcactcgcaccggacttgcccgatgtgccggtgcgacctctcgccgccccgggaagtggccgcgaaagaggccacggcggcggagacggcggcgccgccgggtgatgacgccttgccgccggataggatagcccagaggggaatattccccctagatgatggatggattaatccggccgatttgcccggatacagccgcccgagcgctcgggcgagcggggcgagcgacgaggtgggtcacgtcacccctctcaccatgcgagaacaacgacgacgcgagggaggcagtgggatgcaagctcggctgccggcaagtgggtgcgagtgtggtggcggcagcggaaagaaggggggcagcgagcccgaaggttggaggcggcggcagcggaaagaaggggtggcggccagcccgaaggctagagacggcggcaacgggaagaagggacggtggcgagcccggaggagaatgaatcaccgccgccgactaggatga

SEQ ID NO: 13413 - DNA, 1287 bp, Oryza sativa
  Clone ID: TFbOSC100279j.C1.o12.fg
atgagcaattcgacgtggcagccgtcgccgccgcagactccggcggcggcggcgtcgtcggcgtcggggattgacggcgtggagaacaagataagcccgagcatcgtgttcatcgtggccgtcttggcgatcgtgttcttcgtgtgcgggctgctgcacctgctggtgcggcacctgctgcggctgcaccggcagcggagggcgagggaggacgccgagagcgcgacggcgttcgaggggcagctgcagcagctgttccacctccacgacgccggcgtcgaccaggccttcatcgacgcgctcccggtgttcctgtaccggaacgtcgtcggcgtcggcggcgaggatggcaaggacccgttcgactgcgctgtctgcctgtgcgagttcgccgccgacgaccagctccggctgctgcccaagtgcagccacgcgttccacctcgagtgcatcgacacctggctcctctcccactccacctgcccgctctgccggaggagcctcctcgccgagctctcgccgacgtgcacccccgtcgtcatggtgctcgagtccgagagctcccgcgacatggtccacgccgccgacgatgagccagccgacgtcggtggcgaagacgcgccgggagcggaggaggtggtcgaggtgaagcttgggaagttcatgtgcgtcgaaggcaacgtcttcttcaacgtcaacgccatcgccggcgaaggggatagagccggcacgagcagcaacggcaatggcgacgccaatgccaaggctggtggtctcgggcaaagacggtgccattccatgggatcctacgagtacgtcatggacgcgcacgcctccctccgcgtgtccatcaagccgccgaggaagaagccggcggcggcggcctccaagtcgcgccgccgcggcgccatgtcggagtgcgagttcggcgcctccaagcgcggcgagtcctcgctccgcctgccgccgttccgcgcgacgccgcgcaagaaccccgacgacgacgcggccgcggccgccggcgcgaagctcgccaaggacagcttctccgtgtccaagatctggatggtgccgtccaagaaagagcccggcgccgccgccgagaggcgcgcggtgtcgttccggtggccggcggcgaaggactgggacgtcgaggccgggagctgcggcgggaacagcgccgtgtcgtcggtggcggcggaggagcgcccgtcgttcgcgaggaggacgctgctctgggtcgtcggaggcagcaggcagctcagcagagtcgggagctgttcatga

SEQ ID NO: 13414 - DNA, 624 bp, Oryza sativa
  Clone ID: TFbOSC411506j.C1.o3.fg
atggcgtcgttcctcgactcgttctcctcgctcggcgtcgggtacgcggtcgccatcgcgctcggcttcctcgtcctcctcgcgtcgctgctcctcgccttctacttctgctcccgccgcggcggggccggggtcgtccgccgcggcggcggccagggggtccactccgcgcgccacgccgtgtcctccgcgtccagctccgggcacatctccatcaccgtcccgcgggtcatcttcgtcgcggacgactccgactccccgggctcctcgtcccgcggcggcgccgggggcggcgcggcgtcgtcgcccgtcgggctcgaccccgcggtgatcgcctcgtaccccaaggtgcccttctctagggcggcgacgggggcggacgccgaggccgcgtgctcgatctgcctctgcgagtacaaggaaggggagatgcagcgcatgatgcccgagtgcaggcacaggttccacctcatgtgcctggacgcgtggctgcggcggagcgcgtcgtgcccggtctgccggtcctcgcccatccccactccagtctccactccgctcgccaccccgctgtcggagctcgtcccgctatcacagtacgccgccgaccgccggcgccacaggtga

SEQ ID NO: 13415 - DNA, 2472 bp, Oryza sativa
  Clone ID: TFbOSC900235j.C1.o2.fg
atgcccgcgcagaagcggccggcaccggaggcggcgtcggctccagcggggggagacgggcacgtggaaggaggaggtgctggtggtggtggtggcgcggacgaggacgcccaccgcggcggggagcgctccccgaaggtgatgaacggtggcgggccggagaaggagaaggagcggcgggacgctgattctgatgcggaggaagaggaggaggaggccggcggcggcggtggtggtggaggggccgacgaagaccgcgacagcccgtcttcggagagcgacggcgacatggacgagtttatactagtgaaattaatggatatacggaaagaagtgcagtgccctatatgcttaggcattatccggaagacaaggacagttatggagtgtttgcaccggttttgtagggattgcatagataaatccatgcgactaggaaataatgaatgcccagcatgccgcacccattgtgcaagtagacgttctttgagggatgatcctaattatgatgctttaattttggctttgtatccagatattgacaagtacgaggaagagatccaagcatccatcgctgaaacatttcgaagacaatcagaagcactcgtgaagaagcgttccgttgcaaaagcaacaggttcaactattacgagaaggaccaggggtaatatgcgcgcaaaaaggaggggacgaactagttcccctgatattgttgcaactgacaatgaggatgaggatagagatgaaaatggcaatgagggcagcaaagagtcgtcttctgttgatgaccgttccccagatgtaaggcagaaaagagttcggaggtggcccgtgccacgatcatcccctgctaagagcattgggggtattgatagtagctttgaggatattgatgacttaggaagtggcagagatatcatgagtacttctccactacgcggagagatgcttgcctggggaaaaaatggcacccgcagtcaaacccggcatggcaattctggtggttccagtggaaggatggcaaagggtggtcgtgttaccaagttggttgaatacctacgtaataccgatgaattcgataataagttcaacttatatcttgttctacttccacttaatggacaaagcatgcctaaattggagaagccctatctcagttgccaaccgacattctctgttcgccatctttgccagtttgttgctctccaattgtctcgccatgcgaaagaagtggagatattcatcaggaagaaccccaacaatggatgctttgcatccatagatactagtgcagatgagataaaactgaatcatgacgccttagaaagattggaggaagagaaatctctttcagagctgtacccttcacttgcctctggccatggggatctggctccatggactcggtacggtgccttgaacaatgaacagatggtgggttgcaggaagaatcgtgaagtgatcaagttgctgttgaccggtgcaggtctgaccgtctgccatgccatgttaccgctgaaactagccgactggccttcgacgctcacgcagtcccgctgccagtcaaactggccgatgagtttggaagtgctctctgagtccctcttgtgctttggtgctacctccgtcaccgtggatgacattgccgctgccggaaatctcgatgagatcaccattacctccatttttgctcatggggaagatgtgggctcgtgcgtatcgagtgctgcaagctcagctggattggagtacaatccggtgtatgaaagctctgtaggaaagcaatgtgattgggtgacggttgtgcaggaaacctacgagtccacaaaagtcattgatggtctttgggtaattcctaaatggagaactcccccagatccacaggctatcaatataatcatcaatccaggtctggcttttgggactggggagcatcccacaactaaactgtgccttctgcttctacgggaaacagttaaagggggtgaacgtttcttggactatggaacaggcaccggagttttgggaattgcagctctgaagatgggtgcggcactgtccaatgggatagacatagaccctcaagctgtaacctctgcttgtgaaaatatgatgttgaatggtatagattccaacaaaatgcttgtttacttggtaccaactaatgctcagtctgcatgctttccaagtaatattgacaaatcagaagagaacaggcccactggtaaccttgagttgaagtcgtcaaaaggatcatatgacattgttgccgcaaatatactcctgaatcccctgctggagctggttgaggacattgttggttatgcaaaatctggtggaatagttgctgtctcagggatattaagtgaacaggtgccgaaagttgaagaagcttactccagatacttggagaacatctcagtgtcagaaattgatggatgggcctgccttcggggaaacaggagagcatag

SEQ ID NO: 13416 - DNA, 1311 bp, Oryza sativa
  Clone ID: TFbOSC400351j.C1.o25.fg
atggaggcgctctcccggaccgagcgtgtaggaggaggaggtggagccatggttgaagtggccttcgcttcgtccgccggatcctccgccgcggccccgcgccgccttcgtggggagctcgtcgtcagggacgctattccgtatgccggggtggctcctccgccgcccgcgctgccgctgccgcagccgcagctgcagccgcaggtgcaggctacgacgagtgggggcggcggcggggggaagattagccccgcggtgctgttcatcatcgtgattctcgcggtggtgttcttcatctccggcttgctccacctcctggtgcggctactcatgaagaagcagcatcgccgcggaggaggagggggtgcggcggccggggtgtcgcggtcggccgccggggatgacgcggggggaggaggggacgcggcgctgcagcggcagctgcagcagctgttccaccttcacgactccgggctggaccaggcgttcatcgacgcgctgccggtgttcgcctaccgggagatcgtcgtgggcggcggcggcgacggcgacaaggagcccttcgactgcgcggtgtgcctgtgcgagttcgacgccgaggaccgcctccggctgctgccgctgtgcgggcacgccttccacctgcattgcatcgacacatggctgctgtccaactccacctgcccgctctgtcgcggggtgctctttgtccctgggctcacggagaacaatccgatgtttgatttcgatgaggggttggaagaagggaggctgtctgaagattgcgataacggattcggatatcccgggcacaaggctacggaggggatgcagacgccagggactgagaagagggtgttccctgtgaggcttgggaagttcaagaatgtcgggacccagggcgctgtcgaaggcggtggcatcggcaatgccaatggtgctgtcttgaggagagaggaaggggagagcagcagcagcagcttggatgcaaggagatgcttctcaatggggacttaccagtatgttctagggacctcagagctcagggtgtctctccagccagaccgaattagaaatggcggcggcggtgtgacgagggcaaggccgacagggttaagctctgtcaatgctgagatcatggaggggaagaagatatgcgcacggaacaaaggggagagcttctctgtgtcgaagatttggcagtggtctaatctgaagggcaagctacctactggctcagatgaatgttcggaagcagggagccttccatggatgaagagaggtggcattggggatacatcaaatatgtga

SEQ ID NO: 13417 - DNA, 1281 bp, Oryza sativa
  Clone ID: TFbOSC401057j.C1.o12.fg
atggggaacatgggcagcagcggcggccaccgtcgccggaacaacggccacggccggcatcaccaccatggtcagcccaccgcgccgccgccgccgccgcagcagcagcaacaggaggtggcgccgaaccgctacgtgttcgcggcggcgagcccttacccgccgcagtacccgaatcccaacctgccgcagtactacccgcagtacgggaacttctacccgccgccgccgccatcgatgccagggccgctcccggcgccgtacgaccaccaccaccgtgggggtgggccagcacagccgccgccaccaccgccgccaccccagccgatccatgccgcaggggagttcccgcctgctatgctgcaacagcatccccactaccatggctggggtggaaacttctcgtatggtccacctacccagccgccggcgccggcgccgccgtatgttgagcaccagaaggctgtcaccatccgtaacgatgtgaatctcaagaaggagactctccgggttgagcctgatgacgagtgccctggacgattcctcatcaccttcacctttgatgccaccgtcgctggaaggagcatgactgtttacttctttgcaaaggaggagctgaactgtaaccttacagcaacgaaagaagatttactcaagccagtcactgtaacatttaaagagggtcttggtcaaaaatttaggcaaccttcagggacaggaattgacttctcgttgtttgaagatgctgaattatttaaggagggagagatggatgtatatccacttgcagtgaaggctgaaacaacattctcaattggtcaattctcagaaggggaagaacaaaagtcacaaactccaaattcacagatcacccaggctgtatttgagaggaaggagaatggggattaccatgttcgtgttgttaagcagatcctttgggtcaatggcacgagatatgagttgcaggagatttatggaattggaaactctgttgaaggtgacaccgaagggaatgatcctggcaaagagtgtgttatctgcctatcggagccaagggatacaactgtcctcccatgtagacatatgtgtatgtgcagcgagtgcgcaaaggttctgaggtaccagaccaaccgatgtcccatctgcaggcaacctgtggagcgtttgctcgagatcaaagtcaacaacaaaggtgaagagcaacagcagcagcagataccacaaccaccaccacctccttcaaccgcgcctccgcaccaacagcaagagtcgcaagcgtga

SEQ ID NO: 13418 - DNA, 402 bp, Oryza sativa
  Clone ID: TFbOSC401965j.C1.o31.fg
atggtggtggtggtgagccatgtcatggcgctcctgtcgtcggcgctgtccgggaagaaggcggcggcggaaggtgacggcgacgacgacggagggcagtgccggtgctggcgggacggcgacggcgtcggcggcgggcaggcggcggcggcggggtgctgcgtgtgcatatcggggttcagggacggggaggaggtgcggcggctgccgtgcgggcacgcgttccaccgggactgcgtcgaccggtggctggcgctctactgccggcggcggacgtgcccgctctgccgcctccacgtcggcggcgccgtggtggccgccgccgtggccgggctcgacgagctccagctcggcgacgacctcgtcatctggttctcctccctcttcgtcgccggtttctag

SEQ ID NO: 13419 - DNA, 513 bp, Oryza sativa
  Clone ID: TFbOSC20545j.C1.o13.fg
atgtctctcccgggggtgagcgcgtcgacgttcaagtcgccggtgttcatcggcctcctggccgtcatgtgcgtcgccgtcgtgctcctgctgcaccactgcgtcctcgtcaccttctgcgacaccaggaggcgccgtcgacgccgacgccgccggggcacctccacgcagcagcagcacgtgcagcagggggaggacgacgacgacgacgacgacgaggacgacatgatgagctcgtcgtcgcaggcgaagctggtggtgtgcccgtacaagaaggcggaggagtggggcgaggcgatgtgcccggtgtgcctgtcggagttcggcgacggcgaggcggtgcgcgtgctgccggagtgcatgcactacttccacgtggactgcatcggcacctggctccgcgccaacaccagctgcccgctctgccgcgccgacaccacgcccagctccggcgatctccaccaccacctctccatctccgtctccctagaagaaatcctagtgcgcacctag

SEQ ID NO: 13420 - DNA, 492 bp, Oryza sativa
  Clone ID: TFbOSC900108j.C1.o13.fg
atggacgacgacggcgactggatcacagcgaggtacctcctctcgtcgatcctcgggcggaacccgctcgtcgtcgattacgtggacgaggagtccttccccgtcgaggaccctcccccggtggccggtggcgcccgtggagggaggcaagcggtggtgtcgcagccgccggtggtgcgcgcgacggcgggcgtggccgggacggtgtgctcggtgtgcacggaggagatcgcggtggcggacgccgtggtgcgtctcccctgcgcgcactggtaccacgccggctgcatctccccgtggctcggaatccggagcacatgccccatgtgccgcgccgagctgccggccagcgacgacgccgccgaggaaggcggtggtgccggccgggagaagccgccgcgcgcgggccgcgccgggactagcgccggcggcggtgtcaggcgtgacgcgtcgtatgagctcctcgccggcggcggcgtcttgtctggctga

SEQ ID NO: 13421 - DNA, 1242 bp, Oryza sativa
  Clone ID: TFbOSC412800j.C1.o2.fg
atggggtcgccgcgaggacgccgccgcggcgacaatggccgcctcctcctcctcgccgccgccgccgtcgtcattgcctcgctggtcggcggcggcgcggcgcagccgacgacgtccgggcccggcccgaactacttcaaccccaagagcttcaacccgtccatggccgtcgtgatcgtggtcttggtcaccgccttcttcttcctcgggttcttctcgatctacatccggcgatgcgccggcgggccgttgggtgggcccggggggtatggcgtcggcggcggcggcggtggacgtgtgggtggtgggttcacgtttgcggcggcgcggtcgaggagggtgagggggcttgaccccgccgtgctgggcgcgttcccgaccatggcgtacgccgacgtgaaggcgcacaaggccggcaagggcgcgctcgagtgcgccgtgtgcctcagcgagttcgacgacgacgagacgctccggctgctgcccaggtgctcccacgcgttccacgccgactgcatcgacgcgtggctggcgtcccacgtcacgtgccccgtctgccgcgccaacctcgccttcgacgccggcgtcccgccgccgccgctggcgccgccgcatgcgttgaccaccgggcaagatgttgcggctgcgccgccgcagccggcggcgccagagcaggtgacggtggacgtcgtcgtcgcggatgccgaggagacggaggagaggatcaggagggaggaggcggccgagctgatgcggatcggaagcgtgaagcgcgcgctgcggagcaagtccggccgccggccgccgcagttcccgcggtcgcacaccacggggcactcgctcgccgccgccgccgccgtgcccgccaccgccgacgacgccgcggagcggtacacgctgaggctccccgatcacgtgctccgggaaatcgtcacctcggcgaggctacgccgcacgacgagcctccaatcgttccgcaccaccgccgccgccggcggcggcgcccgcgccgggaggagcgtccggctcggccagtccgggaggtggtccaacgtgtcgtcgctgatgcgcacgttctcggccaggctgccggcgtggggctccgctcgacgcggcgccgaagccgactctccggggaaggacggcgccaaggtcgccggcgactgcaccgcctccgtggagcaacactgcgacggcggcggcggcggcgcgtgcccacgtccacttggtgaccatgtatga

SEQ ID NO: 13422 - DNA, 549 bp, Oryza sativa
  Clone ID: TFbOSC423581j.C1.o8.fg
atgagcgcggggagcccatcgccgggtggcggcgatggcggcggcggcggcgggagtatatttgggtcgggtggcatcggcgggttcggctacggcgtcggcgcctccgtcggcgtgctcctcgtcgtctccaccgtcgcgctcgccatctacttctgcagccgcacgtccatgccggtggccgccgccgccgccggccgcccgccatctccgcctcgaccacgcgacgacggcgacgtcgagaccggcaccggcatcgacgacgcgacgctggaggcgttcccggaggtggtctacggcgaggcgaggaaggctcgcggcggcgcggcggcgacgcagacgtgctgccccgtgtgcctggagaactacggcgacggcgacgtgctccgcgcgctgccggactgcggccacctgttccaccgcgagtgcgtggacccgtggctccggcagcggccgacgtgccccgtctgccggacgtcgccgctgccgagccccatgccgacgccgctcgccgaggtgacgccgctggctctcgtcaggccgtcgtga

SEQ ID NO: 13423 - DNA, 1731 bp, Oryza sativa
  Clone ID: TFbOSC401769j.C1.o7.fg
atggaatggggagacacagcaggatggctagcggaagaagataatgccatcgaaccatcgctgagcggcggcggcgggcgagtgcagggtacacggatcgcgctcggccaggctgcatccggagctgtgtgtctcggcgcaggaaaagatcgcgtcccggaggcctacgtcgtcgtcgtccatggaagaagaaggggaagaaggcttcgggtaagggcaatgttgaagttgaacaatgggcgaaccgcggtctcgccgctgcggggctctggagccgtgggggcagaggcgtacctggaaggaatcgactcctcccgctgggcgacggcggtggcggcggcggcctcgatggggacggtcagcaggttgtctttgaaacatttactcaggtgttttgacttctactctattgataggaagttttgcaacggtaccaacctcaatacactgtatcagtaccactggtctatgagactctctacaggttcttggcacagttggtacccagtaaagcacacggaaatcaaggtagtgagcatagagaatagtgaggttctcgcagatggttcaaagggggttgtgaaagtcagaggacctcaagtgatgaagggatattacaaggatcattttttccagtttactgatgccaagatgatgggttgctccttccaaatcagccctattctaattgttaacgaatcatttacggtggataatggtttgctaacatccactttgaaaataaggagggacaagtttcgctcagcaaatgaaacagtagatcacttgtttgtgtcttgtccactggctagatttgcttgcaatgtgattgcaagtgcttttggacttgaaaagatcaatagcattcaacacttgttggaagcttggttaaatgaatttgacaaaaagaagaaacaactagttgcagtggggattgcagccacactaggtcggtggaaggccaaagaagtctacaatgtgggttcgacacttcgacttgctaaagcaggttgcaaaagagattatataattccaagtatggctggaactttgatagaagacggctggagcttgtgggcatatattctgccgtttatgcctggcgcattacatgtctcgaggacctgcaatcttattggttgcgtgatttcaatcctgcaccctggtaagggaaatgcagatgaagttgacgggatcagatcggaagatgtggcttgtctcatttgccaggaacttttgtttgacccatcggtcctgaattgtggccatgtttactgcatgccatgtttaacatctgtgggtggagaggaacttgaatgccaattttgtggagctccacatcccgctgaacctacagtatgctcaaatctgaagaactttctgaaacatcgcttcgaagaactgtataactcaaggcaagagaaaagttcaggtgttccaagcaggaaggaaggcactcgcaaagggaaaccttcagagatattgcatacccacgttggggtgggctgtgatggttgcggggtcttcccaatccaagggagaagatactcatgcaaggagtgtgaggcaccaggtttagatctgtgcgagaaatgcttcatgacaggatctactgcagagggacgctttgatcagaagcatactgcagatcatgacatggaactggatgactcattccttttccccaacttagtggattacatggatgacctatatatcgatatgacttga

SEQ ID NO: 13424 - DNA, 942 bp, Oryza sativa
  Clone ID: TFbOSC400772j.C1.o73.fg
atgggcaacatcgcgagcagcggcggcgctagcccacgtccgccgccgccgcatctcgaagcctatagacacggggtgccgcccccgtactaccacagctaccctcgtccgccccccggcgccgccgcgccgccgccggtgccggtgcctgcgcacgtggagcggcacagggccgtggcggtcagcgtcggcgtcaacgtcaagggggacaccctgcggctggtgcccgacgacgacgacgacgatggccgcagcctactcctcgccttctccttcgacgccgatggccccggaagcataactgtctgcttctttgcacaagaagataagtgtgccttgaagaccgcaaaggaaaatttgcttcaacctgtgaccgtgccttttaaggaaggtcgaggtcaggagttcaagcaaccaagtgggtcgggaatcgatgtctctcgttttgaggaatctgagctaactaatgttggggaaggtggtgtattccctgtagcattcaaagtacaaatggatgtgtcaggcaaccaagaatcagaaggggcacatgagaccgaacaatcgaaatatcttgttaaatatgctatatttgtgaagaaagacaatgctgaatatggagttcatgttgtgcagcagatcctttgggtaaatggaatcagatatgtcttgcaggaaatatatggtattgggaacacagctgataagaatgctcatgaggatgattccgggaaagaatgtgtggtttgcctttctgaaccaagagatactgctgttcttccatgcaggcatatgtgcctgtgcagggagtgtgctcaagttttaaaatatcagaccaacaaatgcccaatatgcaggcaacctgttgagggccttcgcgagatagaggttgataacaaaccgattccccaacaaggatctcagcagttaacagcacctcaataa

SEQ ID NO: 13425 - DNA, 912 bp, Oryza sativa
  Clone ID: TFbOSC400964j.C1.o102.fg
atgacgctctcggagcagctgtccgcgcccgaccaggccatccgcgacttcctcaagatcccacacgacggcctcggcggcggcgacggcgagggagggaggatccccgccgccgcgggcgcctccggtggcggcggtggcgtcggtggcatgatcaactggaagccgctgcgtgaccggctccggctacgccgcgccgcgagcgcgtggatgtccgcgtcgcccaagcccgccgcgtcgaacagcggcggcggaggcggcggcggcgcgacgctgagcagcagcaacagcggcagcaaccacagcaacaagtacaactactcccccggcgaggccgcggcggcgttctcgcgcaccttctcccgcacgcggtcgctccgcccgacgccgaccttctcgcgcgccacctccacccgcctcggagccacagccttctccagcggctccaggcgcgccgcggtcgacggcggcggccacgccaatgaggacgacgacgaggaccacaccgacgacgacgacgacgacgacgaagaggagcaaggcaaggacgacgcgcccgcggcgcagatgtcgctgatggcgctactggagcaatcggacagccagtgggactcggaggacgaggacgaccaaggccacggcggtggcggcggcggcgggggcaacggcggcggcggcggcggcggcggcgcgcgcaagaacggcgacggcgacgacgacgaggacgacggcgaggggcgggaggaggagatggtgcacgtgtgctgcgtgtgcatggtgcgccacaagggcgccgccttcatcccgtgcggccacaccttctgccgcctctgctcccgcgagctctgggtcagccgcggcaactgccctctctgcaacggtttcatccaagaaatcctcgacatcttctaa

SEQ ID NO: 13426 - DNA, 1047 bp, Oryza sativa
  Clone ID: TFbOSC416024j.C1.o2.fg
atgggcgtcgccgccgccaacgtcgccgccttcgttttgctggccatcgcgcccgtggccgccgcgccgtcgtcgccgcctcgatctggcggcgactccctgagtttctccgacgtgatcagcatctccttcttcatggccgtcttcttccccgtgttcatcgtcctcctcgcgttcgcgtgcctccgcctgttccggccgctcgacgacgacgacggcgagcccgcgctggcggacacgtcgtcgtcggagtggtcccgccgggggggagggggcggcaacagggcggggctcgacgccgcggagatcgcggcgctgccgctggtgtcgtaccgcgacgccaggcggcaccggatcggggacgcgcggggcgacccgctggagtgcgcggtgtgcctcctcgagttcgaagacgacgacgccctccgcctcctcccggcgtgcccgcacgcgttccatcccgagtgcatcggcctctggctcgagaagcacgtcacctgcccgctctgccgcgccaacgtcctcgacgcgccgccgccgccgccccctcccccgccttcgctggagcaggacacggcgtcgccgccgccggctcacgagacggtggtggtgatcggcgacgccggcgccagcgaggaggcggaagcggaagagaggatcaggatccagtgcctcgcgggggtccgtcgcgcggcggggcggcaggctctcccgcggtcgaactcgacggggcacgagcgcggcggcggcgggatggagcggttcgcgctgcggctgccggagcacgtccgcctcgagatcctcatgtcgcacaggctgaggcacgtgacgagcgcggtggcgtccgtgcgcgtcagggaggggagcgcccacgacgccggcgccgtgcggaacgccgtggcgaggctcctgtcgctgttcgtgcccggagccgggtggaagggagacgacgagggcaagtccagcaaggcggcggaagggtcgtctcgccggcggcgcgacgagtcggcgaggggaggagtcggagaagagaagaggagcgagtaa

SEQ ID NO: 13427 - DNA, 732 bp, Oryza sativa
  Clone ID: TFbOSC900160j.C1.o18.fg
atgagcgaggagcagggattgattcattgtgctgcgctgttgctactgctgctgctggaacacgttggagatgcagccgggagggctaatgctatccagaggaactatggtggagcatgtgtgcagatgaggttgtcgtgcagctcactggcgccattctttctttacctcatccagtggctggattgtggctgctgttatgctcttcccagttatctaggcctttttcacattctcatttgcaaggtttatgcagatggagatagctcagtatcaacgtatgaaaggcgtgcaagccttagagaattctatgccttaaacaatctctgccttccagcgatcatctaccctatccttcaacagcttgagggtagtttgattgagagggacctgaaagggaaagggcgatgtaaagacatagtgagtaggaagcggctcgaagattggaggaagctttgtaacaaggatgtggaaagggaggatgaatgtgggatttgcatggagacatgcaccaagatggttctgcctaattgcagtcatgcaatgtgcataaaatgctacagggactggtatagaagatcagagtcttgccctttctgccgaggaagccttaaacgaattcgctcaagagacctgtgggtgctcacaaattacaatgatgtggttgatcctgtaactctagaaagagaaaatgtgaagttcattgtattgctcatggtctctttgttatga

SEQ ID NO: 13428 - DNA, 504 bp, Oryza sativa
  Clone ID: TFbOSC400184j.C1.o4.fg
atgagtatgccgccgccggtgccgcaggagaaccagtccgttggcaaagggacggccatcttcagctacacctgcgtcggcctcacgggcgtcgcgctcgtcgccgtcgtcgtcttctactgcaaccgccacgtccggaggcgtgcgccagtcgtagccgccgagggcgccggcggcgccggcgggcgagaggacgacgtactgcgtggcgtcgctgacgtggcggccaagatcccggagttcgcgtacgcggggtcggcgaggcacggcggcggcggcgagtgctcggtgtgcctcggcgcggtgcagggcggcgaggcggtgcggcggctgccggcgtgcaagcacctgtaccacgtggagtgcatcgacatgtggctggcctcgcacgccacgtgcccgctctgccggacggaggtcgagccgccgccgggggacggcggcggccgacctgcgccggcggcagatgagtcgtcgccgacggaggcgctgccaccggtgtag

SEQ ID NO: 13429 - DNA, 1203 bp, Oryza sativa
  Clone ID: TFbOSC900298j.C1.o28.gm
atgacgagagcaagccgagcgtcgctgctactgttttgcttcggcgggggagatgatgattacgagtgccgggcgtgctacggggtctccgtggcgtgcgtgtcgctgctcctgttctgcgtgctcgcggcgtcggtcagcgtcaccaaggcctgcgccgtggcggggctcgccgtgctgctgttcggcgtgatcgggtggttcgtgccgctgtgcggcgcggggggcccgcccgcgcgcgccggcgccgccgcggggggcggggggcggggagcgggcgccgcgggggtgacgcggtgcgcgtgccggctcgtcggcgcggcgctgatcgccacgctgccggcgttcgtgttcgagggccccgcggagggcggcgccggcggaggcggcgggagcaagcacggcggcagcgtgctgtgcgcggtgtgcctggaggacgtggcgcgcggcgagacgccgcgaatacctcgggccagaaaccttaaaaccggccgcgccgcggggccgacgccgacgccgagagcgcgcacccggcgcgccacgaccgggctgcagatgtttaacggcgaacggcgcccggcggcgagccagcgcggcggggatggtgggtacctcgcgtgctactccgtcgtcatggtctgcgcgtcgctgctgctgctgtcggtgctcgccgccacggtgagcatcgccaaggcgtgcgtgttcgccgcggcggccgcggtgctgttctgcgccgtcggctgcgtctcgcggtggtgcggggatgccggcggggctccggcggcgctgccgacgacagcagcggcggcggaggaggcgcgggcgagggcgcccgcggcggcggcgtgcgcgacgtgcgggctcgtcggcgcggcgatcgacgcgctcccggcgttcgcgtacgcgcgccctgcggccgacgacggcggcggcggcggaagcaagtcggggaggtgcgcgctgtgctcggtgtgcctggaggacgtccaggccggcgagatggtgcggcagctgccggcgtgcaggcacctgttccacgtgggctgcatcgacatgtggctgcactcgcactccacgtgcccgctctgccggtgcaacgtctcgccgccggcgaccatcgtggtgaaagccacagccacgtcgacggccaccgccgcggcggcggcgcagcagctaccggctgacacgttgccgccggtgtga

SEQ ID NO: 13430 - DNA, 426 bp, Oryza sativa
  Clone ID: TFbOSC932j.C1.o2.fg
atggacgcggaggatatcgtggactgtctcatgtggggcatcatctttttcttcctcctcgcctgcatcggcgtggccctctgcttcctcgccctcaccatcgccacggtggtcggactcatccgccgccgcaacgacgacgccaataacaagtacgacatgctgatcgagaggctgctgctacgacctaaagacgaccaagacaacgagcagtgcgtcatctgtctgtcggagagcgaggatgatgtcgacgacggcggcggcgagcgggggagatggaggatgctgccggggtgcgcgcacgcgtttcacaaggattgcgtcgtcaagtggctgcgcaaccgcacaacatgcccgctctgccgttctgacgtcgccgtcgccgccgcagatgacattattagcaccgcagataacatggtctga

SEQ ID NO: 13431 - DNA, 2160 bp, Oryza sativa
  Clone ID: TFbOSC20084j.C1.o3.fg
atggcggtggcgaagtgggagcgcgccaagcgcgcgcttgccaccaggctctgcgtccgcgcgccgagggtgcgggcggcggcggcggaggcggagggggagggggaggagggggaagggagggggaggtcggtggccgcctcgccgcccgcgcatgtggcctcctcgcggcggctgtcgaggtgcgggagcaggagctccacgaagatatgtgccatttgcctcggaggaatgtgttcaggcaatggccaagccttgttcaccgcggaatgctcccacaagttccacttccactgcatctcctccagcgttcgccacggcaacaccgtctgcccgatttgccgcgccgtgtggaaggagctgccgttccagggccctctccctgcagcagcagcagcagatgctagtcttcttggaacagctcgagtgaaccctcacccactggatgacaggcatcagcatcagcgaatggccgttgtccgcaggctgtctcgcggagacagcgtgacccggcaatggcagctcccgatctttcgtacgctggatggcggcattttcgatgacgatgaacagttggatcttcatcctgctgaagatgtggttggaactcaggatgttgattcgatcgtcgctgatgaaatggcgcctgcttctgttgggatcacgacgtacgctgcgttcccggcgatggaggagtctgtgatggttgaggagtttgcggtgttgatccacctgaaggctccgtcttctccggcgacggtgacctcccgcgcgcccatcgacctcgtcaccgtgctcgacgtgagctggagcatggccgggacgaagctggcgctgctgaagcgcgccatgagcttcgtgatccaggcgctcggccccggcgaccggctgtccgtcgtcacgttctcgtcgtcggcgaggaggctgttcccgctgaggaagatgacggagtccgggcggcagcgcgcgttgcagagggtgagctcgctcgtcgccgacggcggcaccaacatcgccgacgcgctgaggaaggcggcgagggtgatggaggacaggagggagaggaaccccgtgtgcagcatcgtcctcctctccgacggccgggacacctacaccgtcccggtgccgcgcggcggcggcggcggcggcgaccagccggactacgccgtgctcgtcccgagctcgctccttcccggtggcgggtcggcgcgccacgtgcaggtccacgccttcggcttcggcgccgaccacgactcgccggcgatgcactccatcgctgagatgtccggcggcacgttctcgttcatcgacgcggcgggctcgatccaggacgcgttcgcccagtgcatcggcggcctactcagcgtggtggcgcaggagctgcggctgagcgtcgagtgcggcgacgacggcgtgctgctgacctccgtcaggtcgggcggctacgcgagccacgtggacggcgacggccgcggcggcttcgtcgacgtcggcgacctctacgccgacgaggagagggacttcctcgtcaccgtgcgcgtcccggcggcgcgcggggtgtccgccctgatcacgccgagctgcacctaccggagcacggccaccatggagaccgtccgcgtcgggggcgacacggtgaccgtccctcgcacggtggacgcccccgtgggctacgacggcatgtcgccggaggtcgagcgggagctgcatcgcgtccaggccacggaggacatggccgccgcgcgcgccgccgcggagcggggcgacttcgagctggccgccgccatcctcgacgagcgccgcggcgtgctcgagtcgcgggcggacgacgacccgcagtccgtggcgctggcggcggagctgagggagatgcaggacagggtggagacgcggcagcggtacgaggagtccggccgcgcctacatgctcgccggcctgagctcccactcgtggcagcgcgccacggcgcgcggcgactcgacggagctcaccagcgtcatccatacctaccagacgcccttcatggtcgacatgctgcagcgctcgcagacgctccagccggaggtcgtcgtggcgatgagccgctcggcgccgctaccggcgccgtccctgtcgctgtcgccgccgccgccgccgtcgcagctgcggcgccgctcgtga

SEQ ID NO: 13432 - DNA, 1500 bp, Oryza sativa
  Clone ID: TFbOSC400622j.C1.o109.fg
atggaggaggccggcgacgaggagggagagcaggggcttcgcctcgggggagtgggggacggcgccgacggcgaggaggaggtggctcgaggagtggtggcgccgcaggtgctcgagctgagctcgtccagctcgggcgaggaggggggctcttgggaggaggaggagagccagggatctgtcgaggtgacgagaggcgggggtggagatcgcgaggctagggtttccgagagccgggacagcgcggaggtgaacggcggcgaggcggagagccagtcccttcccggctgccccatttgcatgaacgcgtggaccgcggatggcgcgcatcgcgtaagttgcattccttgtgggcatgtctatggcagatcttgcttagagagatggttactgcagtgtcggaagaaacctgcgacatgtccccaatgtggtaggaggtttaaactaaataacattatcaacctctatgcaccagagatttctgttccaaataatgatcttgaaaagcaagtattgtcattgagggagaaaaatgaatctcttgagaagcaaaatcaagaattggtccaggagataaatgagcacaagaggcagattatactgcagcaaaatttcataaatgaatcaagcttaaagagaaagaacgagtttttccttgatggagctcgagtcatgggcatagatgcatcgagccagattatactcacttctggcagggcacctggaattggtgctgaacatgtcctcacaaaggctcctggctggtcctgttcaggcgatcaaaatagtccgaatcacatatatgctggactacagaatggcatgctgttgacctttgatattcgccaaactgttgcaccgttgcattccatgatgggtctatctacacaccctgttcatacgatccactctgttgtagatggcggtggttccaggaaggtcatttctgcatcttccataggaccctgcatctgggatgttgacgggagcagaaacaggccagatttgctaaatggaatggaaaaccacggagtctgcatctctcttgcgtgcaatcctccatcaagtgatctcctagtggcttccttccggccaaaagttgagctgtccgacgacggcacatctcaagccggcaaatcacagtcaccgacaccctctgcatcagggaagctaggctgccatgcactcataaggaggacgagcaacacgtccttcgccagagaccaaatctgcagaggcaatgtgagtggattgcgaatgtccaaatccgcaatcatacccttcaccggaagaagcaatcagcaacatctcttcgcctatggcgacgagtcgctgcgcggagtccggacatggcggctgccttcactccagacgtttgctgatctcaggccacaccggcaaccgatccttgatctgaggtttgcagagagctcgtcgacaggggaaaggtaccttggatgcttgagcgaggacaggctgcaggttttcagagtaaggtag

SEQ ID NO: 13433 - DNA, 528 bp, Oryza sativa
  Clone ID: TFbOSC400283j.C1.o29.fg
atggacctcgtcggcgccatggcctcgctcgtcttccttcaccttctgtgtgcggggtggcggatgctgaggatgtggacggcggcggggtggccgtggccgtacctggcggcggggaccctggatcaggcgctgcgaccacagtgcaagctgtgtaaacagaagatgatggccggcgccgtggtccgcgcgctctcctgcgaccacgtcttccacaaggcctgcgtcgacgagcgcctccgcaaccgcaagcacggcatgagatgcagaatatgcaaccgtgtcgcccgctgcatgctgccgtggaaggcgtcgccggcgaacctgatagaccacaacgctcagaggtttcagcacatccgtgctcgcggcggcgtcaggacactggaccgggcgctgaacgacgcatgcccgatctgccagcacaggatggtggcccgcgacgatgtccgcacgctctccggtgggcatgacttccatgaggattgcgacatcgcgaagtggctccgcgacaacaagaaggcctga

SEQ ID NO: 13434 - DNA, 708 bp, Oryza sativa
  Clone ID: TFbOSC401583j.C1.o29.fg
atgggaggattttgctgttgcctctgcactgacgatttcgaggagtacgctcatccaaataaccctatctataggcaaggtgtatgcctaaggaattttttccacaacttttttggcgggtatactgccacattccagaggctcgaatctagacctagcaacccagctcaaggggctgctccattggcatccactaatccaagtaccaatataactgacaattcattatccgaaacttatcaccttgtgtccagacctccaccgtatgatactgatcctagatatgcccgtgttcaaagagagggtttggtatctaggcgtgaaaagtctataaatctaacacaagaagagtcactggctcttaggcgaaatggcagcagctctggcattgaacatttagctgctcagaagaaatggagcagcactgaacctgagggtgaatataaagtccatcgctctgaatccaccaagagtttatccgcaaaatcgtataacagcagttttgcagttgtcacttcagaagatgaagatgtctgccctacttgtctagaagaatacactccagacaatccgaagattatagctaaatgctcccatcattatcatcttagttgtatctacgaatggatggaaagaagtgatacttgtccgatttgtgggaagtggaaggcaaaagatctacagtgtgatatgctggagagtctgtaa

SEQ ID NO: 13435 - DNA, 669 bp, Oryza sativa
  Clone ID: TFbOSC415227j.C1.o3.fg
atggaggtggcgccggcggcggccatgacgagggcggaggaggagagtcgccgtcgcgcggcgacgcgcctccccaggctgctccgcggcgtcgtctccggcatgctcaccggtatattcgccgtcgctgggggcttgacgggggcggtcaccggagcattggccgggagagcctccgacggcggcgttctccggggagctgggctagggacatttgctggtgctgtcctctccattgagatccttgaggcctctcgcgcgtattggtgccaagatcgatcaagctcgcctggttcattgtccatgggtgattttgtaaagcagcttattcatgctcgttttgtgcaagagcagaatgaggcatcaggacatatcacatatcgttggcaggttggtattgcagacgttgtcaatggtgctgtacatgaaatcctaggagatgttccatccggagaagggctttcaaaatattctttaatgaaattgccataccatgtcgtgatagatcataataatggctcaattggggaaagtttgtcttgccctgtttgcctgcaggatgttgtggctggacagacggtgaggagattgccgaaatgctctcacactttccatcagccttgcgtggacaaatggctcgttggccatggctcgtgccctatgtattaa

SEQ ID NO: 13436 - DNA, 1047 bp, Oryza sativa
  Clone ID: TFbOSC401237j.C1.o13.fg
atggcctccgaggacggctgcggcggcggcaacccgccgggggacgcagcggccgcgccgccggtgtggaacgccgcacctgcggcgggagctggctgcggcgatctggaggaggacctccggttccagtgctgcgtctgcctggagcttctgtacaaaccagttgttattgaggatgagaagcgtgtggatacatattctccacaaatcattgagtttttaaactccaagagcaacaattgtgaaattgatggggagaatagacctgaagaaagtaatagtcgacctccacaagaagttacatctgatggcaacactatcaatgggcatccgaagaaagttaagctggaggacgtgtcatgtgctctttgtaaggagctgttgtatcaacctgctgttcttaattgtggtcatgtgtactgcatgtcctgtttgtcgtccttggatgatggtgcactcaaatgccaagtttgtggaggtcttcatccaggagattttcctaatgtttgcttggatttggaccattttatcgaagactattttccagcagaatatgacttaagacgagagaagattaagcttttgaagggtgaatgcaatcaaggatcatcttcaggtacttcatgcataaaagaaggcaggggtagaccaacaaataaggaaaaccgtgcacatcaggatgatgacttgtcagatgttcatattggggttggatgcgattcatgcgggatgtatccaatacgagggaagaggtacaaatgtaaggactgcactgaattaattggatttgacctctgcgaagaatgctacaatacaaaatcgaaacttccaggccggtttaatcagcatcatacccctgaccacaggatggaacttgatcattcagcactcttcaataggttgatgaggctacaagggatacacgaggagggcccaggagagataatcatagaaggtgcatttgttgctcctgacgctgtggtgcatataatagcagatgatcatgaggaaatcgaggataacggtgaggatgatcacttgctctag

SEQ ID NO: 13437 - DNA, 696 bp, Oryza sativa
  Clone ID: TFbOSC18908j.C1.o4.fg
atgggcgccaatgacggccacctcgacgccaccagcaacaacaggggcggcctgcacgagcagaccaccaccggctgcctccccgtcgaccagtcctgcttcgcgctctcccggctgtcgtaccgccgcagcagcagcagcaacccgcgcgcgtgctgctccaccacctcctacctcgaggtcctcgccatctccttggcctcgctgctcgtcatcgtgctcgtgctctgcgccatacggtgctaccgcatgcggcgcgcggtgaaccgggtcacggtggcagccgcgtcggcggcggcggcggcggcggcggccgggaacgtcaccaacaagaagcggccggcgccgggcctcggcgaggacgccatcgccgcgctgcccaagttcgagtaccgcggcacgggcgacgagtgcgaccggtgggagtgctcgatatgcctctgcgcggtggccgacggcgaggtggccaggcagctgcccaggtgcatgcacctcttccaccggggctgcgtcgacatgtggctcgtcgcgcacaccacctgccccgtgtgccgggcggaggtggtggtcaacaaaccgccggacgaggacgacggcaggtgcgcggagacgccggaggatgaggccgcgccgccggcgtcggcgctggagccggcgagattggagaatggcgagagggacttggaggcgcaatag

SEQ ID NO: 13438 - DNA, 558 bp, Oryza sativa
  Clone ID: TFbOSC404797j.C1.o3.fg
atggccacggcgaacggcgtcgacctcgcgacggcggggctcctgcggctgctggcgatggggatggggccgtccgtgcagattccgggagaaggcggggttccggtgatgatggtgcagcacatcatcatcggcgacgacggcggcgacctgttctccggcgggctcggcggcggcgtgccccccgcgtcgaaggcggcgatcgcctcgctgaaggaggtgaaggccggggaggacggcgaaggcggggactcgctgggcgactgcgcgatctgcctggacgccttcgccgccgggaaggagatgccgtgcgggcaccggttccacagcgagtgcctcgagcggtggctcggcgtccacgggagctgccccgtctgccgccgcgagctccccgcggcggaacaacaaccaccagaggagcagcagagcggcggcgcggacgccggcgagaggcggaggccgagggcggtggtggtgagctacgtggtgctcggagacggcggccgcggcggggagagaggggagccatggaacattaggatagaggacgtggattag

SEQ ID NO: 13439 - DNA, 507 bp, Oryza sativa
  Clone ID: TFbOSC926j.C1.o2.fg
atgcggcggctgggtgacgtcgtggaggcgcctgcgctggtgctgacgccggcctccatgcagcaggccggcgggagggggagctccggcgccttggacgccagcatggtcgtcatcctcgccgcgctgctctgcgtcgtcatctgcgccctcggcctcacctccctcatccgctgcgcgctccactgcgcccgcggcctctcccccaccacggcgacgccgacgccgtcggtgtcgacagctgccacggccgggctgaagaagacggagctgaggaggattccggtggaggtgtacggcgccaagcaggccggcgtccccgacggcgagtgcgccatctgcctgggcgacttcgccgacggcgacaaggtgcgcgtgctcccgaggtgccaccacggcttccacgtccgctgcatcgacacgtggctcgccgcgcacacgtcctgccctacttgccgggactccattctctccgtccatggagtcgtcgccggcggccaaacatag

SEQ ID NO: 13440 - DNA, 900 bp, Oryza sativa
  Clone ID: TFbOSC400397j.C1.o48.fg
atggcggaggaggcggcggcaggcgggctgtactactgccacatgtgcgcttcgacggtgagcgccgtggcggcggcggagggggaggtggagatcaagtgcccgtactgccacagcggcttcgtcgaggagatcgagtccgcgcgcggcgtcgccaccggcggcggcggcgcgatctcctccgtctgggcccccatcatcgacggcatggttggcggcggcggcggcgacgccgtccgccgccaccgccgcagccgtcgcctcgcggacgccgccggcgcggacgacggctactaccgcgacctggccctcctcgacttctccgagagccggcggcgcaccgccgcgctgctgctgctcatgcaggagtttcgggagcgccagctccagcgcctcgagtccgccaccgccacgatctccgccgccgcggccgaggccggcgccgtcgtcgggacctcgagagacgcggagggcgtggcgctggccgactacttcctcggccccggcctggacgccctgatgcagcgggtgggcgacggcgacgcggggcggcagggcacgctcccggccaagaaggaggccgtggagtccatgccgacggtggaggtggccgccgggggcgactgcgactccgcctgcgccgtctgcctcgaggactacgccgccggcgagcgcgccacggaaatgccgtgccggcacaggttccacgccaagtgcatcgtgccgtggctcaagatgcacagctcctgccccgtctgccgcttccagctccccaccgacgacgacgacgactcctccaagtccgcacgcggcggcgccgcccactccggcggcggccggcggttgtcccagccgtcgccggcgtcgacgggggaggcctgggcaggttgccggccgtga

SEQ ID NO: 13441 - DNA, 538 bp, Oryza sativa
  Clone ID: TFbOSC401498j.C1.o12.gp
atagtttaatttgtttttttataacttgtaaaagttaaaatttaatttacatttttataacgatataacacatgttaatacatcatctcaaatatttttaaattttttcataactgtttgactaacatacgaacaaccagaaaacgtcccctccagttgaaaatccactgtccacgcgcccacacgaaacctagctaataaccatctatctttcggcgacgatctcccccgtggcggggctactactcctccctgccacggtggtctccacggccgccgccgccgccgccatcttccgctccccctccggcgcccggccaaccacgtcggcgcggcacacggggcaccaccggctcttcctcagccacgagtccacgcacggcgcgtggaagctgtgctcgcaccgcggcagccgccggcaccggtccccggcctccagctcctccaggcacaccgcgcagtccccgccgccgccgcccttgacgacgtcgtggcacggaagcgcgccatatctctttttgcggacaggccccgttcc

SEQ ID NO: 13442 - DNA, 567 bp, Oryza sativa
  Clone ID: TFbOSC402160j.C1.o21.fg
atggagacggaggaggacgaccatcgcctgcacccccgcacgcgcaccatcgccgacctgctcaaccagctcgaccagatccactccacctcggcgacaagaaccaccggcggcggcggcggcgtggcgcctgcctcggacgaggcgatcgaggcgctcaaggacgtcaccggcgacatcgatcagctaccggcggagtgcgcgatctgcctccacggtggcctggacgcggcggcggcgcccgcggggtggaaggagatgccgtgcgggcaccggttccacggcgggtgcctggagaagtggctgcgcgcgcacggcacctgccccatgtgccgccaccagatgccgaccactaccgcgccgccgccgcctgcagccgagcaggaggattatctggatggtgatgaggaggaggacgccggcgacgacgacgaggtggaggctggtgtggggccgctgccgttggagttgcgagtggtggtagcgcactcgagcggcggctatggaggagtggcggcgtcggcttcgactacgaggcggctccttgcatggagcacgacaatctaa

SEQ ID NO: 13443 - DNA, 525 bp, Oryza sativa
  Clone ID: TFbOSC406125j.C1.o2.fg
atgggttcgcgttccggctcgacgacgacgagtatgccgccggtgccgcaggagaaccagtccgtgggcaaagggacggccatcttcagctacacctgcgtcggcctcacgggcgtcgcgctcgtcgccgtcgtcgccttctactgcaaccgccacgtccggaggcgcgcgcctgtggtagccgccgagggcgccggcagcgtcggtgggcgagaagacgacgggcgcggcgtcgctgacgtggcggccaagatcccggagttcgcgtacgcggggtcggcgaggcacggcggcggcggcgagtgctcggtgtgcctcggcgcggtgcagggcggcgaggcggtgcggcggctgccggcgtgcaagcacctgtaccacgtggagtgcatcgacatgtggctggcctcgcacgccacgtgcccaatctgccggacggaggtcgagccaccgccggaggacgacgacggccgacctgcgccggcggcagatgagtcgtcgccgacggaggcgctgccaccggtgtag

SEQ ID NO: 13444 - DNA, 522 bp, Oryza sativa
  Clone ID: TFbOSC412156j.C1.o1.fg
atggcgtcgccgtcgtcgtcgtcggtgatctccatcttcctcctggtggccggcgtcgcgctgatgctggtcgtccacatcgtcgtcgtcttctgggcgctgcggcgcgggcgcggggcgtcgcgcggcgaggaggaggcggcgcccgggcgcgcggcggaggggaacggcggtggagcccgaggaggaggagggaagggcctgtccgccgacgagatcggcgcgctgccgtgccacgacgtcgtcaagggcggcggcggcggggactgcgcggtgtgcctggaggagctggaggccggggaccggtgccggcggctgccgcggtgcgagcacagcttccacgcgccgtgcgtggactcgtggctgaggaagagccggtggtgccccgtgtgccgcgccgacgtggttgcccgggcgccggagggggagcggaagatggcggcggcggcggcggccgtgaagaccaccgtggcagggaggagtagtagccccgccacgggggagatcgtcgccgaaagatag

SEQ ID NO: 13445 - DNA, 714 bp, Oryza sativa
  Clone ID: TFbOSC412156j.C1.o1.gp
atagtttaatttgtttttttataacttgtaaaagttaaaatttaatttacatttttataacgatataacacatgttaatacatcatctcaaatatttttaaattttttcataactgtttgactaacatacgaacaaccagaaaacgtcccctccagttgaaaatccactgtccacgcgcccacacgaaacctagctaataaccatctatctttcggcgacgatctcccccgtggcggggctactactcctccctgccacggtggtcttcacggccgccgccgccgccgccatcttccgctccccctccggcgcccgggcaaccacgtcggcgcggcacacggggcaccaccggctcttcctcagccacgagtccacgcacggcgcgtggaagctgtgctcgcaccgcggcagccgccggcaccggtccccggcctccagctcctccaggcacaccgcgcagtccccgccgccgccgcccttgacgacgtcgtggcacggcagcgcgccgatctcgtcggcggacaggcccttccctcctcctcctcgggctccaccgccgttcccctccgccgcgcgcccgggcgccgcctcctcctcgccgcgcgacgccccgcgcccgcgccgcagcgcccagaagacgacgacgatgtggacgaccagcatcagcgcgacgccggccaccaggaggaagatggagatcaccgacgacgacg

SEQ ID NO: 13446 - DNA, 2481 bp, Oryza sativa
  Clone ID: TFbOSC400860j.C1.o53.gm
atggcaggatcgactctgttccgatggctcttcttactgctggccatcgtgtcgcttgccgcggcggatagcggcagcggcgaagcagagaccaccgtccccggacaaattcgcctgagctgcggcgcgtctgcctccgccaccgacggggacggccgggcgtgggacggtgacgccgtgtccacgttcgcgccgtcggtgaccggcgtcgcggccgacgcgtcgtaccaggacccctcgctgccttcccccgtgccgtacatgacggcgcgcgtgttcagctccagctacacctactccttccccgtcaagcccggccgcgtgttcctccgtctctacttctacccgtccgcctacggcaacctcggcgccgccgccgccgccgcggacgcgctgttcggcgtcaccgcgggcggcatcacgctcctccgcgacttcaacgcgtcgcagaccgcgctcgcggtcggctacgcgtacatcgtccgcgagttctcgctgaacgtcagctccggcgccacgagcctcaacgtcaccttcgccccctcgccgcgtggcgcccccggccacgggtcccaccactacgcgttcgtcaacggcatcgaggtcgtgcccacgccggacatgttcacgacgccggtgcccgccttcgccaacggcgggcgcccgaacccgatgcccctccgcgccgacacggcgttccagacgatgtaccgcctcaacgtcggcggcgaggccatcaccccacgggacgacgccggcggtttctaccgcacgtgggacaacgacgcgccctacatcttcggcgcggccttcggtgtgaccttcgcgaaggacagcaacgtcagcgtccggtacaacccgccgtcggtgccgaagtacgccgcaccggaggacgtgtacgcgacggcgaggtcgatgggcccgaacgcgcagatcaacctcaactacaacctcacctggatcctccccgtcgacgccggcttctactacctcctcaggttccacttctgcgagatccagtacccgataacgaaggtgaaccagagatcattcttcatctacatcaacaaccagacggcgcagtctcagatggacgtgatagtgtggagcggagggatcgggagggcggtgtacacggattacctcgtcgtcacggcgggctccggccagatggatctgctggtggcgctgcacccggacctcagctccaggccggagtacttcgacgccatactcaacggcctcgaggtgttcaagctccacaagtacggaacccacagccttgccgggccaaacccgccgatcccgctgaagcaggtattcagcacggtggacggaagcagatcggagtccaggaagaagagcgtcgtctgcgccgccgtcggcggtgtggccgccggttgcttccttgcggtgttggttgccttcgccgtcgcgtgggctgttcgcaggaggcagaggaaggccgcggcggagaaaccggctgatgggcttcttggcccaacaaaaggctccgccctttatgacccgtttggtgaaaggtacagcatgaacactgcggtacaggggtcgtcgccgccgccgccgccgccgccgccgctcccacggacgcgccgtgaggtgcacaacgtcgaggcggcggacgcttctccggtgcggcgtaatggggtttgtgaggggaagaaggaggtggtgggcgacgagaagcagcggctgatcgagtcgctgccgctgttcacgatggcgtcgtcgctggcggcgctccccaagagctcaccggactgcgccgtctgcctgtcgccgttcacgctggacgccgagctgcggctgctcccggcgtgccgccacgcgttccacgccgcctgcgtcgacgcgtggctccgcaccaccccgtcctgcccgctctgccgcgccaccgtcacgctcccgcacccctcgatctccgccatcctcgccgccgagcagccgccgccgccggagccgaggagcagggaccgttccaggagcttccgcgtcgagatgggcagcgtcagcaaccgcagcgcgtcgacggccaccggcggcaacgcccgccccacctactcgctcggcacgttcgactaccacatcgacgaggaggtcgaggccgtcgtctcccgcgccgcgcccatgacaaccaggagcgccgccgcagtcaaggaagacaagccagcagccgagcagtctccaccgcctcccggcgaggcggtggccgaagcggcgggcgcgacgcgcggctggctgcgggagtacgtggaacggctggccacctccgcgtcatccctatcgtccttctccgggcggtggagctcccggtggagccagagctaccagagccaccatagccacagccaggaggagccatggctgtgggacgcggaggcggtgaggatgtcgccgccggggacggaggaggaggagacggcgttcatggtgctgtaccggtggatcgcaggggcgtaa

SEQ ID NO: 13447 - DNA, 1080 bp, Oryza sativa
  Clone ID: TFbOSC400939j.C1.o46.fg
atggcgtccactctctcgtctccgtcgccgccgtctgccgatcccgtcaccggatcctccgacgccgcctcgtccttcctcccgtctctcctcatcatcgctgctcttcttgccttcgttctactagcgtcggtctcgatccacctacttctcagacttctgtccaggtcgtcgccgccgccgccgccgccgccgccgctcccacggacgcgccgtgaggtgcacaacgtcgaggcggcggacgcttctccggtgcggcgtaatggggtttgtgaggggaagaaggaggtggtgggcgacgagaagcagcggctgatcgagtcgctgccgctgttcacgatggcgtcgtcgctggcggcgctccccaagagctcaccggactgcgccgtctgcctgtcgccgttcacgctggacgccgagctgcggctgctcccggcgtgccgccacgcgttccacgccgcctgcgtcgacgcgtggctccgcaccaccccgtcctgcccgctctgccgcgccaccgtcacgctcccgcacccctcgatctccgccatcctcgccgccgagcagccgccgccgccggagccgaggagcagggaccgttccaggagcttccgcgtcgagatgggcagcgtcagcaaccgcagcgcgtcgacggccaccggcggcaacgcccgccccacctactcgctcggcacgttcgactaccacatcgacgaggaggtcgaggccgtcgtctcccgcgccgcgcccatgacaaccaggagcgccgccgcagtcaaggaagacaagccagcagccgagcagtctccaccgcctcccggcgaggcggtggccgaagcggcgggcgcgacgcgcggctggctgcgggagtacgtggaacggctggccacctccgcgtcatccctatcgtccttctccgggcggtggagctcccggtggagccagagctaccagagccaccatagccacagccaggaggagccatggctgtgggacgcggaggcggtgaggatgtcgccgccggggacggaggaggaggagacggcgttcatggtgctgtaccggtggatcgcaggggtataa

SEQ ID NO: 13448 - DNA, 1224 bp, Oryza sativa
  Clone ID: TFbOSC417199j.C1.o1.fg
atggctgtaatatgctttgaagaatctattcatctgttgctttgcttgattggtttcagaatcattgtctccatcaactggaagaggtatcgtctctgcgcccacccgttgcacatatggatcgtggttgactacaccaccgtcttcatcttccgccttctcatgttcgtcgataatggccttgccgccggcatgggattagcacttgacaatgtctacacatgtctatttgtaaaatttggtcatcttcgacatttccatttacccgaggaaggacaaaaatggggcttccttatatggctgcttttcagctactgtggtctcgcctgtattgcgtgtgtggctgttggaaagtggctaagccgaaggcatgctctccagcagagggcacaacagggaataccagtctctgaatatggggttttggttgacatgatccgtgtgcctgattgggcatttgaggccgttggcttggaaatgagaggaatgggccaagatactgcatatcatcctggtctttatttaacagctgcccaactagacaaaatttccatgtatttatttgctagcgatctcagagatgcaaagaagtctctgaagacttctggatttgtattaaggagcaaagtaacactgaaatccagtgtcattgagcagaatgattttaaattggtcctccttctgcagagagaggcagttgaggcactgattcaagaactcccgaagttcagactgaaagctgttcctacagactgcagtgagtgtccaatctgcctggaggaattccatgttggcaacgaggtccgtgggctcccgtgcgcgcacaatttccatgtggagtgcatcgaccagtggctccggctgaatgtcaagtgcccccgttgccggtgctccgtcttccccaacctcgacctgagcgcgctcaacaacctccggccatcctccgagccggaccggccgtcggccagcgaggtgacagcggcgacgatggcgcggtacgtgaggtcgtcgcagccggctgggcagagctacctgctgcggctgcaggggctgctgctgcggcaggtggtggttcggcacggcggcggcgacgacatggcgagcgccgagaacggcgcttctcatgtggccgccgcggtgaccgcgccggcgaccaccggcggcgtggagagcgagctgcctagcatagtggttgacggtgggcatcagctgccggatcgctga

SEQ ID NO: 13449 - DNA, 1164 bp, Oryza sativa
  Clone ID: TFbOSC419721j.C1.o4.fg
atggggacgcgcgagctcctcgtcgttcttgccgtcgtcgtcatggccgccgtcggcgccggcgcgcagtcttcttcggcgtcgccggcgccggcgacgtcgcaggcaccgacggtgcggcagcagacgccgttcgggcggaccatgtcgaccgtcatcacggtgtccatcagcgtgttcttcttcctgctcttcttctgcgcgtacatcaaccagtgtcgcctcgccgaggccggggacgccagggccgcggcggcggcggcggccggcgggggagccggaggagggccgtccaggagagggaagcgcgggctggacccggcggtggtggccacgttcccgatcgtgccgtacagggaggtggtgaagcacaagatcggcaagagcgtgctggagtgcgccgtgtgcctgacgtcgttcgacgacggcgacgacctccggctgctgccgcactgctcgcacgcgttccacccggagtgcatcgacccctggctggagtcccgggtcacgtgcccgctgtgccgcgccaacctcgagaagcctccgccgccgccgccgccgctgccggcggcggcggcggcgtccccttcgccggagcggtcgccgcggtgccagccttcgccgccgccgccgccgccgccgcacgccctggtgataccggtggaggacgaggaagacgacagcgacgaggacgacaggaaggaggaggccgtggagctcgagatgctgcgcagcgagcggcgcgccgcgaggctgccgaggtcgcactcgacggggcactcgctggtcgcgtcggcggccgccgccgccgagtccggcgaccacgagcggttcacgctgcggctgccgcagcacgtgcgggacgaggtgctccggtcgctccgcctccgccacgccgccagcctggtcaacctctcggacatgagctccgaggggagctcgaggggaggacggcgtgcattaggcctcgccttcggcaacggcggcgggagcagccacggcggccgccggtggcaggcgttcttggcgaggacggtgtcatgggcgcgaggcggaggcgacggctcggtgcgcaggggctgggacggctcgacgagaagaggaaaagatgacgccgagtcgagcagaaagggggcgacctcaccggcggccggccggccgtga

SEQ ID NO: 13450 - DNA, 885 bp, Oryza sativa
  Clone ID: TFbOSC401716j.C1.o124.gm
atggcggcagcgcaggacgcgtcgtcccaggcgttggggctccggtggcgctacggcgacgtcgacgacggcaacttcgcggtgcgcggccgcgcggtgccgctcctcgtggcgctcctcttcgtcctcgtctgcttcgtcgccgtctccctctacctccgctgggcgtgccactgccaccgctacggccgcgacacgacgccgatgcccgccaccaccagctccggcttctcctcgtcgcacgctgcggcgaccgcgccaggttcagcctcatcggtgaccggcctcgacgacgcgacgatagcgagcatgcccgtggcgctgtaccgggccgtggcgtcggctgcaggtgatggcgacgacggcggcgccgcgcagtgctcgatatgcctcggggagttcgaagagggcgagaaggtgaaggcgctgccgctgtgcgggcacgggttccacccggagtgcgtggacgcgtggctccgctcgcggccgagctgccctctgtgcaggagctcgcttctcccggccgcggccaccaccaaaccggacgtcgccgggagcgatgctgcggccggcggcggcgagcagcttcagggggcgttctctagattttgggacactggattagcttcaatattcatgctcctggccttctcctccaactccggcgacctcctcttcttctctgacgctggcgacactttagactccggtagaggaccctacagcgacgctggagctgtggtgttggaagagggcggtgggctgatgttggtggcggggcatctcgtcgttgacggcttggggaggcagtcggcggcacgatggggcggtggcggcaggggatcaggcatagcggagaaatgcgtgatggtggcggcgaaatga

SEQ ID NO: 13451 - DNA, 513 bp, Oryza sativa
  Clone ID: TFbOSC20545j.C1.o14.fg
atgtccaacaacaacggcaaccccgggtactacaacaacaggaacgccggcgatcagtcggactacaaggcgacgatcgccatcctgttcagcgtcttctttgtcgtcatcctcatcaggctcatccacttcatcatcaaccagtcaaacaaccgcgctccggcgaacggtggcgccgccgctactagcgacaggcggctgggaggcggcggcggcgtttcacgtgtgccggccagacttccccgtcagcgtccgggcggcgccggcgccggcaacggcaccgctatggcgtggcagccaccgccgtgcaccagcacgtaccggagggacgacgggtggaaggagacggcgtgcccggtgtgcctgtcggagttcgccgacggcgagctcatccggctgctgccggagtgcatgcactacttccacgccgcctgcatcgacgagtggctgcgcacgcgcgccacctgcccgctctgccgcgccgcgcccgccggcgatgtctccacggcgtga

SEQ ID NO: 13452 - DNA, 414 bp, Oryza sativa
  Clone ID: TFbOSC28130j.C1.o1.fg
atggttgatctgtcaggcctcgagatattcctcgccgtcgtcgcgctcatcgccgcgatctgtgccatctcctggaccgtgcgatgcttaatcggccggcggttcgaggtcgccaccggcgatcccaacggggagcgccaagggttgctgaacaaggaggaggtcgtcatcatcgacgtcgccgccgccacggaggcgaggggcgacgacgtggcgctctgcgcgatctgcaaggggaggctcgcggtcgcggtcgcggacggcgggggacagccgtgccggcggctgcggccgtgtgggcacgtctaccacgcggagtgcatcggcctgtggctgcagagggggacgacgtgcccggtgtgccgcgccgacgtcgttgcctcgcggaacgaaatcgtcggcgcgatggcgtga

SEQ ID NO: 13453 - DNA, 639 bp, Oryza sativa
  Clone ID: TFbOSC400203j.C1.o24.fg
atggggtgcccggtctgctgctactccgagctgctgctccccaagcagctgctccacctcctcctgctgctcggctacatccgccgtttcctcctctgggcgttccacgccgtcggcctcggggacctgctggatctcggggacgagcagcaggcggtgctgcaggaccacgcgcgcgagcaccgcgcgccggcgcaggcgctgccgccacagcagcagcaccgccgcgccgagttccggacggtgccggcgatggtcatcgaggaggttctgccggtggtgcggttcgacgagctggtggccgcggccccggcggtttgcggcggcggggactgcgcggtgtgcctcagcggcatcggcggcggcgacgaggtgcgcaggctcagcaattgccgccacgtgttccaccggggctgcctggaccgctggatggagcacgacgaccagcgcacctgcccgctctgccgcgcgccgctcatccccgacgagatggccagcgcgctctggggcgccgccggcgtgtccgacgcctccgacttcgacttctcctacttcggcgcgcccctcacgccgatgcccacgccgactctgctacggccgcacgagctgctgctcactggccttggcggctaccagtaa

SEQ ID NO: 13454 - DNA, 1082 bp, Oryza sativa
  Clone ID: TFbOSC400203j.C1.o25.gp
ggtccaaaatgccacagatggttgcatccaaaacgccaaactgaacaaatttaatcagcacaaagattcactacttctcaaacctggaagatggaatcttctgtacaaaaacaaaaacaaaaataaaaatctactaatcatctagccttttttggggggtttgctttactcatttttgcctatgtacagttgaaggcgcctcctgttcttggtcttccccgaacacgacgaccaattcagtcgttgtaaaaactgcgcattccgggtcgccggtgccctgctgtgcagtaggtggatattgccaactccgtgaaccaacagcggcggttcactggttactggtagccgccaaggccagtgagcagcagctcgtgcggccgtagcagagtcggcgtgggcatcggcgtgaggggcgcgccgaagtaggagaagtcgaagtcggaggcgtcggacacgccggcggcgccccagagcgcgctggccatctcgtcggggatgagcggcgcgcggcagagcgggcaggtgcgctggtcgtcgtgctccatccagcggtccaggcagccccggtggaacacgtggcggcaattgctgagcctgcgcacctcgtcgccgccgccgatgccgctgaggcacaccgcgcagtccccgccgccgcaaaccgccggggccgcggccaccagctcgtcgaaccgcaccaccggcagaacctcctcgatgaccatcgccggcaccgtccggaactcggcgcggcggtgctgctgctgtggcggcagcgcctgcgccggcgcgcggtgctcgcgcgcgtggtcctgcagcaccgcctgctgctcgtccccgagatccagcaggtccccgaggccgacggcgtggaacgcccagaggaggaaacggcggatgtagccgagcagcaggaggaggtggagcagctgcttggggagcagcagctcggagtagcagcagaccgggcaccccatcccgggcagacgcgaaggcgagaacgagaagggaaggctccgtcgggagaggtgcttcccgcgctcacacgacgtgtcgcgtggaggcggtgcgcctgatatgatgat

SEQ ID NO: 13455 - DNA, 1527 bp, Oryza sativa
  Clone ID: TFbOSC400099j.C1.o27.gm
atgctggcggtggtcggggcggcgctgctggtggtgctgtacgcgaggctggtgagccgggtgttcagggcggcgaggcggcggtggcggaggaggaggaggcggcggctgctcatgatcccgggctcccccgccgacgactcgttcgcgacgttcaccacctacgacaactactaccacaccttctcgccgtacggcctcgacgacgccgccatcaagtcgctgccgtcggcgcagtacctcaagtcgtcggcgatggcggcgcgcggcgggggcgggggaggcggagccgacaccgccgcgcgcgactgcgccgtgtgcctgctcgagttcgccgacggcgacgagctccgcgcgctgccgctctgcgcgcacgcgttccacgcggactgcatcgacgtctggctccgcgcgcacgcctcgtgcccgctctgccgcgccgccgtcgcgctcccgcccccggtcgcctccccgctccgcgccgcccgccgcgtgcgccccagcctcgacgacctcctcttcttccaccccgtcccgcaaccaccccacgccgccgccgacccctccgccgcgccggcggagatcaccccggcaagcccggaccacgtcggcccgagagacgatttcctcctcaagcgctcctactccttcggcttcgagcgccacctcctcgccgtggaggccccctccaccgcgtccccgccgtggcgctaccgcctcaacatcggcggcggcggcggcggcgcggacggcccaaaccgcggcggccgcagcagcttctggagcaagcgctggccatccccgttcggcggcggcggcggcgccgccgccgcctcccgcgtcttctccttccgctcctaccgctccgccgccgcgaaatcctccccgttctcccgccgccgcggcggcaccggccccggcggcgccaccgcccccggaggcgggttcttcatgtcgctcgcgtcagagccaccctccatcctcgccgcggcgaggcgcgccagcgccgccgctgccgcgtccagccggctccggtgcggcgaccccgaggccctcctctcgccggaccggctcagccgcgccaccctacaagtcaccgccccaccgcgagaggagggcgggcatggccttgccctgctcctatggctcccactgcgccgccctgcccttccccgccgtggtctccagggcggcctcctcgccgccaccgcgctcccgggggagaaggcccagcctaccacccgccggatgcttccacgccgcgccaagggacgccgctctggtgtccggctccgctgctggtggcgtgagcaggaggagtccattgtgacaaggaggaaagggttggtaggcacggatgaagatcactccgacaccttaatcgcgctgcagcatccaccagtttatacgctaggcactgacagcaccgaggactacctccatttcgatgttaaagatgctccttttgaggttcaccgtattgaccgtggtggggaggtgacatatcatggtcctggacaggcctag

SEQ ID NO: 13456 - DNA, 1167 bp, Oryza sativa
  Clone ID: TFbOSC900069j.C1.o6.gm
atgctggcggtggtcggggcggcgctgctggtggtgctgtacgcgaggctggtgagccgggtgttcagggcggcgaggcggcggtggcggaggaggaggaggcggcggctgctcatgatcccgggctcccccgccgacgactcgttcgcgacgttcaccacctacgacaactactaccacaccttctcgccgtacggcctcgacgacgccgccatcaagtcgctgccgtcggcgcagtacctcaagtcgtcggcgatggcggcgcgcggcgggggcgggggaggcggagccgacaccgccgcgcgcgactgcgccgtgtgcctgctcgagttcgccgacggcgacgagctccgcgcgctgccgctctgcgcgcacgcgttccacgcggactgcatcgacgtctggctccgcgcgcacgcctcgtgcccgctctgccgcgccgccgtcgcgctcccgcccccggtcgcctccccgctccgcgccgcccgccgcgtgcgccccagcctcgacgacctcctcttcttccaccccgtcccgcaaccaccccacgccgccgccgaccccctccgccgcgccggcggagatcaccccggcaagcccggaccacagccaccctccatcctcgccgcggcgaggcgcgccagcgccgccgctgccgcgtccagccggctccggtgcggcgaccccgaggccctcctctcgccggaccggctcagccgcgccaccctacaagtcaccgccccaccgcgagaggagggcgggcatggccttgccctgctcctatggctcccactgcgccgccctgcccttccccgccgtggtctccagggcggcctcctcgccgccaccgcgctcccgggggagaaggcccagcctaccacccgccggatgcttccacgccgcgccaagggacgccgctctggtgtccggctccgctgctggtggcgtgagcaggaggagtccattgtgacaaggaggaaagggttggtaggcacggatgaagatcactccgacaccttaatcgcgctgcagcatccaccagtttatacgctaggcactgacagcaccgaggactacctccatttcgatgttaaagatgctccttttgaggttcaccgtattgaccgtggtggggaggtgacatatcatggtcctggacaggcctag

SEQ ID NO: 13457 - DNA, 1140 bp, Oryza sativa
  Clone ID: TFbOSC900395j.C1.o11.fg
atggcgacgccacgatccccaagcccccgtggcgacgcgcgcctggactcggcaccgctcctcggtggcggcggcggcggtggcggccgtcgccacggtggcgcgctgcggcggccgtcgctccggggagcggctcggttcctgcgccggagcggtcgccgggcgatgcgcgagccgtccctgctggtgcgggaagcggcggcggatcagctggaggagcggcaggccgactgggcctactcccgccccgtggtggcgctcgacctcctgtggaacctcgccttcatcctcgttgccgccgccgtgctcgcgctgagccgcgaagagagcccgtccatgccgctccgcctctggatcgttgggtacgccgttcagtgcgtcctccacatggcctgcgtcgccatcgagtaccgtatgcgccgcggccagagcggtgaatcccccatggccgccgacgaggagacaggaaccgatggatcgtcgtcgtcaagtgacgaggacgccggcgagcgtgctccccgtggccgcaatggcgattatgttcgtattgcaaaacatctggagtctgctaatacaatgttctcctttatatggtggataatcggattttactgggtatctgctggtgggcaagttcttactcatgatgcacctcaactttactggctttgcatcgtctttctggcatttgatgttttctttgtcgtcttttgtgttgctttggcttgcatcattggaattgctgtttgttgctgcctcccatgtatcatagcaattttatatgctgtgtctgatcaggagggagcatcggaagatgatattcgccaaattccaagatacaaatttcggaggatggatgagcctgaaaagcaatctgtcaacatgactggatcttccggtggaataatgatagaatgtggcaccaaccaacctattgaaaaagtacttgcagctgaagatgcggagtgctgcatttgcctgtcagcgtatgatgatggtgcagagctgcgtgagctcccttgtgggcaccatttccactgtgtctgcattgataaatggctgcacatcaatgcgacttgtcccctatgcaagttcaatgttcgaaaaaacagtagcagcagtggtagtgaagaagtataa

SEQ ID NO: 13458 - DNA, 1113 bp, Oryza sativa
  Clone ID: TFbOSC400009j.C1.o30.fg
atgtcgaatccggccgcctactacgccgccgtcgcgcggaagcagtacttctgctaccaatgcaaccgcaccgtcctcctcccggcctccgccgccgccgccggggcgctctcctgcccggagtgccgcggggatttcatcgaggaggtcaacgtccccgcccccgccatcatccccttccccttcgccttccccccgatgatgcccaccgccacctccgcctccgccgccgccgccgccgcggcctcgccgacccagtcctcctcctcgtccgccgccacgtcgccatccagcgacctctccgccttcctcaacagcatgctcggcccgctcaacctccgcaccgacgagcggatgccgggaaccacctccgccgcgggcacggcgacccccgaggacgagcccgacgggttcgacgcggtcacgttcttccagaactacctccagaatctcatggacggcggcgccaacatccaggtcctcctcgacgacgccagcgtcggcctcgcccccggcatcggccgcgtcggcggcgccagcttcggggactacttcgtcggcccgggcctggagcagctcatcgagcagctcaccgagaacgacccgaaccgctacggcacgccgccggcggccaagtcggctctctccacgctccccgatgtcgtcgtgaccgacgccatggtcgccgcggcggatggcgccgagtgcgccgtctgcaaggaggatttctcgcctggggaaggggccaagcagatgccctgcaagcacatttaccacgccgactgcatcatgccatggctggatctccacaattcatgccccatatgccgctttgagctgcctactgatgaccctgattacgaggggcgtaagaaatcaaacccacagccaactgctggcgttgatgccggagctgcatctgggagttctactgctgctgaggagcgagaggagagtggggagagtgcgaggttggtcgaacggcggtttaacgtgtcgctgccatggccttttagtggattgggatcgcaaacgccgcagcaggatgggagcaatgggggcgctggtgccagtggctcgaaggatggaggcgcatccagtgacaaaaaataa

SEQ ID NO: 13459 - DNA, 2145 bp, Oryza sativa
  Clone ID: TFbOSC401901j.C1.o1.fg
atgtcgctggggctcaacctctgcgtctacgtgcccaggacgctggacgacggcgactcgccgtccaccgggtcgtccacggcggcgctggtgtcgccggtggcgtcctcgtcgtcggcggcgaccagcgccaacaccacgcccacggcggagcagagggtcaagggcgccggcgcgctcatgccgaccaccccgacgccgacctccgccggacttcgcctctccaaatccggcagcaaatccttcaagaaaacatgtgcgatatgtttgaccacaatgaagcctggtcagggccatgctctattcacagcagagtgctcacatacctttcacttccattgtatagctgcaaatgttaagcatggaagcaacaattgcccagtttgccgcaccaagtggaaggaactcccatttcgaggtcccttgcctggtgaatttcctcaaggaagtgcaaggattaatccagttaatgggcaccaaaatggcgggcagatgaccatactgcgaccacttccccgtgctcgttcttctggtcggctgcatcatatgacatcgttgttgcctgacactgaccgtagtatttttaacgatgatgaacccttggactcactgtctgaagcaaatgaaggctcgcagcaggggtgtttaagaacagtggaaataaagacatatcctgagttcactgaagttccagaaagtacttcagaaagaaattttacagtcctagttcatctaaaggcaccccttgctcagactttgcaaacaagcagcaaacttgaagatggcaatagcttgggcacaactcgagcccctgttgatctcatcacagtgcttgatgtcagtgggagcatggctggtaccaaacttgcattgctgaaaagagccatgggatttgtcattcagaaccttggctcctcagatcggctttctgtaattgccttctcatcatctgcacgtagactcttccccctccgtcggatgactgagactggtcgtcagcaaagcttgcaagctgtttattcactgacatcaaatggtgggaccaatattgctgagggcctgaggaaaggctccaaagtgattgaagatcgacaggccaagaatccagtgtgcagcatcatcctactatcagatgggcaagatacatatacagtctcaccaaccgctggtgtacacaaagcagcaccagagtactgctcactcctgccatatactagtaatggttgtcaacaggtaccagttcatgtctttggatttggtgctgaccatgattcagtctcgctgcattcaatctcacaaacctccgggggcaccttttcattcatagagacagaggctgccatccaagatgcatttgcccagtgtattggtggactcttgagtgttgttgcacaggatttgcatgtaaaggtggagagcctccaccctgatgtacactttggctcgatcagatcaggaagctattctagcagacttgcagatgacaagaggaatggctccatagatgttggtgacatgtatgccgaagaggagagggatttccttatgtcagtaaatgttcccccaggttacggtgaaacagcacttctcaaagttggctgtgtctacaaagatccactgatgaaggagactatcaatatggctgatgtgcaagtcaagatctctagaccagcattcgtctcagtacaaagcgtgtcaatcgaggtggaccgacaaaagaaccgtcttcatgcagctgaagtcatggctgaagcaaggttgtctgccgagcgtggtgacctgacacatgctgtttccttactcgaagactgccggaggatgatcatggggtcaacatcaggacaatccggtgatcggttgtgccaagcattggatgctgagctgaaggagatgcaagaaaggatggccaatcgccaaaggtacgaagcatcaggccgcgcctatgtcctctccggcttgagctcacactcatggcagagagcaactgcgcgaggtgactccacagacagcgagagcctaatccaggcctaccagacttcatccatggtcgacatgctgctgcgctcgcagacaatgagccgctcctcaacccctccacagatgaggcatgtgaagtcgtttccagcgcgcccgcagcctaggtaa

SEQ ID NO: 13460 - DNA, 945 bp, Oryza sativa
  Clone ID: TFbOSC19766j.C1.o10.fg
atggcggcgggaacgtcgtcgtcgtcgggaggcggatctgggccgttggtggtgagcaacggcgtgctgctcgccgcggtcatcttcctgttcatggtcgtcgtcttcgtcttcctcctctacctctacgccaagagatacctcggcgcgaacccgctgctcgcccccgtctcgccctcctcccgcttcctcttcctcgacgcctccccgttcccgcgccgcgggttgccggcggccgcgctgcgggcgctgcccgtcacggtctacgcgaagcccgcggcggcgcgcggcgaggaggcgctcgagtgcgcggtgtgcttgtccgaggtggccgacggcgagaaggtgcggatgctgcccaagtgcgaccatggattccacgtcgagtgcatcgacatgtggttccattcccacgacacctgcccgctctgccgcgcgcccgtggggcccgacgccggcggcgaggggctgccgcgcgtgccccggggaggaacccggcttgccatggactttcccccatgttccccccccaacgtcctcttctggggcaccgcccacgacgacgtcgccaacgccggtgaccgccacccgttccaccccccgccgccgccgccgcctctcatggccgcgccctccacgagctcctcggcgtccgcgcgcaggaaggagagcctcgtcatcgacatcccgtcgcgctctgccgccgccgccgcggcggactccgtcacgtcgtcctccgcctcgacgccgctgccggcgagcaggatggcggacgacatgaggtcgccggtgtcggcgcggctgcggtcgctgcgccgcctcctcagcaggggcaagcaggccgtggtcggaccgtccttcagcccgcgcggcggcggcgacatcgagcaggggctcgccggcgctccgccgaagacgcccaagacgccgccgccggcgaactga

SEQ ID NO: 13461 - DNA, 441 bp, Oryza sativa
  Clone ID: TFbOSC19766j.C1.o8.np
attattaattattttcctatcatttgattcattattaaatatagagtaaagtccatcgccggtctctaaacttgtaccgctgtgtcatcccggtccctaaactcgcaaattgactgttcaggtcctcaaacttgctcgactgtatcatcctggtccctaaacttgtagatcactcatttagatccttcaacttgttcaattgagtcaccccggtgtctaaacttggatttgaatatcatatgggtcaaataggatgggaccggggtgacacaagtgaacaagatggaggacctaaacgagtgatctgcaagtttagagaccgggatgacacagtcgaacaagtttaaggacctgaacggtcgatttgcgagtttagggaccgggatgacacatcggtacaagtttagggaccggtgatggactttactcttaaatatacta

SEQ ID NO: 13462 - DNA, 681 bp, Oryza sativa
  Clone ID: TFbOSC23270j.C1.o1.fg
atgttcttgtccgggatctcgccggcggtgcaccatgacctgcagccgggcggccgtagtccgtacgacggcgacgacggcgaccgcacgctggtggtgctgctcaccttcggcatcttcttctccttcgtcatcctctacctcgtcgccggcctcatctgggccgtcgtcatcaccgccgccgccgtcgtgctgtccttcctctacctcagggtccggcggcggcgcgccgccgtgggcggcacggcggcggcggcggcgcccaacgacgtggtcttcatcgtgggggctcatcaggctgctcggagcaccggcagcagcggcggcggcggtgatgtcgccgccgcggccatcgtgtcggcgatcccggcgttcgagtacaagagggtgaacggcggcggcggcgaggacggcggcgcggcggccgggtcggggtgggcgcagtgcgtgatatgcctggggctggtgcaggtcggcgaggtggtgcggcggctgccggcgtgcaagcacatgttccacgtggagtgcatcgacgcgtggctgagctcgcactcgacttgcccgatctgccgcgccgacgtcgtcgacgagctcgccgccgccgccgccggcggccggctttctctttctccctacggaactgaactaattcatatgaaattcataacagaattcctgtag

SEQ ID NO: 13463 - DNA, 915 bp, Oryza sativa
  Clone ID: TFbOSC400045j.C1.o24.fg
atgcggccgccctcgtcgtcggcgacgcccgggacgggccgggtgtcggcgttcacgatgcgcgcggtggcgcgcatgtcgagggcgcggtggttcatcttcctgaggcgggtgtaccagtaccagaacggcccgaggtccgacctgggctccaaccccttcaactcgcccggctggctcgccctcgagctcggcgtgatcatggcgcagatggtcgtcaccaccgccgtcgtcgccacctcccccaaggagcgccccgcgtggccgctccgggtttgggtcgccgcctacaacgtgggcaacgtgctcagcctccccctcctctactggcgccaccggcattcctcctccggcgcccgcggcggcacgctctccgacgatcccgagatgcacggcgccaacgaccctctaaggaacaggtcgtatctgatgaacaaggcacgggcgttcctggagctgttcttcgcgatgtggttcgtgatgggcaacgtgtgggtgttcgacgcgcggctcgggtcgttccaccgcgcgccgaggctgtacgcgctctgcatcggcctcctcgcatggaacgccgtcgtctactcgctcccattcctcctcttcctcctgctctgctgcttcgtcccggccgtcggctacgcgctcgggtacaacatgaactccgcgtccgtcggccggggcgcctccgacgagcagctcgccgcgctgccgcagtggcggttcaaggagccggccgacgcgccgagagaccgcgaccacgacgatcaggagtgctgcatatgcctggctcagtacaaggagaaggaggaggtgaggcagctgccgtgcacgcacatgttccacctgaaatgcgtggacaggtggctcaggatcatctcctcttgccctctctgcaagcaagagctcagctag

SEQ ID NO: 13464 - DNA, 804 bp, Oryza sativa
  Clone ID: TFbOSC400378j.C1.o8.fg
atgctggcggcggcggcggcgatcttcatcacgttcgtcgtgtgcttctacctcttcctctgcgccaagaggtaccgcggcgccgcgcccacgatcggcggcgacagcggtgggggagggaggggacgcgcgcggttcgtgttcgggggccccggggacggcgggtgcggaggcgggagggggcttgacgaggcggccatcgcggcgctgccgacgaaggtggtggcggcggcggccgaggggggcgacggcggcgaccccgcggcggactgcgccgtctgcatcacggagctcgccgccggggagtccgcccgcgtgctgccgcggtgcggccacgggttccacgtcgagtgcgtcgacatgtggctccggtcaaactccacctgcccgctctgccgctgcgccgtcatcgacgaggcgctgccgccgccgcccgccgtgcgcccgccggaggctgacgcggagtcgcccaacttccccaccaacgtgctcttcttcggctcccaggacgccgtcaggacaggcggcgccgccgcggcaacgccgccgccgccgcctccgtcgtcccatcatcagcagcaaccggccttcccgccgcagccgtcggcgggacccatcgccggagtcgccgccgtggtggaagcggcgaggatagcggccctgcggcggctgctgggctgcggcggcgcgactcccccgcccccgccggcgccggcgcagggcgaccgcgacgtggagatgggcctccccggcggcgagagcagcgcgtcgcggccggcgacgaagccgcagccaggttcttga

SEQ ID NO: 13465 - DNA, 588 bp, Oryza sativa
  Clone ID: TFbOSC405090j.C1.o3.fg
atgctgctcgtcaacctgtactcgcggctcacggcgagcaccggcgtcggcgtcggcgtcgacgacgatgacgacgacggcagcggcgggtatggggttctcgacggcgcgtgcggcggcacgctcgccgtgttctgcgccctcgccgtctccgtcgtcgtctggaaggcgtgcgcgttcgtcgccatggccgccgcgctcctcgccatcggctggcgcgtcgtggcgccgcggagatcagtggggcgcgcgggcgcgggagcccccacgccggccgagtgcgggctcacggccgcggcgatcgacgcgctgccggcgtcggagtacgagcgcccgcgcggcggcggcggcgacccggcgtgctcggtgtgcctcgaggacgtccgtggcggcgagacggtgcggtggctgccggcgtgcgggcacctgtaccacgcggcgtgcatcgacgcgtggctgcgctcgcgcacgacgtgcccgctctgccgctccgacctgtcgtcgcggcgaggaggcacggcgagcgggcgcccgcggccacggctggtgacgcacgagtcgttgctgccgccattgccttccgtttaa

SEQ ID NO: 13466 - DNA, 490 bp, Oryza sativa
  Clone ID: TFbOSC918j.C1.o2.np
tccgacgatcaaatcagtaatcttgaatatggcggctttgaacggtaaggtggtggtggcggtgatggtggccggcgggagctccggcgccttggacgccaacatggtcatcgtcctcgccgcgctgctctgcgtcgtcatctgctccctcggcctcagctccctcatccgctgcgcgctccactgcgcccgcggcctctcaccctcacccgccatggcgacgccggcagctgccaccaccacgggcgggctgaagaagaaggagctgaggaggattacggtggaggtgtacggcgccaagcaggccggcgtccccgacgccgagtgcgccatctgcctgggcgacttcgccgacggcgacaaggtgcgcgtgctccccaggtgccaccacggcttccacgtcggctgcatcgacacgtggctcgccgcgcacacgtcctgccctacttgccgggactccattctctccgtccatgccggagtcaccggc

SEQ ID NO: 13467 - DNA, 3006 bp, Oryza sativa
  Clone ID: TFbOSC412549j.C1.o5.fg
atgtcgacgggcgggaacggcggcggcgtcggcgtgcggcggcggaggtggaacctgtactggtgctacgtgtgccgccgggcgctgcgggtggtggtgccttcggcgacgtccgacgtctactgcccgcgctgcttcggccgcttcctccacgagatcgacctgccggtgccgcgcgtgagcccgccggcggaggaccagttcttccagccgccgttcttgccgtacgacggcccacgccgctgggtcctctacactggcggcggcggcggcggggactacggcggcgctgatgtaacggcgcgccgccgccgcttgccgtcgccaccgccggcgccgggaacgcggcgccaggacggtgcaggcgatggcgatccacctccaccggcgccggccatcgatccgggggagtacttcgccgggcccgacctgaacgcgctgatcgacgcgctcacgcaggacgaccgccccgggccgccgccggcgccggagtcggccatcgagtccctccccacggtgcacatctcgccggaccatctccccgccgacggcggctcggagtgccccgtctgcaaggaggagttcgagctcggggaggccgcgcgcgagctgccgtgcaagcacgcgtaccactcagactgcatcgtgccatggctccggctgcacaactcctgccccgtctgccggcaggaggtgccgccgccgccggagccggacggtgaatctccgggcatcgacggcggctgtgacgacggtgtcggaggaggtggagagccggctgagccgccacggccggccatggccggctgggaccctattgcgctgctggcgattgcactacggccggacttgaatggttgggagaacagccatggccggagcgagagtgaagcggatgacgatgaggtcgccggcggcggcgtcagcccacacttattaaagcggacaacgactttgacattctgggttttgcacccaccaataattactggagttcatgcactcaccaaaccggcacttgacgaacgatgccggtggaatcggttcggattcttcctttttgacgaaaagatcgggatgatcgcacgcgataccgttctgcgtttcgccgtgcgattgttcgtcgtgatcgtcgtctcgtctcgttcttcctcggccgacgacggcggcggcgacggcggcgtcgacttcatctaccaaggtttccagcacgcggcgaacctgaccatggacgggtcggcgaaggtgctgcacggcggcgcgctccagctcaccaacgacagcaaccgcctcgtcggccacgcgttccacgccgcgccggtgcggtttctcgacgacggcgccggcggcggcgggggaggagtggtgtcgtcgttcagcacggcgttcgtcctcgacatcgtcaccgtcgggagcggcggcggccacggcctcgcgttcgtgatctacctcggcgtcctcgggccccgcaccaacgggaacgcgtccgaccacgtcttcgccgtcgagttcgacacggtgatggacctcgagatgaacgacaccaacggcaaccacgtcggcgtcgacgtgaacagcctcgtgtcggtcgtgtcggagccggtggcgtactacgccggcgacgggagcaccaaggtgcccgtgcagctggagagcgcgcagcaaatccaggcgtggatagactacgacggcggcagcagcatcctcaacgtcaccgtcgcgccggcgacggtgacggagcggcctcgccggccgctcatctccacgaagctcgacctcctgccgatcttcaaggagaacatgtacgttgggttctcgtcggcgacggggaagctggcgagctcgcactacatcttggcatggagcttccggacgaacggcgtcgcgcaatccatcgatctccggaggctgcccaaagtcccgaggcagagctcgccgccgcccaagctgctcatcatcaagttcgccgcggtggcctgtgcaggaacactcaccctgatcgccgcggcgatggtcgccgtgctctggctccggcgaagggcggcgctcgccgacacgctggaggagtgggagctggagcaccctcagaggatcccgtacaaggagctctacaaggcgaccaaggggttcaaggagagcgagctccttggcgccggcggcttcggccaggtgtacagaggcgtgctccggcgccgctccggcgaggcggtggcgatcaagcggatctcgaacgggacacggcaagggatgagggagttcgtcgccgaggtcgccagcctcgggcggatgcgccaccgcaacctgcggttcgccatcctcaagggcgtcgcccatggcctgctctacctgcacgaggagtgggagcacgtggtggtgcaccgcgacgtgaaggcgaacaacgtgctcctcggcgccggcgacacgggggccgcccggctcggcgacttcggcctcgcgaggctctacgagcacggcgcgacgccggcgacgacgcgcgtggccggcacgctgggctacatggcgcccgagctcacgttcaccagccgcgccacgacggccaccgacgtgttctccttcggcgcgctgctcctcgaggtggcgtgcgggcgccgcccgatcgagccggcggcggcgggggaggcggacggcgacgtgctcctggtgcggtgggtgcgagaccgcgcgctcgacggcgacggcggcggcggcgacgtgctgcgagccgtggacccgaggctggaggggtgctacgacgaggaggaggcgaggctggtgctgtggctcgggctgatgtgcagccaggcgaggccggaggcgaggcccagcatgaggcaggtgtgccggtatctcgacggcgaggagatgctgcaggaggacgccacgccggcggcgatcttctccggcgccgactcgtccgatctcttcggtggctcgttcgtcgtgtccatgacgtcatcctccgccggcggcaccatgtcggccagctcgctgcaaggcggccggtga
